(19) United States
(12) Patent Application Publication
(10) Pub. No.: US 2005/0100885 A1
(43) Pub. Date: May 12, 2005

(54) Compositions and methods for the treatment of severe acute respiratory syndrome (SARS)

(76) Inventors: Stanley T. Crooke, Carlsbad, CA (US); David J. Ecker, Encinitas, CA (US); Rangarajan Sampath, San Diego, CA (US); Susan M. Freier, San Diego, CA (US); Christian Massire, Carlsbad, CA (US); Steven A. Hofstadler, Oceanside, CA (US); Kristin Sannes Lowery, Vista, CA (US); Eric E. Swayze, Carlsbad, CA (US); Brenda F. Baker, Carlsbad, CA (US); C. Frank Bennett, Carlsbad, CA (US)

Correspondence Address: COZEN O'CONNOR, P.C., 1900 MARKET STREET, PHILADELPHIA, PA, 19103-3508, US

(21) Appl. No.: 10/831,901

(22) Filed: Apr. 26, 2004

Related U.S. Application Data
(60) Provisional application No. 60/466,426, filed on Apr. 28, 2003.
(60) Provisional application No. 60/468,562, filed on May 6, 2003.
(60) Provisional application No. 60/467,770, filed on Apr. 30, 2003.
(60) Provisional application No. 60/468,627, filed on May 6, 2003.
(60) Provisional application No. 60/477,637, filed on Jun. 10, 2003.
(60) Provisional application No. 60/483,579, filed on Jun. 27, 2003.
(60) Provisional application No. 60/565,370, filed on Apr. 26, 2004.

(51) Int. Cl. C12Q 1/70; C12Q 1/68; A61K 48/00; C07H 21/02

(52) U.S. Cl. 435/5; 514/44; 536/23.72; 435/6

(57) ABSTRACT

The present invention provides design and synthesis of oligomeric compounds and compositions that can be administered to reduce the activity of SARS virus in vivo or in vitro, to prevent or treat SARS virus-associated disease, to detect AARS virus, and to diagnose SARS virus-associated diseases.

### CROSS-REFERENCE TO RELATED APPLICATIONS

[0001] This application claims priority to: 1) U.S. provisional application Ser. No. 60/466,426 filed Apr. 28, 2003; 2) U.S. provisional application Ser. No. 60/468,562 filed May 6, 2003; 3) U.S. provisional application Ser. No. 60/467,770 filed Apr. 30, 2003; 4) U.S. provisional application Ser. No. 60/468,627 filed May 6, 2003; 5) U.S. provisional application Ser. No. 60/477,637 filed Jun. 10, 2003; 6) U.S. provisional application Ser. No. 60/483,579 filed Jun. 27, 2003; and 7) U.S. provisional application Attorney Docket No. ISIS0083-002, titled “SARS Oligomeric Compounds” filed Apr. 26, 2004, each which is incorporated herein by reference in its entirety.

### REFERENCE TO SEQUENCE LISTING SUBMITTED ON COMPACT DISK

[0002] A Sequence Listing is located on a separate CD-R entitled “Copy 1” in a file entitled “ISIS0083-100.SEQ”, created Apr. 26, 2004, containing 8,530 kilobytes, and is incorporated herein by reference in its entirety. The total number of compact disks, including duplicates (i.e., “Copy 2”), submitted herewith is two, and there is one file on each of the submitted compact disks.

### FIELD OF THE INVENTION

[0003] This invention relates to the design and synthesis of oligomeric compounds and compositions that can be administered to reduce the activity of SARS virus in vivo or in vitro, to prevent or treat SARS virus-associated disease, to detect SARS virus, and to diagnose SARS virus-associated diseases.

### BACKGROUND OF THE INVENTION

[0004] The Coronaviridae is the family of viruses that infect humans and animals, and includes a species of virus that causes a common cold-like respiratory illness known as Human Coronavirus 229E (HCo-V-229E). Also included in this family are an avian infectious bronchitis virus (IBV), murine hepatitis virus (MHV), porcine transmissible gastroenteritis virus PRCoV, porcine respiratory coronavirus and bovine coronavirus, among others (Lai and Holmes, Chapter 35 in the virus book).

[0005] Coronaviruses are large, enveloped, plus-stranded RNA viruses. They cause the common cold in all age groups accounting for approximately 15% of all colds. Coronaviruses have been implicated in the etiology of gastrointestinal disease in infants. They also cause economically important diseases in animals (e.g. avian infectious bronchitis and porcine transmissible gastroenteritis). Coronaviruses get their name because in electron micrographs the envelope glycoproteins appear to form a halo or corona around the periphery of the virion. The coronaviruses are also interesting because they are the only plus-strand RNA viruses with a helical nucleocapsid.

[0006] Coronaviruses have the largest genomes of all RNA viruses and replicate by a unique mechanism which results in a high frequency of recombination. Virions mature by budding at intracellular membranes, and infection with some coronaviruses induces cell fusion (Fields Virology, D. M. Knipe, P. M. Howley Eds. 2001, Lippincott Williams & Wilkins, Publishers, Philadelphia, 1163-1179).

[0007] Human coronaviruses grow poorly in culture and cannot be analyzed in detail. Most studies are carried out with mouse hepatitis virus, a coronavirus that grows well in culture and is related to human strain OC43. Infection begins when the virus recognizes a cell surface receptor found to be aminopeptidase N for strain 229E and sialic acid for OC43. The virus enters the cell by endocytosis and membrane fusion.

[0008] As with most RNA viruses, coronavirus replication takes place entirely in the cytoplasm. Once the viral RNA enters the cytoplasm it is translated to produce the viral RNA-dependent RNA polymerase which then makes a full-length complementary (minus strand) copy of the virion RNA. The minus strand serves a template for transcription of the seven capped and polyadenylated mRNAs. These are arranged as a nested set in which all have the same 3′ end but each is smaller by one gene than the next larger one. All have the same 5′ end, a 72 nucleotide leader sequence, encoded only at the 5′ end of the genome RNA. This suggests each mRNA is transcribed by a mechanism in which transcription starts by synthesizing the leader sequence and then “skips” to the beginning of one of the genes with each mRNA ending at the same 3′ end. Only the first gene (the one closest to the 5′ end) is translated on each mRNA regardless of how many genes are present. Thus, there is no polyprotein processing in coronavirus replication.

[0009] Coronaviruses are a major cause of common colds in the winter months. The virus is found throughout the world. Antibodies begin to appear in childhood, and are found in more than 90% of adults. The frequency of coronavirus respiratory infections is highly variable from year to year. The highest incidence occurs in years when rhinovirus colds are lowest. Coronavirus colds tend to occur in defined outbreaks. Laboratory diagnosis is by ELISA, complement fixation or hemagglutination tests. Human coronaviruses cannot be isolated by growth in culture.

[0010] Colds due to coronaviruses cannot be distinguished clinically from rhinovirus colds. The incubation period is 2-5 days and symptoms last 5-7 days. Immunity is directed to the major virus surface glycoprotein, E2. Reinfection may last for several years although reinfection is common probably because of the high level of virus genetic recombination.

[0011] Coronaviruses are transmitted by aerosols of respiratory secretions, by the fecal-oral route, and by mechanical transmission. Most virus growth occurs in epithelial cells. Occasionally the liver, kidneys, heart or eyes may be infected, as well as other cell types such as macrophages. In cold-type respiratory infections, growth appears to be localized to the epithelium of the upper respiratory tract, but there is currently no adequate animal model for the human respiratory coronaviruses. Clinically, most infections cause a mild, self-limited disease (classical “cold” or upset stomach), but there may be rare neurological complications.

[0012] In late 2002, several hundred cases of an atypical pneumonia were reported in Guangdong Province of the People's Republic of China. Months later, similar cases were identified in Canada, Vietnam and Hong Kong. The World Health Organization (WHO) identified the emergent disease as “severe acute respiratory syndrome” or SARS. In March 2003, a novel coronavirus (SARS-CoV) was discovered in association with cases of SARS. By late April 2003, over 4300 SARS cases, resulting in about 250 deaths, were reported from 25 countries globally. The SARS virus is believed to be spread by droplets produced by coughing and sneezing, but other routes of infection may also be involved, such as contamination of objects by the hands. As of May 7, 2003, the WHO estimates SARS case fatality to be 14-15%. As of Jun. 3, 2003 the total number of worldwide cases of SARS reported by WHO is 8398.

[0013] It is now possible to generally describe the course of the disease. The incubation period following initial infection is about 2 to 7 days. The infection is generally characterized by fever, which is followed in the next few days by dry, non-productive cough and shortness of breath. The disease results in death in about 3 to 10% of cases.

[0014] The complete genome of SARS-CoV has been identified, as well as common variants thereof. The genome of SARS-CoV is a 29,727-nucleotide polyadenylated RNA, has 11 open reading frames, and 41% of the residues are G or C. The genomic organization is typical of coronaviruses, with the characteristic gene order (5′-replicase (rep), spike (S), envelope (E), membrane (M), nucleocapsid (N)-3′ and short untranslated regions at both termini. The SARS-CoV rep gene, which comprises about two-thirds of the genome, is predicted to encode two polyproteins that undergo co-translational proteolytic processing. There are four open reading frames (ORFs) downstream of rep that are predicted to encode the structural proteins, S, E, M and N, which are common to all known coronaviruses. The hemagglutinin-esterase gene, which is present between ORFIb and S in group 2 and some group 3 coronaviruses was not found. Phylogenetic analyses and sequence comparisons showed that SARS-CoV is not closely related to any of the previously characterized coronaviruses.

[0015] Coronaviurses also encode a number of non-structural proteins that are located between S and E, between M and N, or downstream of N. These non-structural proteins, which vary widely among the different coronavirus species, are of unknown function and are dispensable for virus replication.

[0016] Diagnostic tests are now available, but all have limitations as tools for bringing an outbreak quickly under control. An ELISA test detects antibodies reliably but only from about day 20 after the onset of clinical symptoms. It therefore cannot be used to detect cases at an early stage prior to spread of the infection to others. The second test, an immunofluorescence assay (IFA), detects antibodies reliably as of day 10 of infection. It shares the defect of the ELISA test in that test subjects have become infective prior to IFA-based diagnosis. Moreover, the IFA test is a demanding and comparatively slow test that requires the growth of virus in cell culture. The third test is a polymerase chain reaction (PCR) molecular test for detection of SARS virus genetic material is useful in the early stages of infection but undesirably produces false-negatives. Thus the PCR test may fail to detect persons who actually carry the virus, even in conjunction with clinical diagnostic evaluation, creating a dangerous sense of false security in the face of a potential epidemic of a virus that is known to spread easily in close person-to-person contact (WHO. Severe acute respiratory syndrome (SARS). Wkly Epidemiol. Rec., 2003, 78, 121-122).

[0017] Rapid and definitive microbial identification is desirable for a variety of industrial, medical, environmental, quality, and research reasons. Traditionally, the microbiology laboratory has functioned to identify the etiologic agents of infectious diseases through direct examination and culture of specimens. Since the mid-1980s, researchers have repeatedly demonstrated the practical utility of molecular biology techniques, many of which form the basis of clinical diagnostic assays. Some of these techniques include nucleic acid hybridization analysis, restriction enzyme analysis, genetic sequence analysis, and separation and purification of nucleic acids (See, e.g., J. Sambrook, E. F. Fritsch, and T. Maniatis, Molecular Cloning: A Laboratory Manual, 2nd Ed., Cold Spring Harbor Laboratory Press, Cold Spring Harbor, N.Y., 1989). These procedures, in general, are time-consuming and tedious. Another option is the polymerase chain reaction (PCR) or other amplification procedure which amplifies a specific target DNA sequence based on the flanking primers used. Finally, detection and data analysis convert the hybridization event into an analytical result.

[0018] Other techniques for detection of bioagents include high-resolution mass spectrometry (MS), low-resolution MS, fluorescence, radioiodination, DNA chips and antibody techniques. None of these techniques is entirely satisfactory.

[0019] Mass spectrometry provides detailed information about the molecules being analyzed, including high mass accuracy. It is also a process that can be easily automated. However, high-resolution MS alone fails to perform against unknown or bioengineered agents, or in environments where there is a high background level of bioagents (“cluttered” background). Low-resolution MS can fail to detect some known agents, if their spectral lines are sufficiently weak or sufficiently close to those from other living organisms in the sample. DNA chips with specific probes can only determine the presence or absence of specifically anticipated organisms. Because there are hundreds of thousands of species of benign bacteria, some very similar in sequence to threat organisms, even arrays with 10,000 probes lack the breadth needed to detect a particular organism.

[0020] Antibodies face more severe diversity limitations than arrays. If antibodies are designed against highly conserved targets to increase diversity, the false alarm problem will dominate, again because threat organisms are very similar to benign ones. Antibodies are only capable of detecting known agents in relatively uncluttered environments.

[0021] Several groups have described detection of PCR products using high resolution electrospray ionization-Fourier transform-ion cyclotron resonance mass spectrometry (ESI-FT-ICR MS). Accurate measurement of exact mass combined with knowledge of the number of at least one nucleotide allowed calculation of the total base composition for PCR duplex products of approximately 100 base pairs. (Aaserud et al., J. Am. Soc. Mass Spec., 1996, 7, 1266-1269; Muddiman et al., Anal. Chem., 1997, 69, 1543-1549; Wunschel et al., Anal. Chem., 1998, 70, 1203-1207; and Muddiman et al., Rev. Anal. Chem., 1998, 17, 1-68). Electrospray ionization-Fourier transform-ion cyclotron resistance (ESI-FT-ICR) MS may be used to determine the mass of double-stranded, 500 base-pair PCR products via the average molecular mass (Hurst et al., Rapid Commun. Mass Spec., 1996, 10, 377-382). The use of matrix-assisted laser desorption ionization-time of flight (MALDI-TOF) mass spectrometry for characterization of PCR products has been described. (Muddiman et al., Rapid Commun. Mass Spec., 1999, 13, 1201-1204). However, the degradation of DNAs over about 75 nucleotides observed with MALDI limited the utility of this method.

[0022] U.S. Pat. No. 5,849,492 describes a method for retrieval of phylogenetically informative DNA sequences which comprise searching for a highly divergent segment of genomic DNA surrounded by two highly conserved segments, designing the universal primers for PCR amplification of the highly divergent region, amplifying the genomic DNA by PCR technique using universal primers, and then sequencing the gene to determine the identity of the organism.

[0023] U.S. Pat. No. 5,965,363 discloses methods for screening nucleic acids for polymorphisms by analyzing amplified target nucleic acids using mass spectrometric techniques and to procedures for improving mass resolution and mass accuracy of these methods.

[0024] WO 99/14375 describes methods, PCR primers and kits for use in analyzing preselected DNA tandem nucleotide repeat alleles by mass spectrometry.

[0025] WO 98/12355 discloses methods of determining the mass of a target nucleic acid by mass spectrometric analysis, by cleaving the target nucleic acid to reduce its length, making the target single-stranded and using MS to determine the mass of the single-stranded shortened target. Also disclosed are methods of preparing a double-stranded target nucleic acid for MS analysis comprising amplification of the target nucleic acid, binding one of the strands to a solid support, releasing the second strand and then releasing the first strand which is then analyzed by MS. Kits for target nucleic acid preparation are also provided.

[0026] PCT WO97/33000 discloses methods for detecting mutations in a target nucleic acid by nonrandomly fragmenting the target into a set of single-stranded nonrandom length fragments and determining their masses by MS.

[0027] U.S. Pat. Nos. 5,547,835, 5,605,798, 6,043,031, 6,197,498, 6,221,601, 6,221,605, 6,277,573, 6,235,478, 6,258,538, 6,300,076, 6,428,955 and 6,500,621, describe fast and highly accurate mass spectrometer-based processes for detecting the presence of a particular nucleic acid in a biological sample for diagnostic purposes.

[0028] WO 98/21066 describes processes for determining the sequence of a particular target nucleic acid by mass spectrometry. Processes for detecting a target nucleic acid present in a biological sample by PCR amplification and mass spectrometry detection are disclosed, as are methods for detecting a target nucleic acid in a sample by amplifying the target with primers that contain restriction sites and tags, extending and cleaving the amplified nucleic acid, and detecting the presence of extended product, wherein the presence of a DNA fragment of a mass different from wild-type is indicative of a mutation. Methods of sequencing a nucleic acid via mass spectrometry methods are also described.

[0029] WO 97/37041, WO 99/31278 and U.S. Pat. No. 5,547,835 describe methods of sequencing nucleic acids using mass spectrometry. U.S. Pat. Nos. 5,622,824, 5,872,003 and 5,691,141 describe methods, systems and kits for exonuclease-mediated mass spectrometric sequencing.

[0030] Programmed ribosomal frameshifting is used by viruses (including all retroviruses), DNA insertion sequences, bacteria, and yeast (Farabaugh, Microbiol. Rev., 1996, 60, 103-134; and Gesteland et al., Annu. Rev. Biochem., 1996, 65, 741-768), and is an essential mechanism for regulating the relative expression of proteins that are encoded in two overlapping translational reading frames. The shift occurs at a heptanucleotide of general sequence X XXY YYN which is known as a “slippery site” (Giedroc et al., J. Mol. Biol., 2000, 298, 167-185). An mRNA pseudoknot induces elongating ribosomes to pause with their A- and P-site tRNAs positioned over the slippery site. While paused at the slippery site, if the ribosome shifts by 1 base in the 5′ direction, the non-wobble bases of both the A- and P-site tRNAs can bind with the new -1 frame codons to make the protein in the -1 frame XXX YYY N as the mRNA pseudoknot is denatured and elongation continues in the new reading frame.

[0031] The efficiency of frameshifting depends on the nature of the slippery site, as well as the sequence and complexity of the downstream pseudoknot motif (Egli et al., Proc. Natl. Acad. Sci., 2002, 99, 4302-4307). Thermodynamic or kinetic control of pseudoknot unfolding may be important in regulating the efficiency of ribosomal frameshifting (Giedroc et al., J. Mol. Biol., 2000, 298, 167-185).

[0032] Movement of 9 Å by the anticodon loop of the aminoacyl-tRNA at the accommodation step normally pulls the downstream mRNA a similar distance along with it. Plant et al. have suggested that the downstream mRNA pseudoknot provides resistance to this movement by becoming wedged into the entrance of the ribosomal mRNA tunnel. These two opposing forces result in the creation of a local region of tension in the mRNA between the A-site codon and the mRNA pseudoknot. This can be relieved by one of two mechanisms; unwinding the pseudoknot, allowing the downstream region to move forward, or by slippage of the proximal region of the mRNA backwards by one base. The observed result of the latter mechanism is a net shift of reading frame by one base in the 5′ direction, that is, a -1 ribosomal frameshift (Plant et al., RNA, 2003, 9, 168-174).

[0033] Ribosomal frameshifting has been documented as an essential feature in a number of viruses. These include the retroviruses (such as HIV), the Coronaviridae, Astroviridae, Totiviridae, among other families of viruses.

[0034] The frameshift site in coronaviruses is in between ORFs 1a and 1b. ORF 1a contains a number of proteins, including proteases, and ORF 1b contains the RNA-dependent-RNA-polymerase.

[0035] The RNA-dependent-RNA-polymerase is an essential gene. Unlike some other RNA-genome viruses, coronaviruses do not carry a copy of the RNA-dependent-RNA-polymerase in the virion particle. Therefore, to succeed in replicating, the RNA-dependent-RNA-polymerase must be translated directly from the genomic RNA. Since the RNA-dependent-RNA-polymerase is located downstream of the frameshift site, it is absolutely required that the frameshift signal work in order to produce the coronavirus RNA-dependent-RNA-polymerase, which is -1 out of frame with respect to the upstream ORF 1a.

[0036] If the SARS virus behaves the same way as the previously documented coronaviruses, it will have frameshift site in a similar position of the genome, and the function of the frameshift site will be essential to the life cycle of the virus.

[0037] Thus, modulation of the frameshifting process is expected to provide a useful strategy with which to disrupt the translation of the RNA-dependent-RNA-polymerase which is essential for the propagation of SARS-CoV.

[0038] Previous attempts to modulate ribosomal frameshifting of viral RNA have been limited to investigations of the Human immunodeficiency virus (HIV). For example, disclosed and claimed in U.S. Pat. No. 5,707,866 and PCT publication WO 95/27054 are methods and compositions for inhibition of HIV ribosomal frameshifting with antisense DNA oligomers complementary to regions of the RNA of the small ribosomal subunit of mammalian cells which are involved in the control of translation fidelity (Brakier-Gingras, 1998).

[0039] Vickers and Ecker have reported enhancement of ribosomal frameshifting by oligonucleotides targeted to the HIV gag-pol region (Vickers et al., Nucleic Acids Research, 1992, 20, 3945-3953).

[0040] While it is currently believed that SARS-CoV is the primary etiological agent for SARS, it is not known whether other infective agents, such as viruses, may be responsible for higher virulence, morbidity and/or mortality rates. There may also be a genetic component to morbidity and mortality, at it has been shown in some cases that related patients seem to have similar clinical outcomes. While these possibilities cannot be ruled out, it is accepted that reducing viral load in the lungs will correlate with improved prognosis.

[0041] A well studied frameshift site is the Infectious Bronchitis Virus, a coronavirus that infects chickens. The structure of the IBV virus is a slippery site followed by a pseudoknot.

[0042] Oligomeric compounds which hybridize to RNA of the frameshift site will provide a useful strategy with which to modulate the function of the frameshift site and provide a basis for discovery of antiviral drugs for viruses such as the coronaviruses which are causally-linked to SARS. Additionally, it is expected that small molecules which specifically bind to RNA regions of specific secondary structure will also provide a means of modulation of ribosomal frameshifting.

[0043] The present invention provides methods and compositions for modulation of ribosomal frameshifting, including the frameshifting occurring in the RNA of coronaviruses such as SARS-linked coronaviruses.

[0044] Nucleosides and their derivatives have been used successfully in treatment of some viral infections, however to date no effective antiviral therapy has been identified for SARS, especially in the late stages.

[0045] Antisense agents, such as antisense oligonucleotides, PNAs, LNAs and morpholinos have been used to treat a variety of disease states. The first FDA-approved antisense drug is a phosphorothioate oligonucleotide (Vitravene®, fomivirsen) available through Isis Pharmaceuticals, Inc., Carlsbad, Calif. Fomivirsen is an antiviral antisense compound effective for treating CMV retinitis. It has been theorized to treat other viruses, e.g. hepatitis C, with antisense drugs, however it has not been previously suggested to treat coronaviruses, and especially SARS-CoV by inhalation of one or more antiviral compounds.

[0046] Methods of delivering drugs by pulmonary administration have been described. For example, each of U.S. Pat. Nos. 6,550,472, 6,546,927, 6,543,443, 6,540,154, 6,540,153, 6,467,476 and 6,427,682 teaches methods and devices useful in the pulmonary administration of drugs, and each is specifically incorporated herein by reference, however none has demonstrated successful treatment of SARS by inhalation therapy. Also, each of U.S. Pat. Nos. 6,503,480, 6,447,753, 6,387,390, 5,985,320, 5,985,309 and 5,855,913 teaches methods and devices useful in the pulmonary administration of drugs, and each is specifically incorporated herein by reference, however none has demonstrated successful treatment of SARS by inhalation therapy. In addition, each of U.S. Pat. Nos. 6,431,167, 6,408,854, 6,349,719, 6,167,880, 6,098,620, 5,971,951, 5,957,124, 5,906,202, 5,819,726, 5,755,218, and 5,522,385 teaches methods and devices useful in the pulmonary administration of drugs, and each is specifically incorporated herein by reference, however none has demonstrated successful treatment of SARS by inhalation therapy. Likewise, each of U.S. Pat. Nos. 6,546,929, 6,543,448, 6,509,006, 6,423,344, 6,303,582, and 6,138,668 teach methods of delivering drug to the lung, and each is specifically incorporated herein by reference, however none has demonstrated successful treatment of SARS by inhalation therapy.

[0047] Methods of delivering medicaments by nasal instillation have been described. For example, U.S. Pat. Nos. 6,551,578, 6,554,497, 6,485,707, 6,468,507, 6,464,959, 6,294,153, 6,214,805, 6,087,343, 5,985,320, and 5,744,166, each of which is expressly incorporated herein by reference, disclose compositions and methods for intranasal instillation of drug compositions.

[0048] Bioadhesives have been described for facilitating transport of medicaments across endothelial mucosa. For example, U.S. Pat. No. 6,228,383, incorporated herein in its entirety, teaches use of bioadhesive fatty acid esters for facilitating transport of drug substances across mucosa in the lung, nose and other tissues.

[0049] Penetration enhancers have been described in U.S. patent application Ser. No. 09/315,298, filed on May. 20, 1999 and incorporated herein by reference. Penetration enhancers facilitate the penetration of mucosa, including pulmonary and nasal mucosa.

[0050] Oligomeric compounds which hybridize to RNA of the frameshift site will provide a useful strategy with which to modulate the function of the frameshift site and provide a basis for discovery of antiviral drugs for viruses such as the coronaviruses which are causally-linked to SARS. Additionally, it is expected that small molecules which specifically bind to RNA regions of specific secondary structure will also provide a means of modulation of ribosomal frameshifting.

[0051] Thus, there is a need for a method for bioagent detection and identification which is both specific and rapid, and in which nucleic acid sequencing is not absolutely required in order to achieve the desired detection or identification. This need is particularly acute for novel infectious agents such as the SARS-CoV that spread rapidly and that may complicate traditional detection methods by mutating over relatively short periods of time.

[0052] The present invention provides methods and compositions for modulation of ribosomal frameshifting, including the frameshifting occurring in the RNA of coronaviruses such as SARS-linked coronaviruses, and addresses the need for rapid identification of bioagents, including the SARS coronavirus, which is a major health threat.

### SUMMARY OF THE INVENTION

[0053] The present invention provides oligomeric compounds comprising from 8 to about 80 nucleobases targeted to a nucleic acid molecule encoding SARS virus, wherein the compound hybridizes with the nucleic acid molecule encoding SARS virus and reduces the expression of SARS virus by at least 50%. In some embodiments, the compound comprises from 12 to about 50 nucleobases or from 15 to about 30 nucleobases. In some embodiments, the compound is an oligonucleotide, an antisense oligonucleotide, a DNA oligonucleotide, an RNA oligonucleotide, or a chimeric oligonucleotide. In some embodiments, at least a portion of the compound hybridizes with RNA to form an oligonucleotide-RNA duplex. In some embodiments, the compound has at least 70%, at least 80%, at least 90%, or at least 95% complementarity with the nucleic acid molecule encoding SARS virus. In some embodiments, the compound comprises at least one modified internucleoside linkage, modified sugar moiety, or modified nucleobase. In some embodiments, the compound comprises at least one 2′-O-methoxyethyl sugar moiety, at least one phosphorothioate internucleoside linkage, or at least one 5-methylcytosine.

[0054] The present invention also provides methods of reducing the expression of a SARS virus in cells or tissues comprising contacting the cells or tissues with a compound described herein so that expression of SARS virus is reduced.

[0055] The present invention also provides methods of screening for a modulator of a SARS virus comprising contacting a suitable target region of a nucleic acid molecule encoding a SARS virus with one or more candidate modulators of SARS virus, and identifying one or more modulators of SARS virus expression that modulate the expression of the SARS virus.

[0056] The present invention also provides diagnostic methods for identifying a disease state comprising identifying the presence of a SARS virus in a sample using at least one primer.

[0057] The present invention also provides kits and assay devices comprising a compound described herein.

[0058] The present invention also provides methods of treating an animal having a disease or condition associated with a SARS virus comprising administering to the animal a therapeutically or prophylactically effective amount of a compound described herein so that expression of SARS virus is reduced. In some embodiments, the disease or condition is a viral infection.

[0059] The present invention also provides compounds 8 to 80 nucleobases in length targeted to a frameshift site of viral RNA, wherein the compound specifically hybridizes with the frameshift site and modulates the process of ribosomal frameshifting of the viral RNA.

[0060] The present invention also provides methods of screening for a modulator of a frameshift site by contacting a suitable target segment of a frameshift site with one or more candidate modulators of the frameshift site and measuring the extent of frameshift modulation.

[0061] The present invention also provides methods of treating an individual having a disease or condition associated with a coronavirus by administering to the individual a therapeutically or prophylactically effective amount of a compound targeting a frameshift site of a coronavirus so that the propagation of the coronavirus is inhibited as a result of modulation of the frameshift site.

[0062] The present invention also provides methods of characterization of a previously uncharacterized frameshift site in a coronavirus RNA by obtaining RNA sequences of known coronaviruses with known frameshift sites, obtaining an RNA sequence of a coronavirus with an uncharacterized frameshift site, and performing covariance analysis on multiple sequence alignments of the RNA sequences of known coronaviruses and the RNA sequence of the coronavirus with an uncharacterized frameshift site.

### BRIEF DESCRIPTION OF THE DRAWINGS

[0063] FIG. 1 represents an alignment sequence segments of frameshift sites of transmissible gastroenteritis virus (TGEV), human coronavirus 229E (HcoV 229E), porcine epidemic diarrhea virus (PEDV); Avian infectious bronchitis virus (IBV); SARS coronavirus (SARS); Murine hepatitis virus (MHV) and Bovine coronavirus (BcoV). Also shown for the alignment are pairing mask symbols corresponding to the slippery sequence, stem 1, and stem 2 represented by shaded regions in the alignment. Nucleotide residues conserved in coronaviruses are shown in bold type.

### DESCRIPTION OF EMBODIMENTS

[0064] The present invention employs compounds, such as oligomeric compounds, including, for example, oligonucleotides and similar species, for use in modulating the function or effect of nucleic acid molecules encoding SARS virus. This is accomplished by, for example, providing oligonucleotides that hybridize with one or more nucleic acid molecules encoding SARS virus. As used herein, the terms “target nucleic acid” and “nucleic acid molecule encoding SARS virus” have been used for convenience to encompass DNA encoding SARS virus, RNA (including pre-mRNA and mRNA or portions thereof) transcribed from such DNA, and also cDNA derived from such RNA. The hybridization of a compound of this invention with its target nucleic acid is generally referred to as “antisense.” Consequently, one mechanism believed to be included in the practice of some embodiments of the invention is referred to herein as “antisense inhibition.” Such antisense inhibition is typically based upon hydrogen bonding-based hybridization of oligonucleotide strands or segments such that at least one strand or segment is cleaved, degraded, or otherwise rendered inoperable. In this regard, it is suitable to target specific nucleic acid molecules and their functions for such antisense inhibition.

[0065] The functions of DNA to be interfered with include, but are not limited to, replication and transcription. Replication and transcription, for example, can be from an endogenous cellular template, a vector, a plasmid construct or otherwise. The functions of RNA to be interfered include, but are not limited to, functions such as translocation of the RNA to a site of protein translation, translocation of the RNA to sites within the cell which are distant from the site of RNA synthesis, translation of protein from the RNA, splicing of the RNA to yield one or more RNA species, and catalytic activity or complex formation involving the RNA which may be engaged in or facilitated by the RNA. One result of such interference with target nucleic acid function is modulation of the expression of SARS virus. In the context of the present invention, “modulation” and “modulation of expression” mean either an increase (stimulation) or a decrease (inhibition or reduction) in the amount or levels of a nucleic acid molecule encoding the gene, e.g., DNA or RNA. Inhibition or reduction are often the desired form of modulation of expression and mRNA is often a desired target nucleic acid.

[0066] In the context of this invention, “hybridization” means the pairing of complementary strands of oligomeric compounds. One mechanism of pairing involves hydrogen bonding, which may be Watson-Crick, Hoogsteen, or reversed Hoogsteen hydrogen bonding, between complementary nucleoside or nucleotide bases (nucleobases) of the strands of oligomeric compounds. For example, adenine and thymine are complementary nucleobases which pair through the formation of hydrogen bonds. Hybridization can occur under varying circumstances.

[0067] An oligomeric compound, such as an antisense compound, is “specifically hybridizable” when binding of the compound to the target nucleic acid interferes with the normal function of the target nucleic acid to cause a loss of activity, and there is a sufficient degree of complementarity to avoid non-specific binding of the antisense compound to non-target nucleic acid sequences under conditions in which specific binding is desired, i.e., under physiological conditions in the case of in vivo assays or therapeutic treatment, and under conditions in which assays are performed in the case of in vitro assays. The oligomeric compounds of the invention, however, need not be specifically hybridizable to possess value (i.e., the oligomeric compound may, in fact, possess non-specific binding to non-target nucleic acid sequences under conditions in which specific binding is desired).

[0068] In the present invention, the phrase “stringent hybridization conditions” or “stringent conditions” refers to conditions under which a compound of the invention will hybridize to its target sequence, but to a minimal number of other sequences. Stringent conditions are sequence-dependent and will be different in different circumstances and in the context of this invention, “stringent conditions” under which oligomeric compounds hybridize to a target sequence are determined by the nature and composition of the oligomeric compounds and the assays in which they are being investigated.

[0069] “Complementary,” as used herein, refers to the capacity for precise pairing between two nucleobases of an oligomeric compound and its corresponding target molecule. For example, if a nucleobase at a particular position of an oligonucleotide (an oligomeric compound) is capable of hydrogen bonding with a nucleobase at a particular position of a target nucleic acid molecule (the target nucleic acid being a DNA, RNA, or oligonucleotide molecule), then the position of hydrogen bonding between the oligonucleotide and the target nucleic acid molecule is considered to be a complementary position. The oligonucleotide and the further DNA, RNA, or oligonucleotide molecule are complementary to each other when a sufficient number of complementary positions in each molecule are occupied by nucleobases which can hydrogen bond with each other. Thus, “specifically hybridizable” and “complementary” are terms which are used to indicate a sufficient degree of precise pairing or complementarity over a sufficient number of nucleobases such that stable and specific binding occurs between the oligonucleotide and a target nucleic acid molecule.

[0070] It is understood in the art that the sequence of an oligomeric compound need not be 100% complementary to that of its target nucleic acid molecule to be specifically hybridizable or hybridizable. Moreover, an oligonucleotide may hybridize over one or more segments such that intervening or adjacent segments are not involved in the hybridization event (e.g., a loop structure or hairpin structure). The oligomeric compounds of the present invention can comprise at least 70%, at least 80%, at least 90%, at least 95%, at least 99%, or 100% sequence complementarity to a target region within the target nucleic acid sequence to which they are targeted. For example, an antisense compound in which 18 of 20 nucleobases of the antisense compound are complementary to a target region, and would therefore specifically hybridize, would represent 90 percent complementarity. In this example, the remaining noncomplementary nucleobases may be clustered or interspersed with complementary nucleobases and need not be contiguous to each other or to complementary nucleobases. As such, an antisense compound which is 18 nucleobases in length having 4 (four) noncomplementary nucleobases which are flanked by two regions of complete complementarity with the target nucleic acid would have 77.8% overall complementarity with the target nucleic acid and would, thus, fall within the scope of the present invention. Percent complementarity of an oligomeric compound with a region of a target nucleic acid can be determined routinely using BLAST programs (basic local alignment search tools) and PowerBLAST programs known in the art (Altschul et al., J. Mol. Biol., 1990, 215, 403-410; Zhang and Madden, Genome Res., 1997, 7, 649-656) or by using the Gap program (Wisconsin Sequence Analysis Package, Version 8 for Unix, Genetics Computer Group, University Research Park, Madison Wis.), using default settings, which uses the algorithm of Smith and Waterman (Adv. Appl. Math., 1981, 2, 482-489).

[0071] In the context of this invention, the term “oligomeric compound” refers to a polymer or oligomer comprising a plurality of monomeric units. In the context of this invention, the term “oligonucleotide” refers to an oligomer or polymer of ribonucleic acid (RNA) or deoxyribonucleic acid (DNA) or mimetics, chimeras, analogs and homologs thereof. This term includes oligonucleotides composed of naturally occurring nucleobases, sugars and covalent internucleoside (backbone) linkages as well as oligonucleotides having non-naturally occurring portions which function similarly. Such modified or substituted oligonucleotides are often desired over native forms because of desirable properties such as, for example, enhanced cellular uptake, enhanced affinity for a target nucleic acid and increased stability in the presence of nucleases.

Compounds of the Invention

[0072] According to the present invention, oligomeric compounds include, but are not limited to, antisense oligomeric compounds, antisense oligonucleotides, ribozymes, external guide sequence (EGS) oligonucleotides, alternate splicers, primers, probes, and other oligomeric compounds which hybridize to at least a portion of the target nucleic acid. As such, these compounds may be introduced in the form of single-stranded, double-stranded, circular, or hairpin oligomeric compounds and may contain structural elements such as internal or terminal bulges or loops. Additionally, the compound may have regions of single-strandedness and regions of double-strandedness. Once introduced to a system, the compounds of the invention may elicit the action of one or more enzymes or structural proteins to effect modification of the target nucleic acid.

[0073] One non-limiting example of such an enzyme is RNAse H, a cellular endonuclease which cleaves the RNA strand of an RNA:DNA duplex. It is known in the art that single-stranded antisense compounds which are “DNA-like” elicit RNAse H. Activation of RNase H, therefore, results in cleavage of the RNA target, thereby greatly enhancing the efficiency of oligonucleotide-mediated inhibition of gene expression. Similar roles have been postulated for other ribonucleases such as those in the RNase III and ribonuclease L family of enzymes. 2-5A-dependent RNase is a component of the interferon-regulated 2-5A system that functions in the antiviral and antiproliferative roles of interferons. Treatment of cells with interferon results in enhanced levels of both 2-5A-dependent RNase and a group of synthetases that produce 5-prime-triphosphorylated, 2-prime,5-prime-oligoadenylates (2-5A) from ATP. The role of the 2-5A system in the control of viral and cellular growth suggests that defects in the 2-5A-dependent RNase gene could result in reduced immunity to virus infections and cancer.

[0074] While one form of an oligomeric compound is a single-stranded antisense oligonucleotide, in many species the introduction of double-stranded structures, such as double-stranded RNA (dsRNA) molecules, has been shown to induce potent and specific antisense-mediated reduction of the function of a gene or its associated gene products. This phenomenon occurs in both plants and animals and is believed to have an evolutionary connection to viral defense and transposon silencing.

[0075] The first evidence that dsRNA could lead to gene silencing in animals came in 1995 from work in the nematode, Caenorhabditis elegans (Guo and Kempheus, Cell, 1995, 81, 611-620). Montgomery et al. have shown that the primary interference effects of dsRNA are posttranscriptional (Montgomery et al., Proc. Natl. Acad. Sci. USA, 1998, 95, 15502-15507). The posttranscriptional antisense mechanism defined in Caenorhabditis elegans resulting from exposure to double-stranded RNA (dsRNA) has since been designated RNA interference (RNAi). This term has been generalized to mean antisense-mediated gene silencing involving the introduction of dsRNA leading to the sequence-specific reduction of endogenous targeted mRNA levels (Fire et al., Nature, 1998, 391, 806-811). Recently, it has been shown that it is, in fact, the single-stranded oligomers of antisense polarity of the dsRNAs which are the potent inducers of RNAi (Tijsterman et al., Science, 2002, 295, 694-697).

[0076] While oligonucleotides are a suitable form of the compounds of this invention, the present invention comprehends other families of compounds as well, including but not limited to, oligonucleotide analogs and mimetics such as those described herein.

[0077] The compounds in accordance with this invention can comprise from about 8 to about 80 nucleobases (i.e. from about 8 to about 80 linked nucleosides). As used herein, the term “about” means ±5% of the value it modifies (rounded up to the nearest whole number if a nucleobase is the term which is modified). One of ordinary skill in the art will appreciate that the invention embodies compounds of 8, 9, 10, 11, 12, 13, 14, 15, 16, 17, 18, 19, 20, 21, 22, 23, 24, 25, 26, 27, 28, 29, 30, 31, 32, 33, 34, 35, 36, 37, 38, 39, 40, 41, 42, 43, 44, 45, 46, 47, 48, 49, 50, 51, 52, 53, 54, 55, 56, 57, 58, 59, 60, 61, 62, 63, 64, 65, 66, 67, 68, 69, 70, 71, 72, 73, 74, 75, 76, 77, 78, 79, or 80 nucleobases in length.

[0078] In one embodiment, the compounds of the invention are from 12 to about 50 nucleobases in length. One having ordinary skill in the art will appreciate that this embodies compounds of 12, 13, 14, 15, 16, 17, 18, 19, 20, 21, 22, 23, 24, 25, 26, 27, 28, 29, 30, 31, 32, 33, 34, 35, 36, 37, 38, 39, 40, 41, 42, 43, 44, 45, 46, 47, 48, 49, or 50 nucleobases in length.

[0079] In another embodiment, the compounds of the invention are from 15 to about 30 nucleobases in length. One having ordinary skill in the art will appreciate that this embodies compounds of 15, 16, 17, 18, 19, 20, 21, 22, 23, 24, 25, 26, 27, 28, 29, or 30 nucleobases in length.

[0080] In other embodiments, the antisense compounds are from 8 to about 80 nucleobases in length comprising a stretch of at least eight (8) consecutive nucleobases selected from within the illustrative antisense compounds. Exemplary antisense compounds include, but are not limited to, oligonucleotide sequences that comprise at least the 8 consecutive nucleobases from the 5′-terminus of one of the illustrative antisense compounds (the remaining nucleobases being a consecutive stretch of the same oligonucleotide beginning immediately upstream of the 5′-terminus of the antisense compound which is specifically hybridizable to the target nucleic acid and continuing until the oligonucleotide contains about 8 to about 80 nucleobases). Similarly suitable antisense compounds are represented by oligonucleotide sequences that comprise at least the 8 consecutive nucleobases from the 3′-terminus of one of the illustrative antisense compounds (the remaining nucleobases being a consecutive stretch of the same oligonucleotide beginning immediately downstream of the 3′-terminus of the antisense compound which is specifically hybridizable to the target nucleic acid and continuing until the oligonucleotide contains about 8 to about 80 nucleobases). One having skill in the art armed with the antisense compounds illustrated herein will be able, without undue experimentation, to identify further suitable antisense compounds.

Targets of the Invention

[0081] “Targeting” an oligomeric compound to a particular nucleic acid molecule, in the context of this invention, can be a multistep process. The process usually begins with the identification of a target nucleic acid whose function is to be modulated. This target nucleic acid may be, for example, a cellular gene (or mRNA transcribed from the gene) whose expression is associated with a particular disorder or disease state, or a nucleic acid molecule from an infectious agent. In the present invention, the target nucleic acid encodes a SARS virus.

[0082] The targeting process usually also includes determination of at least one target region, segment, or site within the target nucleic acid for the antisense interaction to occur such that the desired effect, e.g., modulation of expression, will result. Within the context of the present invention, the term “region” is defined as a portion of the target nucleic acid having at least one identifiable structure, function, or characteristic. Within regions of target nucleic acids are segments. “Segments” are defined as smaller portions or sub-portions of regions within a target nucleic acid. “Sites,” as used in the present invention, are defined as positions within a target nucleic acid.

[0083] Since, as is known in the art, the translation initiation codon is typically 5′ AUG (in transcribed mRNA molecules; 5′ ATG in the corresponding DNA molecule), the translation initiation codon is also referred to as the “AUG codon,” the “start codon” or the “AUG start codon.” A minority of genes have a translation initiation codon having the RNA sequence 5′ GUG, 5′ UUG or 5° CUG, and 5′ AUA, 5′ ACG and 5° CUG have been shown to function in vivo. Thus, the terms “translation initiation codon” and “start codon” can encompass many codon sequences, even though the initiator amino acid in each instance is typically methionine (in eukaryotes) or formylmethionine (in prokaryotes). It is also known in the art that eukaryotic and prokaryotic genes may have two or more alternative start codons, any one of which may be utilized for translation initiation in a particular cell type or tissue, or under a particular set of conditions. In the context of the invention, “start codon” and “translation initiation codon” refer to the codon or codons that are used in vivo to initiate translation of an mRNA transcribed from a gene encoding SARS virus, regardless of the sequence(s) of such codons.

[0084] It is also known in the art that a translation termination codon (or “stop codon”) of a gene may have one of three sequences, i.e., 5′ UAA, 5′ UAG and 5′ UGA (the corresponding DNA sequences are 5′ TAA, 5′ TAG and 5′ TGA, respectively).

[0085] The terms “start codon region” and “translation initiation codon region” refer to a portion of such an mRNA or gene that encompasses from about 25 to about 50 contiguous nucleotides in either direction (i.e., 5′ or 3′) from a translation initiation codon. Similarly, the terms “stop codon region” and “translation termination codon region” refer to a portion of such an mRNA or gene that encompasses from about 25 to about 50 contiguous nucleotides in either direction (i.e., 5′ or 3′) from a translation termination codon. Consequently, the “start codon region” (or “translation initiation codon region”) and the “stop codon region” (or “translation termination codon region”) are all regions which may be targeted effectively with the oligomeric compounds of the present invention.

[0086] The open reading frame (ORF) or “coding region,” which is known in the art to refer to the region between the translation initiation codon and the translation termination codon, is also a region which may be targeted effectively. Within the context of the present invention, a suitable region is the intragenic region encompassing the translation initiation or termination codon of the open reading frame (ORF) of a gene.

[0087] Other target regions include, but are not limited to, the 5′ untranslated region (5′ UTR), known in the art to refer to the portion of an mRNA in the 5′ direction from the translation initiation codon and, thus, including nucleotides between the 5′ cap site and the translation initiation codon of an mRNA (or corresponding nucleotides on the gene), and the 3′ untranslated region (3′ UTR), known in the art to refer to the portion of an mRNA in the 3′ direction from the translation termination codon and, thus, including nucleotides between the translation termination codon and 3′ end of an mRNA (or corresponding nucleotides on the gene). The 5′ cap site of an mRNA comprises an N7-methylated guanosine residue joined to the 5′-most residue of the mRNA via a 5′-5′ triphosphate linkage. The 5′ cap region of an mRNA is considered to include the 5′ cap structure itself as well as the first 50 nucleotides adjacent to the cap site. It is also suitable to target the 5′ cap region.

[0088] Although some eukaryotic mRNA transcripts are directly translated, many contain one or more regions, known as “introns,” which are excised from a transcript before it is translated. The remaining (and, therefore, translated) regions are known as “exons” and are spliced together to form a continuous mRNA sequence. Targeting splice sites, i.e., intron-exon junctions or exon-intron junctions, may also be particularly useful in situations where aberrant splicing is implicated in disease, or where an overproduction of a particular splice product is implicated in disease. Aberrant fusion junctions due to rearrangements or deletions are also suitable target sites. mRNA transcripts produced via the process of splicing of two (or more) mRNAs from different gene sources are known as “fusion transcripts.” It is also known that introns can be effectively targeted using oligomeric compounds targeted to, for example, DNA or pre-mRNA.

[0089] It is also known in the art that alternative RNA transcripts can be produced from the same genomic region of DNA. These alternative transcripts are generally known as “variants.” More specifically, “pre-mRNA variants” are transcripts produced from the same genomic DNA that differ from other transcripts produced from the same genomic DNA in either their start or stop position and contain both intronic and exonic sequence.

[0090] Upon excision of one or more exon or intron regions, or portions thereof during splicing, pre-mRNA variants produce smaller “mRNA variants.” Consequently, mRNA variants are processed pre-mRNA variants and each unique pre-mRNA variant produces a unique mRNA variant as a result of splicing. These mRNA variants are also known as “alternative splice variants.” If no splicing of the pre-mRNA variant occurs, then the pre-mRNA variant is identical to the mRNA variant.

[0091] It is also known in the art that variants can be produced through the use of alternative signals to start or stop transcription and that pre-mRNAs and mRNAs can possess more that one start codon or stop codon. Variants that originate from a pre-mRNA or mRNA that use alternative start codons are known as “alternative start variants” of that pre-mRNA or mRNA. Those transcripts that use an alternative stop codon are known as “alternative stop variants” of that pre-mRNA or mRNA. One specific type of alternative stop variant is the “polyA variant” in which the multiple transcripts produced result from the alternative selection of one of the “polyA stop signals” by the transcription machinery, thereby producing transcripts that terminate at unique polyA sites. Within the context of the invention, the types of variants described herein are also suitable target nucleic acids.

[0092] The locations on the target nucleic acid to which the oligomeric compounds hybridize are hereinbelow referred to as “suitable target segments.” As used herein, the term “suitable target segment” is defined as at least an 8-nucleobase portion of a target region to which an active oligomeric compound is targeted. While not wishing to be bound by theory, it is presently believed that these target segments represent portions of the target nucleic acid which are accessible for hybridization.

[0093] While the specific sequences of particular suitable target segments are set forth herein, one of skill in the art will recognize that these serve to illustrate and describe particular embodiments within the scope of the present invention. Additional suitable target segments may be identified by one having ordinary skill using the same type of methodology as disclosed herein.

[0094] Target regions or segments from 8 to about 80 nucleobases in length comprising a stretch of at least eight (8) consecutive nucleobases selected from within the illustrative suitable target segments or regions are considered to be suitable for targeting as well.

[0095] Target segments or regions can include DNA or RNA sequences that comprise at least the 8 consecutive nucleobases from the 5′-terminus of one of the illustrative suitable target segments or regions (the remaining nucleobases being a consecutive stretch of the same DNA or RNA beginning immediately upstream of the 5′-terminus of the target segment or region and continuing until the DNA or RNA contains from 8 to about 80 nucleobases). Similarly suitable target segments or regions are represented by DNA or RNA sequences that comprise at least the 8 consecutive nucleobases from the 3′-terminus of one of the illustrative suitable target segments or regions (the remaining nucleobases being a consecutive stretch of the same DNA or RNA beginning immediately downstream of the 3′-terminus of the target segment or region and continuing until the DNA or RNA contains from 8 to about 80 nucleobases). One having skill in the art armed with the suitable target segments or regions illustrated herein will be able, without undue experimentation, to identify additional suitable target segments or regions.

[0096] Once one or more target regions, segments or sites have been identified, oligomeric compounds are chosen which are sufficiently complementary to the target, i.e., hybridize sufficiently well and with sufficient specificity, to give the desired effect.

Screening and Target Validation

[0097] In a further embodiment, the “suitable target segments” or “suitable target regions” identified herein may be employed in a screen for additional compounds that modulate the expression of a SARS virus. “Modulators” are those compounds that decrease or increase the expression of a nucleic acid molecule encoding a SARS virus and which comprise at least an 8-nucleobase portion which is complementary to a suitable target segment or region. In one embodiment, the screening method comprises contacting a suitable target segment of a nucleic acid molecule encoding a SARS virus with one or more candidate modulators, and selecting for one or more candidate modulators which decrease or increase the expression of a nucleic acid molecule encoding a SARS virus. Once it is shown that the candidate modulator or modulators are capable of modulating (e.g. either decreasing or increasing) the expression of a nucleic acid molecule encoding a SARS virus, the modulator may then be employed in further investigative studies of the function of a SARS virus, or for use as a research, diagnostic, or therapeutic agent in accordance with the present invention.

[0098] The suitable target segments or regions of the present invention may be also be combined with their respective complementary oligomeric compounds of the present invention to form stabilized double-stranded (duplexed) oligonucleotides. Such double stranded oligonucleotide moieties have been shown in the art to modulate target expression and regulate translation as well as RNA processsing via an antisense mechanism. Moreover, the double-stranded moieties may be subject to chemical modifications (Fire et al., Nature, 1998, 391, 806-811; Timmons and Fire, Nature 1998, 395, 854; Timmons et al., Gene, 2001, 263, 103-112; Tabara et al., Science, 1998, 282, 430-431; Montgomery et al., Proc. Natl. Acad. Sci. USA, 1998, 95, 15502-15507; Tuschl et al., Genes Dev., 1999, 13, 3191-3197; Elbashir et al., Nature, 2001, 411, 494-498; Elbashir et al., Genes Dev. 2001, 15, 188-200). For example, such double-stranded moieties have been shown to inhibit the target by the classical hybridization of antisense strand of the duplex to the target, thereby triggering enzymatic degradation of the target (Tijsterman et al., Science, 2002, 295, 694-697).

[0099] The compounds of the present invention can also be applied in the areas of drug discovery and target validation. The present invention comprehends the use of the compounds and suitable target segments or regions identified herein in drug discovery efforts to elucidate relationships that exist between a SARS virus and a disease state, phenotype, or condition. These methods include, but are not limited to, detecting or modulating a SARS virus comprising contacting a sample, tissue, cell, or organism with a compound of the present invention, measuring or detecting the nucleic acid or protein level of a SARS virus and/or a related phenotypic or chemical endpoint at some time after treatment, and optionally comparing the measured value to a non-treated sample or sample treated with a further compound of the invention. These methods can also be performed in parallel or in combination with other experiments to determine the function of unknown genes for the process of target validation or to determine the validity of a particular gene product as a target for treatment or prevention of a particular disease, condition, or phenotype.

[0100] Modifications As is known in the art, a nucleoside is a base-sugar combination. The base portion of the nucleoside is normally a heterocyclic base. The two most common classes of such heterocyclic bases are the purines and the pyrimidines. Nucleotides are nucleosides that further include a phosphate group covalently linked to the sugar portion of the nucleoside. For those nucleosides that include a pentofuranosyl sugar, the phosphate group can be linked to either the 2′, 3′ or 5′ hydroxyl moiety of the sugar. In forming oligonucleotides, the phosphate groups covalently link adjacent nucleosides to one another to form a linear polymeric compound. In turn, the respective ends of this linear polymeric compound can be further joined to form a circular compound, however, linear compounds are generally suitable. In addition, linear compounds may have internal nucleobase complementarity and may therefore fold in a manner as to produce a fully or partially double-stranded compound. Within oligonucleotides, the phosphate groups are commonly referred to as forming the internucleoside backbone of the oligonucleotide. The normal linkage or backbone of RNA and DNA is a 3′ to 5′ phosphodiester linkage.

Modified Internucleoside Linkages (Backbones)

[0101] Specific examples of suitable oligomeric compounds useful in this invention include, but are not limited to, oligonucleotides containing modified backbones or non-natural internucleoside linkages. As defined in this specification, oligonucleotides having modified backbones include those that retain a phosphorus atom in the backbone and those that do not have a phosphorus atom in the backbone. For the purposes of this specification, and as sometimes referenced in the art, modified oligonucleotides that do not have a phosphorus atom in their internucleoside backbone can also be considered to be oligonucleosides.

[0102] In the C. elegans system, modification of the internucleotide linkage (phosphorothioate) did not significantly interfere with RNAi activity. Based on this observation, it is suggested that particular oligomeric compounds of the invention can also have one or more modified internucleoside linkages. A suitable phosphorus containing modified internucleoside linkage is the phosphorothioate internucleoside linkage.

[0103] Suitable modified oligonucleotide backbones containing a phosphorus atom therein include, for example, phosphorothioates, chiral phosphorothioates, phosphorodithioates, phosphotriesters, aminoalkylphosphotriesters, methyl and other alkyl phosphonates including 3′-alkylene phosphonates, 5′-alkylene phosphonates and chiral phosphonates, phosphinates, phosphoramidates including 3′-amino phosphoramidate and aminoalkylphosphoramidates, thionophosphoramidates, thionoalkylphosphonates, thionoalkylphosphotriesters, selenophosphates and boranophosphates having normal 3′-5′ linkages, 2′-5′ linked analogs of these, and those having inverted polarity wherein one or more internucleotide linkages is a 3′ to 3′, 5′ to 5′ or 2′ to 2′ linkage. Suitable oligonucleotides having inverted polarity comprise a single 3′ to 3′ linkage at the 3′-most internucleotide linkage i.e. a single inverted nucleoside residue which may be a basic (the nucleobase is missing or has a hydroxyl group in place thereof). Various salts (such as, for example, potassium or sodium), mixed salts and free acid forms are also included.

[0104] Representative United States patents that teach the preparation of the above phosphorus-containing linkages include, but are not limited to: U.S. Pat. Nos. 3,687,808; 4,469,863; 4,476,301; 5,023,243; 5,177,196; 5,188,897; 5,264,423; 5,276,019; 5,278,302; 5,286,717; 5,321,131; 5,399,676; 5,405,939; 5,453,496; 5,455,233; 5,466,677; 5,476,925; 5,519,126; 5,536,821; 5,541,306; 5,550,111; 5,563,253; 5,571,799; 5,587,361; 5,194,599; 5,565,555; 5,527,899; 5,721,218; 5,672,697; and 5,625,050, certain of which are commonly owned with this application, and each of which is incorporated herein by reference in its entirety.

[0105] In some embodiments of the invention, oligomeric compounds have one or more phosphorothioate and/or heteroatom internucleoside linkages, in particular —CH₂—NH—O—CH₂—, —CH₂—N(CH₃)—O—CH₂— (known as a methylene (methylimino) or MMI backbone), —CH₂—O—N(CH₃)—CH₂—, —CH₂—N(CH₃)—N(CH₃)—CH₂— and —O—N(CH₃)—CH₂—CH₂— (wherein the native phosphodiester internucleotide linkage is represented as —O—P(═O)(OH)—O—CH₂—). The MMI type internucleoside linkages are disclosed in the above referenced U.S. Pat. No. 5,489,677. Suitable amide internucleoside linkages are disclosed in the above referenced U.S. Pat. No. 5,602,240. Also suitable are oligonucleotides having morpholino backbone structures of the above-referenced U.S. Pat. No. 5,034,506.

[0106] Suitable modified oligonucleotide backbones that do not include a phosphorus atom therein have backbones that are formed by short chain alkyl or cycloalkyl internucleoside linkages, mixed heteroatom and alkyl or cycloalkyl internucleoside linkages, or one or more short chain heteroatomic or heterocyclic internucleoside linkages. These include those having morpholino linkages (formed in part from the sugar portion of a nucleoside); siloxane backbones; sulfide, sulfoxide and sulfone backbones; formacetyl and thioformacetyl backbones; methylene formacetyl and thioformacetyl backbones; riboacetyl backbones; alkene containing backbones; sulfamate backbones; methyleneimino and methylenehydrazino backbones; sulfonate and sulfonamide backbones; amide backbones; and others having mixed N, O, S and CH₂ component parts.

[0107] Representative United States patents that teach the preparation of the above oligonucleosides include, but are not limited to: U.S. Pat. Nos. 5,034,506; 5,166,315; 5,185,444; 5,214,134; 5,216,141; 5,235,033; 5,264,562; 5,264,564; 5,405,938; 5,434,257; 5,466,677; 5,470,967; 5,489,677; 5,541,307; 5,561,225; 5,596,086; 5,602,240; 5,610,289; 5,602,240; 5,608,046; 5,610,289; 5,618,704; 5,623,070; 5,663,312; 5,633,360; 5,677,437; 5,792,608; 5,646,269; and 5,677,439, certain of which are commonly owned with this application, and each of which is incorporated herein by reference in its entirety.

Mimetics

[0108] Another group of oligomeric compounds amenable to the present invention includes oligonucleotide mimetics. The term “mimetic” as it is applied to oligonucleotides is intended to include oligomeric compounds wherein only the furanose ring or both the furanose ring and the internucleotide linkage are replaced with novel groups, replacement of only the furanose ring is also referred to in the art as being a sugar surrogate. The heterocyclic base moiety or a modified heterocyclic base moiety is maintained for hybridization with an appropriate target nucleic acid. One such oligomeric compound, an oligonucleotide mimetic that has been shown to have excellent hybridization properties, is referred to as a peptide nucleic acid (PNA). In PNA oligomeric compounds, the sugar-backbone of an oligonucleotide is replaced with an amide containing backbone, in particular an aminoethylglycine backbone. The nucleobases are retained and are bound directly or indirectly to aza nitrogen atoms of the amide portion of the backbone. Representative U.S. patents that teach the preparation of PNA oligomeric compounds include, but are not limited to: U.S. Pat. Nos. 5,539,082; 5,714,331; and 5,719,262, each of which is herein incorporated by reference. Further teaching of PNA oligomeric compounds can be found in Nielsen et al., Science, 1991, 254, 1497-1500.

[0109] One oligonucleotide mimetic that has been reported to have excellent hybridization properties, is peptide nucleic acids (PNA). The backbone in PNA compounds is two or more linked aminoethylglycine units which gives PNA an amide containing backbone. The heterocyclic base moieties are bound directly or indirectly to aza nitrogen atoms of the amide portion of the backbone. Representative U.S. patents that teach the preparation of PNA compounds include, but are not limited to: U.S. Pat. Nos. 5,539,082; 5,714,331; and 5,719,262, each of which is herein incorporated by reference. Further teaching of PNA compounds can be found in Nielsen et al., Science, 1991, 254, 1497-1500.

[0110] PNA has been modified to incorporate numerous modifications since the basic PNA structure was first prepared. The basic structure is shown below: [chemical structure]
wherein

[0111] Bx is a heterocyclic base moiety;

[0112] T₄ is hydrogen, an amino protecting group, —C(O)R₅, substituted or unsubstituted C₁-C₁₀ alkyl, substituted or unsubstituted C₂-C₁₀ alkenyl, substituted or unsubstituted C₂-C₁₀ alkynyl, alkylsulfonyl, arylsulfonyl, a chemical functional group, a reporter group, a conjugate group, a D or L α-amino acid linked via the a-carboxyl group or optionally through the ω-carboxyl group when the amino acid is aspartic acid or glutamic acid or a peptide derived from D, L or mixed D and L amino acids linked through a carboxyl group, wherein the substituent groups are selected from hydroxyl, amino, alkoxy, carboxy, benzyl, phenyl, nitro, thiol, thioalkoxy, halogen, alkyl, aryl, alkenyl and alkynyl;

[0113] T₅ is —OH, —N(Z₁)Z₂, R₅, D or L α-amino acid linked via the α-amino group or optionally through the ω-amino group when the amino acid is lysine or ornithine or a peptide derived from D, L or mixed D and L amino acids linked through an amino group, a chemical functional group, a reporter group or a conjugate group;

[0114] Z₁ is hydrogen, C₁-C₆ alkyl, or an amino protecting group;

[0115] Z₂ is hydrogen, C₁-C₆ alkyl, an amino protecting group, —C(═O)—(CH₂)ₙ—J—Z₃, a D or L α-amino acid linked via the a-carboxyl group or optionally through the co-carboxyl group when the amino acid is aspartic acid or glutamic acid or a peptide derived from D, L or mixed D and L amino acids linked through a carboxyl group;

[0116] Z₃ is hydrogen, an amino protecting group, -C₁-C₆ alkyl, —C(═O)—CH₃, benzyl, benzoyl, or —(CH₂)ₙ—N(H)Z₁;

[0117] each J is O, S or NH;

[0118] R₅ is a carbonyl protecting group; and

[0119] n is from 2 to about 50.

[0120] Another class of oligonucleotide mimetic that has been studied is based on linked morpholino units (morpholino nucleic acid) having heterocyclic bases attached to the morpholino ring. A number of linking groups have been reported that link the morpholino monomeric units in a morpholino nucleic acid. One class of linking groups have been selected to give a non-ionic oligomeric compound. The non-ionic morpholino-based oligomeric compounds are less likely to have undesired interactions with cellular proteins. Morpholino-based oligomeric compounds are non-ionic mimics of oligonucleotides which are less likely to form undesired interactions with cellular proteins (Dwaine A. Braasch and David R. Corey, Biochemistry, 2002, 41(14), 4503-4510). Morpholino-based oligomeric compounds are disclosed in U.S. Pat. No. 5,034,506, issued Jul. 23, 1991. The morpholino class of oligomeric compounds have been prepared having a variety of different linking groups joining the monomeric subunits.

[0121] Morpholino nucleic acids have been prepared having a variety of different linking groups (L₂) joining the monomeric subunits. The basic formula is shown below: [chemical structure]
wherein

[0122] T₁ is hydroxyl or a protected hydroxyl;

[0123] T₅ is hydrogen or a phosphate or phosphate derivative;

[0124] L₂ is a linking group; and

[0125] n is from 2 to about 50.

[0126] A further class of oligonucleotide mimetic is referred to as cyclohexenyl nucleic acids (CeNA). The furanose ring normally present in an DNA/RNA molecule is replaced with a cyclohenyl ring. CeNA DMT protected phosphoramidite monomers have been prepared and used for oligomeric compound synthesis following classical phosphoramidite chemistry. Fully modified CeNA oligomeric compounds and oligonucleotides having specific positions modified with CeNA have been prepared and studied (see Wang et al., J. Am. Chem. Soc., 2000, 122, 8595-8602). In general the incorporation of CeNA monomers into a DNA chain increases its stability of a DNA/RNA hybrid. CeNA oligoadenylates formed complexes with RNA and DNA complements with similar stability to the native complexes. The study of incorporating CeNA structures into natural nucleic acid structures was shown by NMR and circular dichroism to proceed with easy conformational adaptation. Furthermore the incorporation of CeNA into a sequence targeting RNA was stable to serum and able to activate E. Coli RNase resulting in cleavage of the target RNA strand.

[0127] The general formula of CeNA is shown below: [chemical structure]
wherein

[0128] each Bx is a heterocyclic base moiety;

[0129] T₁ is hydroxyl or a protected hydroxyl; and

[0130] T₂ is hydroxyl or a protected hydroxyl.

[0131] Another class of oligonucleotide mimetic (anhydrohexitol nucleic acid) can be prepared from one or more anhydrohexitol nucleosides (see, Wouters and Herdewijn, Bioorg. Med. Chem. Lett., 1999, 9, 1563-1566) and would have the general formula:

[chemical structure]

[0132] A further modification includes Locked Nucleic Acids (LNAs) in which the 2′-hydroxyl group is linked to the 4′ carbon atom of the sugar ring thereby forming a 2′-C,4′-C-oxymethylene linkage thereby forming a bicyclic sugar moiety. The linkage can be a methylene (—CH₂—), group bridging the 2′ oxygen atom and the 4′ carbon atom wherein n is 1 or 2 (Singh et al., Chem. Commun., 1998, 4, 455-456). LNA and LNA analogs display very high duplex thermal stabilities with complementary DNA and RNA (Tm=+3 to +10 C), stability towards 3′-exonucleolytic degradation and good solubility properties. The basic structure of LNA showing the bicyclic ring system is shown below:

[chemical structure]

[0133] The conformations of LNAs determined by 2D NMR spectroscopy have shown that the locked orientation of the LNA nucleotides, both in single-stranded LNA and in duplexes, constrains the phosphate backbone in such a way as to introduce a higher population of the N-type conformation (Petersen et al., J. Mol. Recognit., 2000, 13, 44-53). These conformations are associated with improved stacking of the nucleobases (Wengel et al., Nucleosides Nucleotides, 1999, 18, 1365-1370).

[0134] LNA has been shown to form exceedingly stable LNA:LNA duplexes (Koshkin et al., J. Am. Chem. Soc., 1998, 120, 13252-13253). LNA:LNA hybridization was shown to be the most thermally stable nucleic acid type duplex system, and the RNA-mimicking character of LNA was established at the duplex level. Introduction of 3 LNA monomers (T or A) significantly increased melting points (Tm=+15/+11) toward DNA complements. The universality of LNA-mediated hybridization has been stressed by the formation of exceedingly stable LNA:LNA duplexes. The RNA-mimicking of LNA was reflected with regard to the N-type conformational restriction of the monomers and to the secondary structure of the LNA:RNA duplex.

[0135] LNAs also form duplexes with complementary DNA, RNA or LNA with high thermal affinities. Circular dichroism (CD) spectra show that duplexes involving fully modified LNA (esp. LNA:RNA) structurally resemble an A-form RNA:RNA duplex. Nuclear magnetic resonance (NMR) examination of an LNA:DNA duplex confirmed the 3′-endo conformation of an LNA monomer. Recognition of double-stranded DNA has also been demonstrated suggesting strand invasion by LNA. Studies of mismatched sequences show that LNAs obey the Watson-Crick base pairing rules with generally improved selectivity compared to the corresponding unmodified reference strands.

[0136] Novel types of LNA-oligomeric compounds, as well as the LNAs, are useful in a wide range of diagnostic and therapeutic applications. Among these are antisense applications, PCR applications, strand-displacement oligomers, substrates for nucleic acid polymerases and generally as nucleotide based drugs.

[0137] Potent and nontoxic antisense oligonucleotides containing LNAs have been described (Wahlestedt et al., Proc. Natl. Acad. Sci. U. S. A., 2000, 97, 5633-5638). The authors have demonstrated that LNAs confer several desired properties to antisense agents. LNA/DNA copolymers were not degraded readily in blood serum and cell extracts. LNA/DNA copolymers exhibited potent antisense activity in assay systems as disparate as G-protein-coupled receptor signaling in living rat brain and detection of reporter genes in Escherichia coli. Lipofectin-mediated efficient delivery of LNA into living human breast cancer cells has also been accomplished.

[0138] The synthesis and preparation of the LNA monomers adenine, cytosine, guanine, 5-methyl-cytosine, thymine and uracil, along with their oligomerization, and nucleic acid recognition properties have been described (Koshkin et al., Tetrahedron, 1998, 54, 3607-3630). LNAs and preparation thereof are also described in WO 98/39352 and WO 99/14226.

[0139] The first analogs of LNA, phosphorothioate-LNA and 2′-thio-LNAs, have also been prepared (Kumar et al., Bioorg. Med. Chem. Lett., 1998, 8, 2219-2222). Preparation of locked nucleoside analogs containing oligodeoxyribonucleotide duplexes as substrates for nucleic acid polymerases has also been described (Wengel et al., PCT International Application WO 98-DK393 19980914). Furthermore, synthesis of 2′-amino-LNA, a novel conformationally restricted high-affinity oligonucleotide analog with a handle has been described in the art (Singh et al., J. Org. Chem., 1998, 63, 10035-10039). In addition, 2′-Amino- and 2′-methylamino-LNA's have been prepared and the thermal stability of their duplexes with complementary RNA and DNA strands has been previously reported.

[0140] Further oligonucleotide mimetics have been prepared to include bicyclic and tricyclic nucleoside analogs having the formulas (amidite monomers shown): [chemical structure]
(see Steffens et al., Helv. Chim. Acta, 1997, 80, 2426-2439; Steffens et al., J. Am. Chem. Soc., 1999, 121, 3249-3255; and Renneberg et al., J. Am. Chem. Soc., 2002, 124, 5993-6002). These modified nucleoside analogs have been oligomerized using the phosphoramidite approach and the resulting oligomeric compounds containing tricyclic nucleoside analogs have shown increased thermal stabilities (Tm's) when hybridized to DNA, RNA and itself. Oligomeric compounds containing bicyclic nucleoside analogs have shown thermal stabilities approaching that of DNA duplexes.

[0141] Another class of oligonucleotide mimetic is referred to as phosphonomonoester nucleic acids incorporate a phosphorus group in a backbone the backbone. This class of olignucleotide mimetic is reported to have useful physical and biological and pharmacological properties in the areas of inhibiting gene expression (antisense oligonucleotides, ribozymes, sense oligonucleotides and triplex-forming oligonucleotides), as probes for the detection of nucleic acids and as auxiliaries for use in molecular biology.

[0142] The general formula (for definitions of Markush variables see: U.S. Pat. Nos. 5,874,553 and 6,127,346 herein incorporated by reference in their entirety) is shown below.

[chemical structure]

[0143] Another oligonucleotide mimetic has been reported wherein the furanosyl ring has been replaced by a cyclobutyl moiety.

Modified Sugars

[0144] Oligomeric compounds of the invention may also contain one or more substituted sugar moieties. Suitable oligomeric compounds comprise a sugar substituent group selected from: OH; F; O—, S-, or N-alkyl; O-, S-, or N-alkenyl; O-, S- or N-alkynyl; or O-alkyl-O-alkyl, wherein the alkyl, alkenyl and alkynyl may be substituted or unsubstituted C₁ to C₁₀ alkyl or C₂ to C₁₀ alkenyl and alkynyl. Particularly suitable are O((CH₂)ₙO)ₘCH₃, O(CH₂)ₙOCH₃, O(CH₂)ₙNH₂, O(CH₂)ₙCH₃, O(CH₂)ₙONH₂, and O(CH₂)ₙON((CH₂)ₙCH₃)₂, where n and m are from 1 to about 10. Other suitable oligonucleotides comprise a sugar substituent group selected from: C₁ to C₁₀ lower alkyl, substituted lower alkyl, alkenyl, alkynyl, alkaryl, aralkyl, O-alkaryl or O-aralkyl, SH, SCH₃, OCN, Cl, Br, CN, CF₃, OCF₃, SOCH₃, SO₂CH₃, ONO₂, NO₂, N₃, NH₂, heterocycloalkyl, heterocycloalkaryl, aminoalkylamino, polyalkylamino, substituted silyl, an RNA cleaving group, a reporter group, an intercalator, a group for improving the pharmacokinetic properties of an oligonucleotide, or a group for improving the pharmacodynamic properties of an oligonucleotide, and other substituents having similar properties. A suitable modification includes 2′-methoxyethoxy (2′-O—CH₂CH₂OCH₃, also known as 2′-O—(2-methoxyethyl) or 2′-MOE) (Martin et al., Helv. Chim. Acta, 1995, 78, 486-504) i.e., an alkoxyalkoxy group. A further suitable modification includes 2′-dimethylaminooxyethoxy, i.e., a O(CH₂)₂ON(CH₃)₂ group, also known as 2′-DMAOE, as described in examples hereinbelow, and 2′-dimethylaminoethoxyethoxy (also known in the art as 2′-O-dimethyl-amino-ethoxy-ethyl or 2′-DMAEOE), i.e., 2′-O—CH₂—O—CH₂—N(CH₃)₂.

[0145] Other suitable sugar substituent groups include methoxy (—O—CH₃), aminopropoxy (—OCH₂CH₂CH₂NH₂), allyl (—CH₂—CH═CH₂), -O-allyl (—O—CH₂—CH═CH₂) and fluoro (F). 2′-sugar substituent groups may be in the arabino (up) position or ribo (down) position. A suitable 2′-arabino modification is 2′-F. Similar modifications may also be made at other positions on the oligomeric compound, particularly the 3′ position of the sugar on the 3′ terminal nucleoside or in 2′-5′ linked oligonucleotides and the 5′ position of 5′ terminal nucleotide. Oligomeric compounds may also have sugar mimetics such as cyclobutyl moieties in place of the pentofuranosyl sugar. Representative U.S. patents that teach the preparation of such modified sugar structures include, but are not limited to: U.S. Pat. Nos. 4,981,957; 5,118,800; 5,319,080; 5,359,044; 5,393,878; 5,446,137; 5,466,786; 5,514,785; 5,519,134; 5,567,811; 5,576,427; 5,591,722; 5,597,909; 5,610,300; 5,627,053; 5,639,873; 5,646,265; 5,658,873; 5,670,633; 5,792,747; and 5,700,920, certain of which are commonly owned with the instant application, and each of which is herein incorporated by reference in its entirety.

[0146] Further representative sugar substituent groups include groups of formula Iₐ or IIₐ: [chemical structure]
wherein:

[0147] R_{b} is O, S or NH;

[0148] R_{d} is a single bond, O, S or C(═O);

[0149] Rₑ is C₁-C₁₀ alkyl, N(Rₖ)(Rₘ), N(Rₖ)(Rₙ), N═C(R)(Rₚ), N═C(Rₚ)(Rᵣ) or has formula IIIₐ;

[chemical structure]

[0150] Rₚ and R_{q} are each independently hydrogen or C₁-C₁₀ alkyl;

[0151] Rᵣ is —Rₓ—R_{y};

[0152] each Rₛ, Rₜ, Rᵤ and Rᵥ is, independently, hydrogen, C(O)R_{w}, substituted or unsubstituted C₁-C₁₀ alkyl, substituted or unsubstituted C₂-C₁₀ alkenyl, substituted or unsubstituted C₂-C₁₀ alkynyl, alkylsulfonyl, arylsulfonyl, a chemical functional group or a conjugate group, wherein the substituent groups are selected from hydroxyl, amino, alkoxy, carboxy, benzyl, phenyl, nitro, thiol, thioalkoxy, halogen, alkyl, aryl, alkenyl and alkynyl;

[0153] or optionally, Rᵤ and Rᵥ, together form a phthalimido moiety with the nitrogen atom to which they are attached;

[0154] each R_{w} is, independently, substituted or unsubstituted C₁-C₁₀ alkyl, trifluoromethyl, cyanoethyloxy, methoxy, ethoxy, t-butoxy, allyloxy, 9-fluorenylmethoxy, 2-(trimethylsilyl)-ethoxy, 2,2,2-trichloroethoxy, benzyloxy, butyryl, iso-butyryl, phenyl or aryl;

[0155] Rₖ is hydrogen, a nitrogen protecting group or —Rₓ—R_{y};

[0156] Rₚ is hydrogen, a nitrogen protecting group or —Rₓ—R_{y};

[0157] Rₓ is a bond or a linking moiety;

[0158] R_{y} is a chemical functional group, a conjugate group or a solid support medium;

[0159] each Rₘ and ₙ is, independently, H, a nitrogen protecting group, substituted or unsubstituted C₁-C₁₀ alkyl, substituted or unsubstituted C₂-C₁₀ alkenyl, substituted or unsubstituted C₂-C₁₀ alkynyl, wherein the substituent groups are selected from hydroxyl, amino, alkoxy, carboxy, benzyl, phenyl, nitro, thiol, thioalkoxy, halogen, alkyl, aryl, alkenyl, alkynyl; NH₃⁺, N(Rᵤ)(Rᵥ) guanidino and acyl where said acyl is an acid amide or an ester;

[0160] or Rₘ and Rₙ, together, are a nitrogen protecting group, are joined in a ring structure that optionally includes an additional heteroatom selected from N and O or are a chemical functional group;

[0161] Rᵢ is OR_{z}, SR_{z}, or N(R_{z})₂;

[0162] each R_{z} is, independently, H, C₁-C₈ alkyl, C₁-C₈ haloalkyl, C(═NH)N(H)Rᵤ, C(═O)N(H)Rᵤ or OC(═O)N(H)Rᵤ;

[0163] R_{f}, R_{g} and Rₕ comprise a ring system having from about 4 to about 7 carbon atoms or having from about 3 to about 6 carbon atoms and 1 or 2 heteroatoms wherein said heteroatoms are selected from oxygen, nitrogen and sulfur and wherein said ring system is aliphatic, unsaturated aliphatic, aromatic, or saturated or unsaturated heterocyclic;

[0164] Rⱼ is alkyl or haloalkyl having 1 to about 10 carbon atoms, alkenyl having 2 to about 10 carbon atoms, alkynyl having 2 to about 10 carbon atoms, aryl having 6 to about 14 carbon atoms, N(Rₖ)(Rₘ) ORₖ, halo, SRₖ or CN;

[0165] ma is 1 to about 10;

[0166] each mb is, independently, 0 or 1;

[0167] mc is 0 or an integer from 1 to 10;

[0168] md is an integer from 1 to 10;

[0169] me is from 0, 1 or 2; and

[0170] provided that when mc is 0, md is greater than 1.

[0171] Representative substituents groups of Formula I are disclosed in U.S. patent application Ser. No. 09/130,973, filed Aug. 7, 1998, entitled “Capped 2′-Oxyethoxy Oligonucleotides,” hereby incorporated by reference in its entirety.

[0172] Representative cyclic substituent groups of Formula II are disclosed in U.S. patent application Ser. No. 09/123,108, filed Jul. 27, 1998, entitled “RNA Targeted 2′-Oligomeric compounds that are Conformationally Preorganized,” hereby incorporated by reference in its entirety.

[0173] Suitable sugar substituent groups include O((CH₂)ₙO)ₘCH₃, O(CH₂)ₙOCH₃, O(CH₂)ₙNH₂, O(CH₂)ₙCH₃, O(CH₂)ₙONH₂ and O(CH₂)ₙON((CH₂)ₙCH₃))₂, where n and m are from 1 to about 10.

[0174] Representative guanidino substituent groups that are shown in formula III and IV are disclosed in co-owned U.S. patent application Ser. No. 09/349,040, entitled “Functionalized Oligomers”, filed Jul. 7, 1999, hereby incorporated by reference in its entirety.

[0175] Representative acetamido substituent groups are disclosed in U.S. Pat. No. 6,147,200 which is hereby incorporated by reference in its entirety.

[0176] Representative dimethylaminoethyloxyethyl substituent groups- are disclosed in International Patent Application PCT/US99/17895, entitled “2′-O-Dimethylaminoethyloxy-ethyl-Oligomeric compounds”, filed Aug. 6, 1999, hereby incorporated by reference in its entirety.

Natural and Modified Nucleobases

[0177] Oligonucleotides may also include nucleobase (often referred to in the art simply as “base”) modifications or substitutions. As used herein, “unmodified” or “natural” nucleobases include the purine bases adenine (A) and guanine (G), and the pyrimidine bases thymine (T), cytosine (C) and uracil (U). Modified nucleobases include other synthetic and natural nucleobases such as 5-methylcytosine (5-me-C), 5-hydroxymethyl cytosine, xanthine, hypoxanthine, 2-aminoadenine, 6-methyl and other alkyl derivatives of adenine and guanine, 2-propyl and other alkyl derivatives of adenine and guanine, 2-thiouracil, 2-thiothymine and 2-thiocytosine, 5-halouracil and cytosine, 5-propynyl (—C≡C—CH3) uracil and cytosine and other alkynyl derivatives of pyrimidine bases, 6-azo uracil, cytosine and thymine, 5-uracil (pseudouracil), 4-thiouracil, 8-halo, 8-amino, 8-thiol, 8-thioalkyl, 8-hydroxyl and other 8-substituted adenines and guanines, 5-halo particularly 5-bromo, 5-trifluoromethyl and other 5-substituted uracils and cytosines, 7-methylguanine and 7-methyladenine, 2-F-adenine, 2-amino-adenine, 8-azaguanine and 8-azaadenine, 7-deazaguanine and 7-deazaadenine and 3-deazaguanine and 3-deazaadenine. Further modified nucleobases include tricyclic pyrimidines such as phenoxazine cytidine(1H-pyrimido(5,4-b)(1,4)benzoxazin-2(3H)-one), phenothiazine cytidine (1H-pyrimido(5,4-b)(1,4)benzothiazin-2(3H)-one), G-clamps such as a substituted phenoxazine cytidine (e.g. 9-(2-aminoethoxy)-H-pyrimido(5,4-(b) (1,4)benzoxazin-2(3H)-one), carbazole cytidine (2H-pyrimido(4,5-b)indol-2-one), pyridoindole cytidine (H-pyrido(3′,2′:4,5)pyrrolo(2,3-d)pyrimidin-2-one).

[0178] Heterocyclic base moieties may also include those in which the purine or pyrimidine base is replaced with other heterocycles, for example 7-deaza-adenine, 7-deazaguanosine, 2-aminopyridine and 2-pyridone. Further nucleobases include those disclosed in U.S. Pat. No. 3,687,808, those disclosed in The Concise Encyclopedia Of Polymer Science And Engineering, pages 858-859, Kroschwitz, J. I., ed. John Wiley & Sons, 1990, those disclosed by Englisch et al., Angewandte Chemie, International Edition, 1991, 30, 613, and those disclosed by Sanghvi, Y. S., Chapter 15, Antisense Research and Applications, pages 289-302, Crooke, S. T. and Lebleu, B., ed., CRC Press, 1993. Certain of these nucleobases are particularly useful for increasing the binding affinity of the oligomeric compounds of the invention. These include 5-substituted pyrimidines, 6-azapyrimidines and N-2, N-6 and O-6 substituted purines, including 2-aminopropyladenine, 5-propynyluracil and 5-propynylcytosine. 5-methylcytosine substitutions have been shown to increase nucleic acid duplex stability by 0.6-1.2° C. (Sanghvi et al., eds., Antisense Research and Applications, CRC Press, Boca Raton, 1993, pp. 276-278) and are presently suitable base substitutions, even more particularly when combined with 2′-O-methoxyethyl sugar modifications.

[0179] Representative U.S. patents that teach the preparation of certain of the above noted modified nucleobases as well as other modified nucleobases include, but are not limited to, the above noted U.S. Pat. Nos. 3,687,808, as well as: 4,845,205; 5,130,302; 5,134,066; 5,175,273; 5,367,066; 5,432,272; 5,457,187; 5,459,255; 5,484,908; 5,502,177; 5,525,711; 5,552,540; 5,587,469; 5,594,121, 5,596,091; 5,614,617; 5,645,985; 5,830,653; 5,763,588; 6,005,096; and 5,681,941, certain of which are commonly owned with the instant application, and each of which is incorporated herein by reference in its entirety, and U.S. Pat. No. 5,750,692, which is commonly owned with the instant application and which is also incorporated herein by reference in its entirety.

[0180] In one aspect of the present invention oligomeric compounds are prepared having polycyclic heterocyclic compounds in place of one or more heterocyclic base moieties. A number of tricyclic heterocyclic compounds have been previously reported. These compounds are routinely used in antisense applications to increase the binding properties of the modified strand to a target strand. The most studied modifications are targeted to guanosines hence they have been termed G-clamps or cytidine analogs. Many of these polycyclic heterocyclic compounds have the general formula:

[chemical structure]

[0181] Representative cytosine analogs that make 3 hydrogen bonds with a guanosine in a second strand include 1,3-diazaphenoxazine-2-one (R₁₀═O, R₁₁—R₁₄═H) (Kurchavov, et al., Nucleosides and Nucleotides, 1997, 16, 1837-1846), 1,3-diazaphenothiazine-2-one (R₁₀═S, R₁₁—R₁₄═H), (Lin et al., J. Am. Chem. Soc. 1995, 117, 3873-3874) and 6,7,8,9-tetrafluoro-1,3-diazaphenoxazine-2-one (R₁₀═O, R₁₁—R₁₄═F) (Wang et al., Tetrahedron Lett. 1998, 39, 8385-8388). Incorporated into oligonucleotides these base modifications were shown to hybridize with complementary guanine and the latter was also shown to hybridize with adenine and to enhance helical thermal stability by extended stacking interactions (also see U.S. patent application Ser. No. 10/155,920, entitled “Modified Peptide Nucleic Acids” filed May 24, 2002; and U.S. patent application Ser. No. 10/013,295, entitled “Nuclease Resistant Chimeric Oligonucleotides” filed May 24, 2002, both of which are commonly owned with this application and are herein incorporated by reference in their entirety).

[0182] Further helix-stabilizing properties have been observed when a cytosine analog/substitute has an aminoethoxy moiety attached to the rigid 1,3-diazaphenoxazine-2-one scaffold (R_{10═}O, R₁₁═—O—(CH₂)₂—NH₂, R₁₂₋₁₄═H ) (Lin et al., M. J. Am. Chem. Soc., 1998, 120, 8531-8532). Binding studies demonstrated that a single incorporation could enhance the binding affinity of a model oligonucleotide to its complementary target DNA or RNA with a ΔTₘ of up to 18° relative to 5-methyl cytosine (dC5^{me}), which is the highest known affinity enhancement for a single modification, yet. On the other hand, the gain in helical stability does not compromise the specificity of the oligonucleotides. The Tₘ data indicate an even greater discrimination between the perfect match and mismatched sequences compared to dC5^{me}. It was suggested that the tethered amino group serves as an additional hydrogen bond donor to interact with the Hoogsteen face, namely the O6, of a complementary guanine thereby forming 4 hydrogen bonds. This means that the increased affinity of G-clamp is mediated by the combination of extended base stacking and additional specific hydrogen bonding.

[0183] Further tricyclic heterocyclic compounds and methods of using them that are amenable to the present invention are disclosed in U.S. Pat. No. 6,028,183, which issued on May 22, 2000, and U.S. Pat. No. 6,007,992, which issued on Dec. 28, 1999, the contents of both are commonly assigned with this application and are incorporated herein in their entirety.

[0184] The enhanced binding affinity of the phenoxazine derivatives together with their uncompromised sequence specificity makes them valuable nucleobase analogs for the development of more potent antisense-based drugs. In fact, promising data have been derived from in vitro experiments demonstrating that heptanucleotides containing phenoxazine substitutions are capable to activate RNaseH, enhance cellular uptake and exhibit an increased antisense activity (Lin et al., J. Am. Chem. Soc. 1998, 120, 8531-8532). The activity enhancement was even more pronounced in case of G-clamp, as a single substitution was shown to significantly improve the in vitro potency of a 20 mer 2′-deoxyphosphorothioate oligonucleotides (Flanagan et al., Proc. Natl. Acad. Sci. USA, 1999, 96, 3513-3518). Nevertheless, to optimize oligonucleotide design and to better understand the impact of these heterocyclic modifications on the biological activity, it is important to evaluate their effect on the nuclease stability of the oligomers.

[0185] Further modified polycyclic heterocyclic compounds useful as heterocyclcic bases are disclosed in but not limited to, the above noted U.S. Pat. No. 3,687,808, as well as: 4,845,205; 5,130,302; 5,134,066; 5,175,273; 5,367,066; 5,432,272; 5,434,257; 5,457,187; 5,459,255; 5,484,908; 5,502,177; 5,525,711; 5,552,540; 5,587,469; 5,594,121, 5,596,091; 5,614,617; 5,645,985; 5,646,269; 5,750,692; 5,830,653; 5,763,588; 6,005,096; and 5,681,941, and U.S. patent application Ser. No. 09/996,292 filed Nov. 28, 2001, certain of which are commonly owned with the instant application, and each of which is herein incorporated by reference.

Conjugates

[0186] Another modification of the oligonucleotides of the invention involves chemically linking to the oligonucleotide one or more moieties or conjugates which enhance the activity, cellular distribution or cellular uptake of the oligonucleotide. These moieties or conjugates can include conjugate groups covalently bound to functional groups such as primary or secondary hydroxyl groups. Conjugate groups of the invention include, but are not limited to, intercalators, reporter molecules, polyamines, polyamides, polyethylene glycols, polyethers, groups that enhance the pharmacodynamic properties of oligomers, and groups that enhance the pharmacokinetic properties of oligomers. Typical conjugate groups include, but are not limited to, cholesterols, lipids, phospholipids, biotin, phenazine, folate, phenanthridine, anthraquinone, acridine, fluoresceins, rhodamines, coumarins, and dyes. Groups that enhance the pharmacodynamic properties, in the context of this invention, include groups that improve uptake, enhance resistance to degradation, and/or strengthen sequence-specific hybridization with the target nucleic acid. Groups that enhance the pharmacokinetic properties, in the context of this invention, include groups that improve uptake, distribution, metabolism or excretion of the compounds of the present invention. Representative conjugate groups are disclosed in International Patent Application PCT/US92/09196, filed Oct. 23, 1992, and U.S. Pat. No. 6,287,860, each of which is incorporated herein by reference in its entirety.

[0187] Conjugate moieties include but are not limited to lipid moieties such as a cholesterol moiety (Letsinger et al., Proc. Natl. Acad. Sci. USA, 1989, 86, 6553-6556), cholic acid (Manoharan et al., Bioorg. Med. Chem. Let., 1994, 4, 1053-1060), a thioether, e.g., hexyl-S-tritylthiol (Manoharan et al., Ann. N.Y. Acad. Sci., 1992, 660, 306-309; Manoharan et al., Bioorg. Med. Chem. Let., 1993, 3, 2765-2770), a thiocholesterol (Oberhauser et al., Nucl. Acids Res., 1992, 20, 533-538), an aliphatic chain, e.g., dodecandiol or undecyl residues (Saison-Behmoaras et al., EMBO J., 1991, 10, 1111-1118; Kabanov et al., FEBS Lett., 1990, 259, 327-330; Svinarchuk et al., Biochimie, 1993, 75, 49-54), a phospholipid, e.g., di-hexadecyl-rac-glycerol or triethylammonium 1,2-di-O-hexadecyl-rac-glycero-3-H-phosphonate (Manoharan et al., Tetrahedron Lett., 1995, 36, 3651-3654; Shea et al., Nucl. Acids Res., 1990, 18, 3777-3783), a polyamine or a polyethylene glycol chain (Manoharan et al., Nucleosides & Nucleotides, 1995, 14, 969-973), or adamantane acetic acid (Manoharan et al., Tetrahedron Lett., 1995, 36, 3651-3654), a palmityl moiety (Mishra et al., Biochim. Biophys. Acta, 1995, 1264, 229-237), or an octadecylamine or hexylamino-carbonyl-oxycholesterol moiety (Crooke et al., J. Pharmacol. Exp. Ther., 1996, 277, 923-937.

[0188] The oligomeric compounds of the invention may also be conjugated to active drug substances, for example, aspirin, warfarin, phenylbutazone, ibuprofen, suprofen, fenbufen, ketoprofen, (S)-(+)-pranoprofen, carprofen, dansylsarcosine, 2,3,5-triiodobenzoic acid, flufenamic acid, folinic acid, a benzothiadiazide, chlorothiazide, a diazepine, indomethicin, a barbiturate, a cephalosporin, a sulfa drug, an antidiabetic, an antibacterial or an antibiotic. Oligonucleotide-drug conjugates and their preparation are described in U.S. patent application Ser. No. 09/334,130 (filed Jun. 15, 1999) which is incorporated herein by reference in its entirety.

[0189] Representative U.S. Patents that teach the preparation of such oligonucleotide conjugates include, but are not limited to: U.S. Pat. Nos. 4,828,979; 4,948,882; 5,218,105; 5,525,465; 5,541,313; 5,545,730; 5,552,538; 5,578,717, 5,580,731; 5,580,731; 5,591,584; 5,109,124; 5,118,802; 5,138,045; 5,414,077; 5,486,603; 5,512,439; 5,578,718; 5,608,046; 4,587,044; 4,605,735; 4,667,025; 4,762,779; 4,789,737; 4,824,941; 4,835,263; 4,876,335; 4,904,582; 4,958,013; 5,082,830; 5,112,963; 5,214,136; 5,082,830; 5,112,963; 5,214,136; 5,245,022; 5,254,469; 5,258,506; 5,262,536; 5,272,250; 5,292,873; 5,317,098; 5,371,241, 5,391,723; 5,416,203, 5,451,463; 5,510,475; 5,512,667; 5,514,785; 5,565,552; 5,567,810; 5,574,142; 5,585,481; 5,587,371; 5,595,726; 5,597,696; 5,599,923; 5,599,928 and 5,688,941, certain of which are commonly owned with the instant application, and each of which is herein incorporated by reference.

Chimeric compounds

[0190] It is not necessary for all positions in a given compound to be uniformly modified and, in fact, more than one of the aforementioned modifications may be incorporated in a single compound or even at a single nucleoside within an oligomeric compound.

[0191] The present invention also includes oligomeric compounds that are chimeric compounds. “Chimeric” oligomeric compounds or “chimeras,” in the context of this invention, are oligomeric compounds, particularly antisense oligonucleotides, which contain two or more chemically distinct regions, each made up of at least one monomer unit, i.e., a nucleotide in the case of an oligonucleotide compound. These oligonucleotides typically contain at least one region wherein the oligonucleotide is modified so as to confer upon the oligonucleotide increased resistance to nuclease degradation, increased cellular uptake, increased stability and/or increased binding affinity for the target nucleic acid. An additional region of the oligonucleotide may serve as a substrate for enzymes capable of cleaving RNA:DNA or RNA:RNA hybrids. By way of example, RNAse H is a cellular endonuclease which cleaves the RNA strand of an RNA:DNA duplex. Activation of RNase H, therefore, results in cleavage of the RNA target, thereby greatly enhancing the efficiency of oligonucleotide-mediated inhibition of gene expression. The cleavage of RNA:RNA hybrids can, in like fashion, be accomplished through the actions of endoribonucleases, such as RNAseL which cleaves both cellular and viral RNA. Cleavage of the RNA target can be routinely detected by gel electrophoresis and, if necessary, associated nucleic acid hybridization techniques known in the art.

[0192] Chimeric oligomeric compounds of the invention may be formed as composite structures of two or more oligonucleotides, modified oligonucleotides, oligonucleosides and/or oligonucleotide mimetics as described above. Such compounds have also been referred to in the art as hybrids or gapmers. Representative U.S. patents that teach the preparation of such hybrid structures include, but are not limited to: U.S. Pat. Nos. 5,013,830; 5,149,797; 5,220,007; 5,256,775; 5,366,878; 5,403,711; 5,491,133; 5,565,350; 5,623,065; 5,652,355; 5,652,356; and 5,700,922, certain of which are commonly owned with the instant application, and each of which is incorporated herein by reference in its entirety.

3′-endo Modifications

[0193] In one aspect of the present invention oligomeric compounds include nucleosides synthetically modified to induce a 3′-endo sugar conformation. A nucleoside can incorporate synthetic modifications of the heterocyclic base, the sugar moiety or both to induce a desired 3′-endo sugar conformation. These modified nucleosides are used to mimic RNA like nucleosides so that particular properties of an oligomeric compound can be enhanced while maintaining the desirable 3′-endo conformational geometry. There is an apparent preference for an RNA type duplex (A form helix, predominantly 3′-endo) as a requirement (e.g. trigger) of RNA interference which is supported in part by the fact that duplexes composed of 2′-deoxy-2′-F-nucleosides appears efficient in triggering RNAi response in the C. elegans system. Properties that are enhanced by using more stable 3′-endo nucleosides include but are not limited to modulation of pharmacokinetic properties through modification of protein binding, protein off-rate, absorption and clearance; modulation of nuclease stability as well as chemical stability; modulation of the binding affinity and specificity of the oligomer (affinity and specificity for enzymes as well as for complementary sequences); and increasing efficacy of RNA cleavage. The present invention provides oligomeric triggers of RNAi having one or more nucleosides modified in such a way as to favor a C3′-endo type conformation.

[chemical structure]

[0194] Nucleoside conformation is influenced by various factors including substitution at the 2′, 3′ or 4′-positions of the pentofuranosyl sugar. Electronegative substituents generally prefer the axial positions, while sterically demanding substituents generally prefer the equatorial positions (Principles of Nucleic Acid Structure, Wolfgang Sanger, 1984, Springer-Verlag.) Modification of the 2′ position to favor the 3′-endo conformation can be achieved while maintaining the 2′-OH as a recognition element (Gallo et al., Tetrahedron, 2001, 57, 5707-5713; Harry-O'kuru et al., J. Org. Chem., 1997, 62(6), 1754-1759; and Tang et al., J. Org. Chem., 1999, 64, 747-754.) Alternatively, preference for the 3′-endo conformation can be achieved by deletion of the 2′-OH as exemplified by 2′deoxy-2′-nucleosides (Kawasaki et al., J. Med. Chem., 1993, 36, 831-841), which adopts the 3′-endo conformation positioning the electronegative fluorine atom in the axial position. Other modifications of the ribose ring, for example substitution at the 4′-position to give 4′-F modified nucleosides (Guillerm et al., Bioorganic and Medicinal Chemistry Letters, 1995, 5, 1455-1460 and Owen et al., J. Org. Chem., 1976, 41, 3010-3017), or for example modification to yield methanocarba nucleoside analogs (Jacobson et al., J. Med. Chem. Lett., 2000, 43, 2196-2203 and Lee et al., Bioorganic and Medicinal Chemistry Letters, 2001, 11, 1333-1337) also induce preference for the 3′-endo conformation. Along similar lines, oligomeric triggers of RNAi response might be composed of one or more nucleosides modified in such a way that conformation is locked into a C3′-endo type conformation, i.e. Locked Nucleic Acid (LNA, Singh et al, Chem. Commun., 1998, 4, 455-456), and ethylene bridged Nucleic Acids (ENA, Morita et al, Bioorganic & Medicinal Chemistry Letters, 2002, 12, 73-76). Examples of modified nucleosides amenable to the present invention are shown below in Table 1. These examples are meant to be representative and not exhaustive.

TABLE 1

[chemical structure]

[chemical structure]

[chemical structure]

[chemical structure]

[chemical structure]

[chemical structure]

[chemical structure]

[0195] Suitable conformation of modified nucleosides and their oligomers can be estimated by various methods such as molecular dynamics calculations, nuclear magnetic resonance spectroscopy and CD measurements. Hence, modifications predicted to induce RNA like conformations, A-form duplex geometry in an oligomeric context, are selected for use in the modified oligoncleotides of the present invention. The synthesis of numerous of the modified nucleosides amenable to the present invention are known in the art (see for example, Chemistry of Nucleosides and Nucleotides Vol 1-3, ed. Leroy B. Townsend, 1988, Plenum press., and the examples section below).

[0196] In one aspect, the present invention is directed to oligonucleotides that are prepared having enhanced properties compared to native RNA against nucleic acid targets. A target is identified and an oligonucleotide is selected having an effective length and sequence that is complementary to a portion of the target sequence. Each nucleoside of the selected sequence is scrutinized for possible enhancing modifications. A suitable modification would be the replacement of one or more RNA nucleosides with nucleosides that have the same 3′-endo conformational geometry. Such modifications can enhance chemical and nuclease stability relative to native RNA while at the same time being much cheaper and easier to synthesize and/or incorporate into an oligonulceotide. The selected sequence can be further divided into regions and the nucleosides of each region evaluated for enhancing modifications that can be the result of a chimeric configuration. Consideration is also given to the 5′ and 3′-termini as there are often advantageous modifications that can be made to one or more of the terminal nucleosides. The oligomeric compounds of the present invention include at least one 5′-modified phosphate group on a single strand or on at least one 5′-position of a double stranded sequence or sequences. Further modifications are also considered such as internucleoside linkages, conjugate groups, substitute sugars or bases, substitution of one or more nucleosides with nucleoside mimetics and any other modification that can enhance the selected sequence for its intended target.

[0197] The terms used to describe the conformational geometry of homoduplex nucleic acids are “A Form” for RNA and “B Form” for DNA. The respective conformational geometry for RNA and DNA duplexes was determined from X-ray diffraction analysis of nucleic acid fibers (Arnott and Hukins, Biochem. Biophys. Res. Comm., 1970, 47, 1504). In general, RNA:RNA duplexes are more stable and have higher melting temperatures (Tm's) than DNA:DNA duplexes (Sanger et al., Principles of Nucleic Acid Structure, 1984, Springer-Verlag; New York, N.Y.; Lesnik et al., Biochemistry, 1995, 34, 10807-10815; Conte et al., Nucleic Acids Res., 1997, 25, 2627-2634). The increased stability of RNA has been attributed to several structural features, most notably the improved base stacking interactions that result from an A-form geometry (Searle et al., Nucleic Acids Res., 1993, 21, 2051-2056). The presence of the 2′ hydroxyl in RNA biases the sugar toward a C3′ endo pucker, i.e., also designated as Northern pucker, which causes the duplex to favor the A-form geometry. In addition, the 2′ hydroxyl groups of RNA can form a network of water mediated hydrogen bonds that help stabilize the RNA duplex (Egli et al., Biochemistry, 1996, 35, 8489-8494). On the other hand, deoxy nucleic acids prefer a C2′ endo sugar pucker, i.e., also known as Southern pucker, which is thought to impart a less stable B-form geometry (Sanger, W. (1984) Principles of Nucleic Acid Structure, Springer-Verlag, New York, N.Y.). As used herein, B-form geometry is inclusive of both C2′-endo pucker and O4′-endo pucker. This is consistent with Berger, et. al., Nucleic Acids Research, 1998, 26, 2473-2480, who pointed out that in considering the furanose conformations which give rise to B-form duplexes consideration should also be given to a O4′-endo pucker contribution.

[0198] DNA:RNA hybrid duplexes, however, are usually less stable than pure RNA:RNA duplexes, and depending on their sequence may be either more or less stable than DNA:DNA duplexes (Searle et al., Nucleic Acids Res., 1993, 21, 2051-2056). The structure of a hybrid duplex is intermediate between A- and B-form geometries, which may result in poor stacking interactions (Lane et al., Eur. J. Biochem., 1993, 215, 297-306; Fedoroff et al., J. Mol. Biol., 1993, 233, 509-523; Gonzalez et al., Biochemistry, 1995, 34, 4969-4982; Horton et al., J. Mol. Biol., 1996, 264, 521-533). The stability of the duplex formed between a target RNA and a synthetic sequence is central to therapies such as but not limited to antisense and RNA interference as these mechanisms require the binding of a synthetic oligonucleotide strand to an RNA target strand. In the case of antisense, effective inhibition of the mRNA requires that the antisense DNA have a very high binding affinity with the mRNA. Otherwise the desired interaction between the synthetic oligonucleotide strand and target mRNA strand will occur infrequently, resulting in decreased efficacyl.

[0199] One routinely used method of modifying the sugar puckering is the substitution of the sugar at the 2′-position with a substituent group that influences the sugar geometry. The influence on ring conformation is dependant on the nature of the substituent at the 2′-position. A number of different substituents have been studied to determine their sugar puckering effect. For example, 2′-halogens have been studied showing that the 2′-fluoro derivative exhibits the largest population (65%) of the C3′-endo form, and the 2′-iodo exhibits the lowest population (7%). The populations of adenosine (2′-OH) versus deoxyadenosine (2′-H) are 36% and 19%, respectively. Furthermore, the effect of the 2′-fluoro group of adenosine dimers (2′-deoxy-2′-fluoroadenosine-2′-deoxy-2′-fluoro-adenosine) is further correlated to the stabilization of the stacked conformation.

[0200] As expected, the relative duplex stability can be enhanced by replacement of 2′-OH groups with 2′-F groups thereby increasing the C3′-endo population. It is assumed that the highly polar nature of the 2′-F bond and the extreme preference for C3′-endo puckering may stabilize the stacked conformation in an A-form duplex. Data from UV hypochromicity, circular dichroism, and ¹H NMR also indicate that the degree of stacking decreases as the electronegativity of the halo substituent decreases. Furthermore, steric bulk at the 2′-position of the sugar moiety is better accommodated in an A-form duplex than a B-form duplex. Thus, a 2′-substituent on the 3′-terminus of a dinucleoside monophosphate is thought to exert a number of effects on the stacking conformation: steric repulsion, furanose puckering preference, electrostatic repulsion, hydrophobic attraction, and hydrogen bonding capabilities. These substituent effects are thought to be determined by the molecular size, electronegativity, and hydrophobicity of the substituent. Melting temperatures of complementary strands is also increased with the 2′-substituted adenosine diphosphates. It is not clear whether the 3′-endo preference of the conformation or the presence of the substituent is responsible for the increased binding. However, greater overlap of adjacent bases (stacking) can be achieved with the 3′-endo conformation.

[0201] One synthetic 2′-modification that imparts increased nuclease resistance and a very high binding affinity to nucleotides is the 2-methoxyethoxy (2′-MOE, 2′-OCH₂CH₂OCH₃) side chain (Baker et al., J. Biol. Chem., 1997, 272, 11944-12000). One of the immediate advantages of the 2′-MOE substitution is the improvement in binding affinity, which is greater than many similar 2′ modifications such as O-methyl, O-propyl, and O-aminopropyl. Oligonucleotides having the 2′-O-methoxyethyl substituent also have been shown to be antisense inhibitors of gene expression with promising features for in vivo use (Martin, Helv. Chim. Acta, 1995, 78, 486-504; Altmann et al., Chimia, 1996, 50, 168-176; Altmann et al., Biochem. Soc. Trans., 1996, 24, 630-637; and Altmann et al., Nucleosides Nucleotides, 1997, 16, 917-926). Relative to DNA, the oligonucleotides having the 2′-MOE modification displayed improved RNA affinity and higher nuclease resistance. Chimeric oligonucleotides having 2′-MOE substituents in the wing nucleosides and an internal region of deoxy-phosphorothioate nucleotides (also termed a gapped oligonucleotide or gapmer) have shown effective reduction in the growth of tumors in animal models at low doses. 2′-MOE substituted oligonucleotides have also shown outstanding promise as antisense agents in several disease states. One such MOE substituted oligonucleotide is presently being investigated in clinical trials for the treatment of CMV retinitis.

[0202] Unless otherwise defined herein, alkyl means C₁-C₁₂, C₁-C₈, or C₁-C₆, straight or (where possible) branched chain aliphatic hydrocarbyl.

[0203] Unless otherwise defined herein, heteroalkyl means C₁-C₁₂, C₁-C₈, or C₁-C₆, straight or (where possible) branched chain aliphatic hydrocarbyl containing at least one or about 1 to about 3, hetero atoms in the chain, including the terminal portion of the chain. Suitable heteroatoms include N, O and S.

[0204] Unless otherwise defined herein, cycloalkyl means C₃-C₁₂, C₃-C₈, or C₃-C₆, aliphatic hydrocarbyl ring.

[0205] Unless otherwise defined herein, alkenyl means C₂-C₁₂, C₂-C₈, or C₂-C₆ alkenyl, which may be straight or (where possible) branched hydrocarbyl moiety, which contains at least one carbon-carbon double bond.

[0206] Unless otherwise defined herein, alkynyl means C₂-C₁₂, C₂-C₈, or C₂-C₆ alkynyl, which may be straight or (where possible) branched hydrocarbyl moiety, which contains at least one carbon-carbon triple bond.

[0207] Unless otherwise defined herein, heterocycloalkyl means a ring moiety containing at least three ring members, at least one of which is carbon, and of which 1, 2 or three ring members are other than carbon. The number of carbon atoms can vary from 1 to about 12 or from 1 to about 6, and the total number of ring members can vary from three to about 15 or from about 3 to about 8. Suitable ring heteroatoms are N, O and S. Suitable heterocycloalkyl groups include morpholino, thiomorpholino, piperidinyl, piperazinyl, homopiperidinyl, homopiperazinyl, homomorpholino, homothiomorpholino, pyrrolodinyl, tetrahydrooxazolyl, tetrahydroimidazolyl, tetrahydrothiazolyl, tetrahydroisoxazolyl, tetrahydropyrrazolyl, furanyl, pyranyl, and tetrahydroisothiazolyl.

[0208] Unless otherwise defined herein, aryl means any hydrocarbon ring structure containing at least one aryl ring. Suitable aryl rings have about 6 to about 20 ring carbons. Also suitable aryl rings include phenyl, napthyl, anthracenyl, and phenanthrenyl.

[0209] Unless otherwise defined herein, hetaryl means a ring moiety containing at least one filly unsaturated ring, the ring consisting of carbon and non-carbon atoms. The ring system can contain about 1 to about 4 rings. The number of carbon atoms can vary from 1 to about 12 or from 1 to about 6, and the total number of ring members can vary from three to about 15 or from about 3 to about 8. Suitable ring heteroatoms are N, O and S. Suitable hetaryl moieties include pyrazolyl, thiophenyl, pyridyl, imidazolyl, tetrazolyl, pyridyl, pyrimidinyl, purinyl, quinazolinyl, quinoxalinyl, benzimidazolyl, benzothiophenyl, etc.

[0210] Unless otherwise defined herein, where a moiety is defined as a compound moiety, such as hetarylalkyl (hetaryl and alkyl), aralkyl (aryl and alkyl), etc., each of the sub-moieties is as defined herein.

[0211] Unless otherwise defined herein, an electron withdrawing group is a group, such as the cyano or isocyanato group that draws electronic charge away from the carbon to which it is attached. Other electron withdrawing groups of note include those whose electronegativities exceed that of carbon, for example halogen, nitro, or phenyl substituted in the ortho- or para-position with one or more cyano, isothiocyanato, nitro or halo groups.

[0212] Unless otherwise defined herein, the terms halogen and halo have their ordinary meanings. Suitable halo (halogen) substituents are Cl, Br, and I.

[0213] The aforementioned optional substituents are, unless otherwise herein defined, suitable substituents depending upon desired properties. Included are halogens (Cl, Br, I), alkyl, alkenyl, and alkynyl moieties, NO₂, NH₃ (substituted and unsubstituted), acid moieties (e.g. —CO₂H, —OSO₃H₂, etc.), heterocycloalkyl moieties, hetaryl moieties, aryl moieties, etc.

[0214] In all the preceding formulae, the squiggle (˜) indicates a bond to an oxygen or sulfur of the 5′-phosphate.

[0215] Phosphate protecting groups include those described in U.S. Pat. Nos. 5,760,209; 5,614,621; 6,051,699; 6,020,475; 6,326,478; 6,169,177; 6,121,437; and 6,465,628; each of which is incorporated herein by reference in its entirety.

Formulations

[0216] The compounds of the invention may also be admixed, encapsulated, conjugated or otherwise associated with other molecules, molecule structures or mixtures of compounds, as for example, liposomes, receptor-targeted molecules, oral, rectal, topical or other formulations, for assisting in uptake, distribution and/or absorption. Representative U.S. patents that teach the preparation of such uptake, distribution and/or absorption-assisting formulations include, but are not limited to, U.S. Pat. Nos. 5,108,921; 5,354,844; 5,416,016; 5,459,127; 5,521,291; 5,543,158; 5,547,932; 5,583,020; 5,591,721; 4,426,330; 4,534,899; 5,013,556; 5,108,921; 5,213,804; 5,227,170; 5,264,221; 5,356,633; 5,395,619; 5,416,016; 5,417,978; 5,462,854; 5,469,854; 5,512,295; 5,527,528; 5,534,259; 5,543,152; 5,556,948; 5,580,575; and 5,595,756, each of which is incorporated herein by reference in its entirety.

[0217] The oligomeric compounds of the invention can encompass any pharmaceutically acceptable salts, esters, or salts of such esters, or any other compound which, upon administration to an animal, including a human, is capable of providing (directly or indirectly) the biologically active metabolite or residue thereof. Accordingly, for example, the disclosure is also drawn to prodrugs and pharmaceutically acceptable salts of the compounds of the invention, pharmaceutically acceptable salts of such prodrugs, and other bioequivalents.

[0218] The term “prodrug” indicates a therapeutic agent that is prepared in an inactive form that is converted to an active form (i.e., drug) within the body or cells thereof by the action of endogenous enzymes or other chemicals and/or conditions. In particular, prodrug versions of the oligonucleotides of the invention are prepared as SATE ((S acetyl-2-thioethyl) phosphate) derivatives according to the methods disclosed in WO 93/24510, WO 94/26764, and U.S. Pat. No. 5,770,713.

[0219] The term “pharmaceutically acceptable salts” refers to physiologically and pharmaceutically acceptable salts of the compounds of the invention: i.e., salts that retain the desired biological activity of the parent compound and do not impart undesired toxicological effects thereto. For oligonucleotides, suitable examples of pharmaceutically acceptable salts and their uses are further described in U.S. Pat. No. 6,287,860, which is incorporated herein by reference in its entirety.

[0220] The present invention also includes compositions and formulations, including pharmaceutical compositions and formulations, which include one or more of the oligomeric compounds of the invention. The compositions of the present invention may be administered in a number of ways depending upon whether local or systemic treatment is desired and upon the area to be treated. Administration may be topical (including ophthalmic and to mucous membranes including vaginal and rectal delivery), pulmonary, e.g., by inhalation or insufflation of powders or aerosols, including by nebulizer; intratracheal, intranasal, epidermal and transdermal), oral or parenteral. Parenteral administration includes, but is not limited to, intravenous, intraarterial, subcutaneous, intraperitoneal, or intramuscular injection or infusion; or intracranial, e.g., intrathecal or intraventricular, administration. Oligonucleotides with at least one 2′-O-methoxyethyl modification are believed to be particularly useful for oral administration. Compositions and formulations for topical administration may include transdermal patches, ointments, lotions, creams, gels, drops, suppositories, sprays, liquids, and powders. Conventional pharmaceutical carriers, aqueous, powder or oily bases, thickeners and the like may be necessary or desirable. Coated condoms, gloves and the like may also be useful.

[0221] The formulations of the present invention, which may conveniently be presented in unit dosage form, may be prepared according to conventional techniques well known in the pharmaceutical industry. Such techniques include the step of bringing into association the active ingredients with the pharmaceutical carrier(s) or excipient(s). In general, the formulations are prepared by uniformly and intimately bringing into association the active ingredients with liquid carriers or finely divided solid carriers or both, and then, if necessary, shaping the product.

[0222] The compositions of the present invention may be formulated into any of many possible dosage forms such as, but not limited to, tablets, capsules, gel capsules, liquid syrups, soft gels, suppositories, and enemas. The compositions of the present invention may also be formulated as suspensions in aqueous, non-aqueous or mixed media. Aqueous suspensions may further contain substances which increase the viscosity of the suspension including, for example, sodium carboxymethylcellulose, sorbitol and/or dextran. The suspension may also contain stabilizers.

[0223] The compositions of the present invention may include solutions, emulsions, foams and liposome-containing formulations. The compositions and formulations of the present invention may comprise one or more penetration enhancers, carriers, excipients, or other active or inactive ingredients.

[0224] Emulsions are typically heterogenous systems of one liquid dispersed in another in the form of droplets usually exceeding 0.1 μm in diameter. Emulsions may contain additional components in addition to the dispersed phases, and the active drug which may be present as a solution in either the aqueous phase, oily phase or itself as a separate phase. Microemulsions are included as an embodiment of the present invention. Emulsions and their uses are well known in the art and are further described in U.S. Pat. No. 6,287,860, which is incorporated herein by reference in its entirety.

[0225] Formulations of the present invention may include liposomal formulations. As used in the present invention, the term “liposome” means a vesicle composed of amphiphilic lipids arranged in a spherical bilayer or bilayers. Liposomes are unilamellar or multilamellar vesicles which have a membrane formed from a lipophilic material and an aqueous interior that contains the composition to be delivered. Cationic liposomes are positively charged liposomes which are believed to interact with negatively charged DNA molecules to form a stable complex. Liposomes that are pH sensitive or negatively charged are believed to entrap DNA rather than complex with it. Both cationic and noncationic liposomes have been used to deliver DNA to cells.

[0226] Liposomes also include “sterically stabilized” liposomes, a term which, as used herein, refers to liposomes comprising one or more specialized lipids that, when incorporated into liposomes, result in enhanced circulation lifetimes relative to liposomes lacking such specialized lipids. Examples of sterically stabilized liposomes are those in which part of the vesicle-forming lipid portion of the liposome comprises one or more glycolipids or is derivatized with one or more hydrophilic polymers, such as a polyethylene glycol (PEG) moiety. Liposomes and their uses are further described in U.S. Pat. No. 6,287,860, which is incorporated herein by reference in its entirety.

[0227] The formulations and compositions of the present invention may also include surfactants. The use of surfactants in drug products, formulations and in emulsions is well known in the art. Surfactants and their uses are further described in U.S. Pat. No. 6,287,860, which is incorporated herein by reference in its entirety.

[0228] In one embodiment, the present invention employs various penetration enhancers to effect the efficient delivery of nucleic acids, particularly oligonucleotides. In addition to aiding the diffusion of non-lipophilic drugs across cell membranes, penetration enhancers also enhance the permeability of lipophilic drugs. Penetration enhancers may be classified as belonging to one of five broad categories, i.e., surfactants, fatty acids, bile salts, chelating agents, and non-chelating non-surfactants. Penetration enhancers and their uses are further described in U.S. Pat. No. 6,287,860, which is incorporated herein by reference in its entirety.

[0229] One of skill in the art will recognize that formulations are routinely designed according to their intended use, i.e. route of administration.

[0230] Suitable formulations for topical administration include those in which the oligonucleotides of the invention are in admixture with a topical delivery agent such as lipids, liposomes, fatty acids, fatty acid esters, steroids, chelating agents and surfactants. Suitable lipids and liposomes include neutral (e.g. dioleoylphosphatidyl DOPE ethanolamine, dimyristoylphosphatidyl choline DMPC, distearolyphosphatidyl choline) negative (e.g. dimyristoylphosphatidyl glycerol DMPG) and cationic (e.g. dioleoyltetramethylaminopropyl DOTAP and dioleoylphosphatidyl ethanolamine DOTMA).

[0231] For topical or other administration, oligonucleotides of the invention may be encapsulated within liposomes or may form complexes thereto, in particular to cationic liposomes. Alternatively, oligonucleotides may be complexed to lipids, in particular to cationic lipids. Suitable fatty acids and esters, pharmaceutically acceptable salts thereof, and their uses are further described in U.S. Pat. No. 6,287,860, which is incorporated herein by reference in its entirety. Topical formulations are described in detail in U.S. patent application Ser. No. 09/315,298 filed on May 20, 1999, which is incorporated herein by reference in its entirety.

[0232] Compositions and formulations for oral administration include powders or granules, microparticulates, nanoparticulates, suspensions or solutions in water or non-aqueous media, capsules, gel capsules, sachets, tablets, or minitablets. Thickeners, flavoring agents, diluents, emulsifiers, dispersing aids or binders may be desirable. Suitable oral formulations are those in which oligonucleotides of the invention are administered in conjunction with one or more penetration enhancers surfactants and chelators. Suitable surfactants include, but are not limited to, fatty acids and/or esters or salts thereof, bile acids and/or salts thereof. Suitable bile acids/salts and fatty acids and their uses are further described in U.S. Pat. No. 6,287,860, which is incorporated herein by reference in its entirety. Also suitable are combinations of penetration enhancers, for example, fatty acids/salts in combination with bile acids/salts. A particularly suitable combination is the sodium salt of lauric acid, capric acid, and UDCA. Further penetration enhancers include, but are not limited to, polyoxyethylene-9-lauryl ether, and polyoxyethylene-20-cetyl ether.

[0233] Oligonucleotides of the invention may be delivered orally, in granular form including sprayed dried particles, or complexed to form micro or nanoparticles. Oligonucleotide complexing agents and their uses are further described in U.S. Pat. No. 6,287,860, which is incorporated herein by reference in its entirety. Oral formulations for oligonucleotides and their preparation are described in detail in U.S. application Ser. Nos. 09/108,673 (filed Jul. 1, 1998), 09/315,298 (filed May 20, 1999) and 10/071,822, filed Feb. 8, 2002, each of which is incorporated herein by reference in its entirety.

[0234] Compositions and formulations for parenteral, intrathecal or intraventricular administration may include sterile aqueous solutions which may also contain buffers, diluents and other suitable additives such as, but not limited to, penetration enhancers, carrier compounds and other pharmaceutically acceptable carriers or excipients.

[0235] Certain embodiments of the invention provide compositions containing one or more oligomeric compounds and one or more other chemotherapeutic agents which function by a non-antisense mechanism. Examples of such chemotherapeutic agents include, but are not limited to, cancer chemotherapeutic drugs such as daunorubicin, daunomycin, dactinomycin, doxorubicin, epirubicin, idarubicin, esorubicin, bleomycin, mafosfamide, ifosfamide, cytosine arabinoside, bis-chloroethylnitrosurea, busulfan, mitomycin C, actinomycin D, mithramycin, prednisone, hydroxyprogesterone, testosterone, tamoxifen, dacarbazine, procarbazine, hexamethylmelamine, pentamethylmelamine, mitoxantrone, amsacrine, chlorambucil, methylcyclohexylnitrosurea, nitrogen mustards, melphalan, cyclophosphamide, 6-mercaptopurine, 6-thioguanine, cytarabine, 5-azacytidine, hydroxyurea, deoxycoformycin, 4-hydroxyperoxycyclophosphoramide, 5-fluorouracil (5-FU), 5-fluorodeoxyuridine (5-FUdR), methotrexate (MTX), colchicine, taxol, vincristine, vinblastine, etoposide (VP-16), trimetrexate, irinotecan, topotecan, gemcitabine, teniposide, cisplatin and diethylstilbestrol (DES). When used with the compounds of the invention, such chemotherapeutic agents may be used individually (e.g., 5-FU and oligonucleotide), sequentially (e.g., 5-FU and oligonucleotide for a period of time followed by MTX and oligonucleotide), or in combination with one or more other such chemotherapeutic agents (e.g., 5-FU, MTX and oligonucleotide, or 5-FU, radiotherapy and oligonucleotide). Anti-inflammatory drugs, including, but not limited to, nonsteroidal anti-inflammatory drugs and corticosteroids, and antiviral drugs, including but not limited to ribivirin, vidarabine, acyclovir and ganciclovir, may also be combined in compositions of the invention. Combinations of oligomeric compounds and other non-antisense drugs are also within the scope of this invention. Two or more combined compounds may be used together or sequentially.

[0236] In another related embodiment, compositions of the invention may contain one or more oligomeric compounds, particularly antisense oligonucleotides, targeted to a first nucleic acid and one or more additional oligomeric compounds targeted to a second nucleic acid target. Alternatively, compositions of the invention may contain two or more oligomeric compounds targeted to different regions or segments of the same nucleic acid target. Numerous examples of oligomeric compounds are known in the art. Two or more combined compounds may be used together or sequentially.

Delivery

[0237] In some embodiments, the present invention is directed to methods and compositions for pulmonary delivery of oligonucleotide therapeutic compositions comprising penetration enhancers, carrier compounds and/or transfection agents. These methods are disclosed in International Publication WO 99/60166, which is incorporated herein by reference in its entirety.

[0238] Briefly, the compounds and methods of the invention employ particles containing oligonucleotide therapeutics or diagnostics. The particles can be solid or liquid, and can be of respirable size: that is, particles of a size sufficiently small to pass through the mouth and larynx upon inhalation and into the bronchi and alveoli of the lungs. In general, particles ranging from about 5 to 20 microns in size are respirable and are expected to reach the bronchioles (Allen, Secundum Artem, Vol. 6, No. 3, on-line publication updated May 8, 1998, and available at www.paddocklabs.com/secundum/secarndx.html). It is greatly desirable to avoid particles of non-respirable size, as these tend to deposit in the throat and be swallowed, thus reducing the quantity of oligonucleotide reaching the lung. Liquid pharmaceutical compositions of oligonucleotide can be prepared by combining the oligonucleotide with a suitable vehicle, for example sterile pyrogen free water, or saline solution. Other therapeutic compounds may optionally be included.

[0239] The present invention also contemplates the use of solid particulate compositions. Such compositions can comprise particles of oligonucleotide that are of respirable size. Such particles can be prepared by, for example, grinding dry oligonucleotide by conventional means, fore example with a mortar and pestle, and then passing the resulting powder composition through a 400 mesh screen to segregate large particles and agglomerates. A solid particulate composition comprised of an active oligonucleotide can optionally contain a dispersant which serves to facilitate the formation of an aerosol, for example lactose.

[0240] In accordance with the methods of the present invention, oligonucleotide compositions are aerosolized. Aerosolization of liquid particles can be produced by any suitable means, such as with a nebulizer. See, for example, U.S. Pat. No. 4,501,729. Nebulizers are commercially available devices which transform solutions or suspensions into a therapeutic aerosol mist either by means of acceleration of a compressed gas, typically air or oxygen, through a narrow venturi orifice or by means of ultrasonic agitation. Suitable nebulizers include those sold by Blairex® under the name PARI LC PLUS, PARI DURA-NEB 2000, PARI-BABY Size, PARI PRONEB Compressor with LC PLUS, PARI WALKHALER Compressor/Nebulizer System, PARI LC PLUS Reusable Nebulizer, and PARI LC Jet+ ®Nebulizer.

[0241] Exemplary formulations for use in nebulizers comprise an oligonucleotide in a liquid, such as sterile, pyragen free water, or saline solution, wherein the oligonucleotide comprises up to about 40% w/w of the formulation. The oligonucleotide can comprise less than 20% w/w. If desired, further additives such as preservatives (for example, methyl hydroxybenzoate) antioxidants, and flavoring agents can be added to the composition.

[0242] Solid particles comprising an oligonucleotide can also be aerosolized using any solid particulate medicament aerosol generator known in the art. Such aerosol generators produce respirable particles, as described above, and further produce reproducible metered dose per unit volume of aerosol. Suitable solid particulate aerosol generators include insufflators and metered dose inhalers. Metered dose inhalers suitable fore used in the art (along with the trade name, manufacturer and indication they are used for) and useful in the present invention include:

[0243] Delivery Device/Trade name/Manufacturer/Indication

[0244] Metered Dose Inhaler (MDI)/Alupent/Boehringer Ingelheim/Beta-adrenergic bronchodilator

[0245] Metered Dose Inhaler (MDI)/Atrovent/Boehringer Ingelheim/Anticholinergic bronchodilator

[0246] Aerobid/Aerobid-M/Forest/Steriodal Anti-inflammatory

[0247] Beclovent/Beconase/Glaxo Wellcome/Steriodal Anti-inflammatory

[0248] Flovent/Glaxo Wellcome/Steriodal Anti-inflammatory

[0249] Ventolin/Glaxo Wellcome/Beta-adrenergic bronchodilator

[0250] Proventil/Key Pharm./Beta-adrenergic bronchodilator

[0251] Maxair/3M Pharm./Beta-adrenergic bronchodilator

[0252] Azmacort/Rhone-Poulenc Rorer/Steriodal Anti-inflammatory

[0253] Tilade/Rhone-Poulenc Rorer/Anti-inflammatory (inhibits release of inflammatory mediators)

[0254] Intal/Rhone-Poulenc Rorer/Inhibits mast cell degranulation (Asthma)

[0255] Vanceril/Schering/Steriodal Anti-inflammatory

[0256] Tornalate/Dura Pharm./Beta-adrenergic bronchodilator

Solutions for Nebulization

[0257] Alupent/Boehringer Ingelheim/Beta-adrenergic bronchodilator

[0258] Pulmozyme/Genetech/Recombinant human deoxyribonuclease I

[0259] Ventolin/Glaxo Wellcome/Beta-adrenergic bronchodilator

[0260] Tornalate/Dura Pharm./Beta-adrenergic bronchodilator

[0261] Intal/Rhone-Poulenc Rorer/Inhibits mast cell degranulation (Asthma)

Capsules (Powder) for Inhalation

[0262] Ventolin/Glaxo Wellcome/(Rotocaps for use in Rotohaler device)/Beta-adrenergic bronchodilator

Powder for Inhalation

[0263] Pulmicort/Astra USA/(Turbuhaler device)/Steriodal Anti-inflammatory

[0264] In some embodiments, liquid or solid aerosols are produced at a rate of from about 10 to 150 liters per minute, from about 30 to 150 liters per minute, or about 60 liters per minute.

[0265] In some embodiments, a nucleic acid therapeutic or diagnostic composition is prepared, aerosolizing the nucleic acid composition, introducing the aerosolized nucleic acid composition into the lung of a mammal, and wherein the aerosolized nucleic acid composition comprises at least one oligonucleotide wherein the sugar moiety of at least one nucleoside unit of said oligonucleotide is not a 2′-deoxyribofuranosyl sugar moiety or at least one internucleotide linkage within said oligonucleotide is not a phosphodiester or a phosphorothioate linkage. In some embodiments, the sugar moiety of at least one nucleoside unit of said oligonucleotide is not a 2′-deoxyribofuranosyl sugar moiety. In some embodiments, the nucleoside unit is a 2′-O-substituted nucleoside unit. In some embodiments, the 2-O-substituent of said 2′-O-substituted nucleoside unit is a 2′-O-alkoxyalkoxy substituent. In some embodiments, said 2-O-substituent of said 2′-O-substituted nucleoside unit is a 2′-O-dialkylaminooxyalkyl substituent. In some embodiments, at least one internucleotide linkage within said oligonucleotide is not a phosphodiester or a phosphorothioate linkage. In some embodiments, at least one internucleotide linkage within said oligonucleotide is a 3′-methylenephosphonate, a non-phosphorus containing oligonucleoside linkage, a 2′-5′ linkage or is a 3′-deoxy-3′-amino phosphoramide linkage. In some embodiments, said pharmaceutical composition further comprises one or more pharmaceutically acceptable carriers. In some embodiments, said nucleic acid therapeutic or diagnostic composition is in aqueous media. In some embodiments, said nucleic acid therapeutic or diagnostic composition is sterilized, pyrogen free water. In some embodiments, said nucleic acid therapeutic or diagnostic composition is saline solution. In some embodiments, the nucleic acid therapeutic or diagnostic composition is a powder. In some embodiments, the nucleic acid therapeutic composition contains more than one oligonucleotide. In some embodiments, the oligonucleotide is an antisense oligonucleotide. In some embodiments, the nucleic acid therapeutic composition is aerosolized solution consists essentially of an antisense oligonucleotide in saline solution. In some embodiments, an animal having or suspected of having a disease or disorder that is treatable with one or more nucleic acids comprising administering a therapeutically effective amount of an aerosolized nucleic acid composition to the lung of the animal, wherein the aerosolized nucleic acid composition comprises at least one oligonucleotide wherein the sugar moiety of at least one nucleoside unit of said oligonucleotide is not a 2′-deoxyribofuranosyl sugar moiety or at least one internucleotide linkage within said oligonucleotide is not a phosphodiester or a phosphorothioate linkage.

[0266] The compounds of the present invention may also be administered by pulsatile delivery. “Pulsatile delivery” refers to a pharmaceutical formulation that delivers a first pulse of drug combined with a penetration enhancer and a second pulse of penetration enhancer to promote absorption of drug which is not absorbed upon release with the first pulse of penetration enhancer.

[0267] One embodiment of the present invention is a delayed release oral formulation for enhanced intestinal drug absorption, comprising a first population of carrier particles comprising the drug and a penetration enhancer, wherein the drug and penetration enhancer are released at a first location in the intestine, and a second population of carrier particles comprising a penetration enhancer and a delayed release coating or matrix, wherein the penetration enhancer is released at a second location in the intestine downstream from the first location, whereby absorption of the drug is enhanced when the drug reaches the second location. Alternatively, the penetration enhancers in the populations of carrier pareticles are different.

[0268] This enhancement is obtained by encapsulating at least two populations of carrier particles. The first population of carrier particles comprises a biologically active substance and a penetration enhancer, and the second (and optionally additional) population of carrier particles comprises a penetration enhancer and a delayed release coating or matrix.

[0269] A “first pass effect” that applies to orally administered drugs is degradation due to the action of gastric acid and various digestive enzymes. One means of ameliorating first pass clearance effects is to increase the dose of administered drug, thereby compensating for proportion of drug lost to first pass clearance. Although this may be readily achieved with i.v. administration by, for example, simply providing more of the drug to an animal, other factors influence the bioavailability of drugs administered via non-parenteral means. For example, a drug may be enzymatically or chemically degraded in the alimentary canal or blood stream and/or may be impermeable or semipermeable to various mucosal membranes.

[0270] It is also contemplated that these pharmaceutical compositions are capable of enhancing absorption of biologically active substances when administered via the rectal, vaginal, nasal or pulmonary routes. It is also contemplated that release of the biologically active substance can be achieved in any part of the gastrointestinal tract.

[0271] Enhanced bioavailability of the biologically active substances is also achieved via the oral administration of the compositions and methods of the present invention. The term “bioavailability” refers to a measurement of what portion of an administered drug reaches the circulatory system when a non-parenteral mode of administration is used to introduce the drug into an animal.

[0272] Penetration enhancers include, but are not limited to, members of molecular classes such as surfactants, fatty acids, bile salts, chelating agents, and non-chelating non-surfactant molecules (Lee et al., Critical Reviews in Therapeutic Drug Carrier Systems, 1991, p. 92). Carriers are inert molecules that may be included in the compositions of the present invention to interfere with processes that lead to reduction in the levels of bioavailable drug.

Dosing

[0273] The formulation of therapeutic compositions and their subsequent administration (dosing) is believed to be within the skill of those in the art. Dosing is dependent on several criteria, including severity and responsiveness of the disease state to be treated, with the course of treatment lasting from several days to several months, or until a cure is effected or a diminution of the disease state is achieved. Optimal dosing schedules can be calculated from measurements of drug accumulation in the body of the patient. Persons of ordinary skill can easily determine optimum dosages, dosing methodologies and repetition rates. Optimum dosages may vary depending on the relative potency of individual oligonucleotides, and can generally be estimated based on EC50s found to be effective in vitro and in vivo animal models. In general, dosage is from 0.01 μg to 100 g per kg of body weight, from 0.1 μg to 10 g per kg of body weight, from 1 μg to 1 g per kg of body weight, from 10 μg to 100 mg per kg of body weight, from 100 μg to 10 mg per kg of body weight, or from 100 μg to 1 mg per kg of body weight, and may be given once or more daily, weekly, monthly or yearly, or even once every 2 to 20 years. Persons of ordinary skill in the art can easily estimate repetition rates for dosing based on measured residence times and concentrations of the drug in bodily fluids or tissues. Following successful treatment, it may be desirable to have the patient undergo maintenance therapy to prevent the recurrence of the disease state, wherein the oligonucleotide is administered in maintenance doses, ranging from 0.01 μg to 100 g per kg of body weight, from 0.1 μg to 10 g per kg of body weight, from 1 μg to 1 g per kg of body weight, from 10 μg to 100 mg per kg of body weight, from 100 μg to 10 mg per kg of body weight, or from 100 μg to 1 mg per kg of body weight, once or more daily, to once every 20 years.

[0274] In some embodiments, 4-6 mg/kg of oligomer can be delivered intravenously. In other embodiments, 100 mg of oligomer can be delivered to the lungs in an aerosol.

Kits, Research Reagents, Diagnostics, and Therapeutics

[0275] The compounds of the present invention can be utilized for diagnostics, therapeutics, prophylaxis and as research reagents and kits. Furthermore, antisense oligonucleotides, which are able to inhibit gene expression with exquisite specificity, are often used by those of ordinary skill to elucidate the function of particular genes or to distinguish between functions of various members of a biological pathway.

[0276] For use in kits and diagnostics, the compounds of the present invention, either alone or in combination with other compounds or therapeutics, can be used as tools in differential and/or combinatorial analyses to elucidate expression patterns of a portion or the entire complement of genes expressed within cells and tissues.

[0277] As one non-limiting example, expression patterns within cells or tissues treated with one or more oligomeric compounds are compared to control cells or tissues not treated with oligomeric compounds and the patterns produced are analyzed for differential levels of gene expression as they pertain, for example, to disease association, signaling pathway, cellular localization, expression level, size, structure or function of the genes examined. These analyses can be performed on stimulated or unstimulated cells and in the presence or absence of other compounds which affect expression patterns.

[0278] Examples of methods of gene expression analysis known in the art include, but are not limited to, DNA arrays or microarrays (Brazma et al., FEBS Lett., 2000, 480, 17-24; Celis et al., FEBS Lett., 2000, 480, 2-16), SAGE (serial analysis of gene expression) (Madden, et al., Drug Discov. Today, 2000, 5, 415-425), READS (restriction enzyme amplification of digested cDNAs) (Prashar et al., Methods Enzymol., 1999, 303, 258-72), TOGA (total gene expression analysis) (Sutcliffe et al., Proc. Natl. Acad. Sci. U. S. A., 2000, 97, 1976-81), protein arrays and proteomics (Celis et al., FEBS Lett., 2000, 480, 2-16; Jungblut et al., Electrophoresis, 1999, 20, 2100-10), expressed sequence tag (EST) sequencing (Celis et al., FEBS Lett., 2000, 480, 2-16; Larsson et al., J. Biotechnol., 2000, 80, 143-57), subtractive RNA fingerprinting (SuRF) (Fuchs et al., Anal. Biochem., 2000, 286, 91-98; Larson et al., Cytometry, 2000, 41, 203-208), subtractive cloning, differential display (DD) (Jurecic et al., Curr. Opin. Microbiol., 2000, 3, 316-21), comparative genomic hybridization (Carulli et al., J. Cell Biochem. Suppl., 1998, 31, 286-96), FISH (fluorescent in situ hybridization) techniques (Going et al., Eur. J. Cancer, 1999, 35, 1895-904) and mass spectrometry methods (To, Comb. Chem. High Throughput Screen, 2000, 3, 235-41).

[0279] The compounds of the invention are useful for research and diagnostics, for example, because these compounds hybridize to nucleic acids encoding a SARS virus. For example, oligonucleotides that are shown to hybridize with such efficiency and under such conditions as disclosed herein as to be effective SARS virus inhibitors will also be effective primers or probes under conditions favoring gene amplification or detection, respectively. These primers and probes are useful in methods requiring the specific detection of nucleic acid molecules encoding a SARS virus and in the amplification of nucleic acid molecules for detection or for use in further studies of SARS virus. Hybridization of the antisense oligonucleotides, particularly the primers and probes, of the invention with a nucleic acid encoding SARS virus can be detected by means known in the art. Such means include, but are not limited to, conjugation of an enzyme to the oligonucleotide, radiolabelling of the oligonucleotide, or any other suitable detection means. Kits using such detection means for detecting the level of a SARS virus in a sample may also be prepared.

[0280] The specificity and sensitivity of antisense is also harnessed by those of skill in the art for therapeutic uses. Antisense compounds have been employed as therapeutic moieties in the treatment of disease states in animals, including humans. Antisense oligonucleotide drugs, including ribozymes, have been safely and effectively administered to humans and numerous clinical trials are presently underway. It is, thus, established that antisense compounds can be useful therapeutic modalities that can be configured to be useful in treatment regimes for the treatment of cells, tissues and animals, especially humans.

[0281] For therapeutics, an animal such as a human, suspected of having a disease or disorder which can be treated by modulating the expression of a SARS virus, is treated by administering oligomeric compounds, or compositions comprising the same, in accordance with this invention. For example, in one non-limiting embodiment, the methods comprise the step of administering to the animal in need of treatment, a therapeutically effective amount of a SARS virus inhibitor. The SARS virus inhibitors of the present invention effectively inhibit or reduce the activity of the SARS virus protein or inhibit or reduce the expression of a SARS virus protein. In one embodiment, the activity or expression of SARS virus in an animal is reduced by about 10% or more, about 20% or more, about 30% or more, about 40% or more, about 50% or more, about 60% or more, about 70% or more, about 80% or more, about 90% or more, about 95% or more, about 99% or more, or 100%.

[0282] For example, the reduction of the expression of a SARS virus may be measured in serum, adipose tissue, liver or any other body fluid, tissue or organ of the animal. In some embodiments, the cells contained within the fluids, tissues or organs being analyzed contain a nucleic acid molecule encoding a SARS virus protein and/or a SARS virus protein itself.

[0283] The compounds of the invention can be utilized in pharmaceutical compositions by adding an effective amount of a compound to a suitable pharmaceutically acceptable diluent or carrier. Use of the compounds and methods of the invention may also be useful, prophylactically.

[0284] While the present invention has been described with specificity in accordance with certain of its embodiments, the following examples serve only to illustrate the invention and are not intended to limit the same. In order that the invention disclosed herein may be more efficiently understood, examples are provided below. It should be understood that these examples are for illustrative purposes only and are not to be construed as limiting the invention in any manner.

### EXAMPLES

### Example 1

### Synthesis of Nucleoside Phosphoramidites

[0285] The following compounds, including amidites and their intermediates were prepared as described in U.S. Pat. No. 6,426,220 and published PCT WO 02/36743; 5′-O-Dimethoxytrityl-thymidine intermediate for 5-methyl dC amidite, 5′-O-Dimethoxytrityl-2′-deoxy-5-methylcytidine intermediate for 5-methyl-dC amidite, 5′-O-Dimethoxytrityl-2′-deoxy-N4-benzoyl-5-methylcytidine penultimate intermediate for 5-methyl dC amidite, (5′-O-(4,4′-Dimethoxytriphenylmethyl)-2′-deoxy-N4-benzoyl-5-methylcytidin-3′-O-yl)-2-cyanoethyl-N,N-diisopropylphosphoramidite (5-methyl dC amidite), 2′-Fluorodeoxyadenosine, 2′-Fluorodeoxyguanosine, 2′-Fluorouridine, 2′-Fluorodeoxycytidine, 2′-O-(2-Methoxyethyl) modified amidites, 2′-O-(2-methoxyethyl)-5-methyluridine intermediate, 5′-O-DMT-2′-O-(2-methoxyethyl)-5-methyluridine penultimate intermediate, (5′-O-(4,4′-Dimethoxytriphenylmethyl)-2′-O-(2-methoxyethyl)-5-methyluridin-3′-O-yl)-2-cyanoethyl-N,N-diisopropylphosphoramidite (MOE T amidite), 5′-O-Dimethoxytrityl-2′-O-(2-methoxyethyl)-5-methylcytidine intermediate, 5′-O-dimethoxytrityl-2′-O-(2-methoxyethyl)-N4-benzoyl-5-methyl-cytidine penultimate intermediate, (5′-O-(4,4′-Dimethoxytriphenylmethyl)-2′-O-(2-methoxyethyl)-N⁴-benzoyl-5-methylcytidin-3′-O-yl)-2-cyanoethyl-N,N-diisopropylphosphoramidite (MOE 5-Me-C amidite), (5′-O-(4,4′-Dimethoxytriphenylmethyl)-2′-O-(2-methoxyethyl)-N⁶-benzoyladenosin-3′-O-yl)-2-cyanoethyl-N,N-diisopropylphosphoramidite (MOE A amdite), (5′-O-(4,4′-Dimethoxytriphenylmethyl)-2′-O-(2-methoxyethyl)-N⁴-isobutyrylguanosin-3′-O-yl)-2-cyanoethyl-N,N-diisopropylphosphoramidite (MOE G amidite), 2′-O-(Aminooxyethyl) nucleoside amidites and 2′-O-(dimethylaminooxyethyl) nucleoside amidites, 2′-(Dimethylaminooxyethoxy) nucleoside amidites, 5′-O-tert-Butyldiphenylsilyl-O²-2′-anhydro-5-methyluridine, 5′-O-tert-Butyldiphenylsilyl-2′-O-(2-hydroxyethyl)-5-methyluridine, 2′-O-((2-phthalimidoxy)ethyl)-5′-t-butyldiphenylsilyl-5-methyluridine, 5′-O-tert-butyldiphenylsilyl-2′-O-((2-formadoximinooxy)ethyl)-5-methyluridine, 5′-O-tert-Butyldiphenylsilyl-2′-O-(N,Ndimethylaminooxyethyl)-5-methyluridine, 2′-O-(dimethylaminooxyethyl)-5-methyluridine, 5′-O-DMT-2′-O-(dimethylaminooxyethyl)-5-methyluridine, 5′-O-DMT-2′-O-(2-N,N-dimethylaminooxyethyl)-5-methyluridine-3′-((2-cyanoethyl)-N,N-diisopropylphosphoramidite), 2′-(Aminooxyethoxy) nucleoside amidites, N2-isobutyryl-6-O-diphenylcarbamoyl-2′-O-(2-ethylacetyl)-5′-O-(4,4′-dimethoxytrityl)guanosine-3′-((2-cyanoethyl)-N,N-diisopropylphosphoramidite), 2′-dimethylaminoethoxyethoxy (2′-DMAEOE) nucleoside amidites, 2′-O-(2(2-N,N-dimethylaminoethoxy)ethyl)-5-methyl uridine, 5′-O-dimethoxytrityl-2′-O-(2(2-N,N-dimethylaminoethoxy)-ethyl))-5-methyl uridine and 5′-O-Dimethoxytrityl-2′-O-(2(2-N,N-dimethylaminoethoxy)-ethyl))-5-methyl uridine-3′-O-(cyanoethyl-N,N-diisopropyl)phosphoramidite.

### Example 2

### Oligonucleotide and Oligonucleoside Synthesis

[0286] The oligomeric compounds used in accordance with this invention may be conveniently and routinely made through the well-known technique of solid phase synthesis. Equipment for such synthesis is sold by several vendors including, for example, Applied Biosystems (Foster City, Calif.). Any other means for such synthesis known in the art may additionally or alternatively be employed. It is well known to use similar techniques to prepare oligonucleotides such as the phosphorothioates and alkylated derivatives.

Oligonucleotides

[0287] Unsubstituted and substituted phosphodiester (P═O) oligonucleotides are synthesized on an automated DNA synthesizer (Applied Biosystems model 394) using standard phosphoramidite chemistry with oxidation by iodine.

[0288] Phosphorothioates (P═S) are synthesized similar to phosphodiester oligonucleotides with the following exceptions: thiation was effected by utilizing a 10% w/v solution of 3,H-1,2-benzodithiole-3-one 1,1-dioxide in acetonitrile for the oxidation of the phosphite linkages. The thiation reaction step time was increased to 180 sec and preceded by the normal capping step. After cleavage from the CPG column and deblocking in concentrated ammonium hydroxide at 55° C. (12-16 hours), the oligonucleotides were recovered by precipitating with >3 volumes of ethanol from a 1 M NH₄OAc solution. Phosphinate oligonucleotides are prepared as described in U.S. Pat. No. 5,508,270, which is incorporated herein by reference in its entirety.

[0289] Alkyl phosphonate oligonucleotides are prepared as described in U.S. Pat. No. 4,469,863, which is incorporated herein by reference in its entirety.

[0290] 3′-Deoxy-3′-methylene phosphonate oligonucleotides are prepared as described in U.S. Pat. Nos. 5,610,289 or 5,625,050, each of which is incorporated herein by reference in its entirety.

[0291] Phosphoramidite oligonucleotides are prepared as described in U.S. Pat. Nos. 5,256,775 or 5,366,878, each of which is incorporated herein by reference in its entirety.

[0292] Alkylphosphonothioate oligonucleotides are prepared as described in International Publications WO 94/17093 and WO 94/02499, each of which is incorporated herein by reference in its entirety.

[0293] 3′-Deoxy-3′-amino phosphoramidate oligonucleotides are prepared as described in U.S. Pat. No. 5,476,925, each of which is incorporated herein by reference in its entirety.

[0294] Phosphotriester oligonucleotides are prepared as described in U.S. Pat. No. 5,023,243, which is incorporated herein by reference in its entirety.

[0295] Borano phosphate oligonucleotides are prepared as described in U.S. Pat. Nos. 5,130,302 and 5,177,198, each of which is incorporated herein by reference in its entirety.

Oligonucleosides

[0296] Methylenemethylimino linked oligonucleosides, also identified as MMI linked oligonucleosides, methylenedimethylhydrazo linked oligonucleosides, also identified as MDH linked oligonucleosides, and methylenecarbonylamino linked oligonucleosides, also identified as amide-3 linked oligonucleosides, and methyleneaminocarbonyl linked oligonucleosides, also identified as amide-4 linked oligonucleosides, as well as mixed backbone compounds having, for instance, alternating MMI and P═O or P═S linkages are prepared as described in U.S. Pat. Nos. 5,378,825, 5,386,023, 5,489,677, 5,602,240 and 5,610,289, each of which is incorporated herein by reference in its entirety.

[0297] Formacetal and thioformacetal linked oligonucleosides are prepared as described in U.S. Pat. Nos. 5,264,562 and 5,264,564, each of which is incorporated herein by reference in its entirety.

[0298] Ethylene oxide linked oligonucleosides are prepared as described in U.S. Pat. No. 5,223,618, which is incorporated herein by reference in its entirety.

### Example 3

### RNA Synthesis

[0299] In general, RNA synthesis chemistry is based on the selective incorporation of various protecting groups at strategic intermediary reactions. Although one of ordinary skill in the art will understand the use of protecting groups in organic synthesis, a useful class of protecting groups includes silyl ethers. In particular, bulky silyl ethers are used to protect the 5′-hydroxyl in combination with an acid-labile orthoester protecting group on the 2′-hydroxyl. This set of protecting groups is then used with standard solid-phase synthesis technology. It is important to lastly remove the acid labile orthoester protecting group after all other synthetic steps. Moreover, the early use of the silyl protecting groups during synthesis ensures facile removal when desired, without undesired deprotection of 2′ hydroxyl.

[0300] Following this procedure for the sequential protection of the 5′-hydroxyl in combination with protection of the 2′-hydroxyl by protecting groups that are differentially removed and are differentially chemically labile, RNA oligonucleotides were synthesized.

[0301] RNA oligonucleotides are synthesized in a stepwise fashion. Each nucleotide is added sequentially (3′- to 5′-direction) to a solid support-bound oligonucleotide. The first nucleoside at the 3′-end of the chain is covalently attached to a solid support. The nucleotide precursor, a ribonucleoside phosphoramidite, and activator are added, coupling the second base onto the 5′-end of the first nucleoside. The support is washed and any unreacted 5′-hydroxyl groups are capped with acetic anhydride to yield 5′-acetyl moieties. The linkage is then oxidized to the more stable and ultimately desired P(V) linkage. At the end of the nucleotide addition cycle, the 5′-silyl group is cleaved with fluoride. The cycle is repeated for each subsequent nucleotide.

[0302] Following synthesis, the methyl protecting groups on the phosphates are cleaved in 30 minutes utilizing 1 M disodium-2-carbamoyl-2-cyanoethylene-1,1-dithiolate trihydrate (S₂Na₂) in DMF. The deprotection solution is washed from the solid support-bound oligonucleotide using water. The support is then treated with 40% methylamine in water for 10 minutes at 55° C. This releases the RNA oligonucleotides into solution, deprotects the exocyclic amines, and modifies the 2′- groups. The oligonucleotides can be analyzed by anion exchange HPLC at this stage.

[0303] The 2′-orthoester groups are the last protecting groups to be removed. The ethylene glycol monoacetate orthoester protecting group developed by Dharmacon Research, Inc. (Lafayette, Colo.), is one example of a useful orthoester protecting group that has the following important properties. It is stable to the conditions of nucleoside phosphoramidite synthesis and oligonucleotide synthesis. However, after oligonucleotide synthesis the oligonucleotide is treated with methylamine which not only cleaves the oligonucleotide from the solid support but also removes the acetyl groups from the orthoesters. The resulting 2-ethylhydroxyl substituents on the orthoester are less electron withdrawing than the acetylated precursor. As a result, the modified orthoester becomes more labile to acid-catalyzed hydrolysis. Specifically, the rate of cleavage is approximately 10 times faster after the acetyl groups are removed. Therefore, this orthoester possesses sufficient stability in order to be compatible with oligonucleotide synthesis and yet, when subsequently modified, permits deprotection to be carried out under relatively mild aqueous conditions compatible with the final RNA oligonucleotide product.

[0304] Additionally, methods of RNA synthesis are well known in the art (Scaringe, Ph.D. Thesis, University of Colorado, 1996; Scaringe et al., J. Am. Chem. Soc., 1998, 120, 11820-11821; Matteucci et al., J. Am. Chem. Soc., 1981, 103, 3185-3191; Beaucage et al., Tetrahedron Lett., 1981, 22, 1859-1862; Dahl et al., Acta Chem. Scand, 1990, 44, 639-641; Reddy et al., Tetrahedrom Lett., 1994, 25, 4311-4314; Wincott et al., Nucleic Acids Res., 1995, 23, 2677-2684; Griffin et al., Tetrahedron, 1967, 23, 2301-2313; Griffin et al., Tetrahedron, 1967, 23, 2315-2331).

[0305] RNA antisense compounds (RNA oligonucleotides) of the present invention can be synthesized by the methods herein or purchased from Dharmacon Research, Inc (Lafayette, Colo.). Once synthesized, complementary RNA antisense compounds can then be annealed by methods known in the art to form double stranded (duplexed) antisense compounds. For example, duplexes can be formed by combining 30 μl of each of the complementary strands of RNA oligonucleotides (50 μM RNA oligonucleotide solution) and 15 μl of 5X annealing buffer (100 mM potassium acetate, 30 mM HEPES-KOH pH 7.4, 2 mM magnesium acetate) followed by heating for 1 minute at 90° C., then 1 hour at 37° C. The resulting duplexed antisense compounds can be used in kits, assays, screens, or other methods to investigate the role of a target nucleic acid.

### Example 4

### Synthesis of Chimeric Oligonucleotides

[0306] Chimeric oligomeric compounds, such as, oligonucleotides, oligonucleosides or mixed oligonucleotides/oligonucleosides of the invention can be of several different types. These include a first type wherein the “gap” segment of linked nucleosides is positioned between 5′ and 3′ “wing” segments of linked nucleosides and a second “open end” type wherein the “gap” segment is located at either the 3′ or the 5′ terminus of the oligomeric compound. Oligonucleotides of the first type are also known in the art as “gapmers” or gapped oligonucleotides. Oligonucleotides of the second type are also known in the art as “hemimers” or “wingmers.”

### (20′-Me)-(2′-deoxy)-(2′-O-Me) Chimeric Phosphorothioate Oligonucleotides

[0307] Chimeric oligonucleotides having 2′-O-alkyl phosphorothioate and 2′-deoxy phosphorothioate oligonucleotide segments are synthesized using an Applied Biosystems automated DNA synthesizer Model 394, as above. Oligonucleotides are synthesized using the automated synthesizer and 2′-deoxy-5′-dimethoxytrityl-3′-O-phosphoramidite for the DNA portion and 5′-dimethoxytrityl-2′-O-methyl-3′-O-phosphoramidite for 5′ and 3′ wings. The standard synthesis cycle is modified by incorporating coupling steps with increased reaction times for the 5′-dimethoxytrityl-2′-O-methyl-3′-O-phosphoramidite. The fully protected oligonucleotide is cleaved from the support and deprotected in concentrated ammonia (NH₄OH) for 12-16 hours at 55° C. The deprotected oligo is then recovered by an appropriate method (precipitation, column chromatography, volume reduced in vacuo and analyzed spetrophotometrically for yield and for purity by capillary electrophoresis and by mass spectrometry.

### (2′-O-(2-Methoxyethyl))-(2′-deoxy)-(2′-O-(Methoxyethyl)) Chimeric Phosphorothioate Oligonucleotides

[0308] (2′-O-(2-methoxyethyl))-(2′-deoxy)-(-2′-O-(methoxyethyl)) chimeric phosphorothioate oligonucleotides were prepared as per the procedure above for the 2′-O-methyl chimeric oligonucleotide, with the substitution of 2′-O-(methoxyethyl) amidites for the 2′-O-methyl amidites.

### (2′-O-(2-Methoxyethyl)Phosphodiester)-(2′-deoxy Phosphorothioate)-(2′-O-(2-Methoxyethyl) Phosphodiester) Chimeric Oligonucleotides

[0309] (2′-O-(2-methoxyethyl phosphodiester)-(2′-deoxy phosphorothioate)-(2′-O-(methoxyethyl) phosphodiester) chimeric oligonucleotides are prepared as per the above procedure for the 2′-O-methyl chimeric oligonucleotide with the substitution of 2′-O-(methoxyethyl) amidites for the 2′-O-methyl amidites, oxidation with iodine to generate the phosphodiester internucleotide linkages within the wing portions of the chimeric structures and sulfurization utilizing 3,H-1,2 benzodithiole-3-one 1,1 dioxide (Beaucage Reagent) to generate the phosphorothioate internucleotide linkages for the center gap.

[0310] Other chimeric oligonucleotides, chimeric oligonucleosides and mixed chimeric oligonucleotides/oligonucleosides are synthesized according to U.S. Pat. No. 5,623,065, which is incorporated herein by reference in its entirety.

Oligomer Synthesis

[0311] Oligomerization of modified and unmodified nucleosides is performed according to literature procedures for DNA (Protocols for Oligonucleotides and Analogs, Ed. Agrawal (1993), Humana Press) and/or RNA (Scaringe, Methods (2001), 23, 206-217. Gait et al., Applications of Chemically synthesized RNA in RNA:Protein Interactions, Ed. Smith (1998), 1-36. Gallo et al., Tetrahedron (2001), 57, 5707-5713) synthesis as appropriate. In addition, specific protocols for the synthesis of oligomeric compounds of the invention are illustrated in the examples below.

[0312] RNA oligomers can be synthesized by methods disclosed herein or purchased from various RNA synthesis companies such as for example Dharmacon Research Inc., (Lafayette, Colo.).

[0313] The oligomeric compounds used in accordance with this invention may be conveniently and routinely made through the well-known technique of solid phase synthesis. Equipment for such synthesis is sold by several vendors including, for example, Applied Biosystems (Foster City, Calif.). Any other means for such synthesis known in the art may additionally or alternatively be employed. It is well known to use similar techniques to prepare oligonucleotides such as the phosphorothioates and alkylated derivatives.

### Example 5

### Design and Screening of Duplexed Antisense Compounds Targeting SARS Virus

[0314] In accordance with the present invention, a series of nucleic acid duplexes comprising the antisense compounds of the present invention and their complements can be designed to target SARS virus. The nucleobase sequence of the antisense strand of the duplex comprises at least a portion of an oligonucleotide in the Sequence Listing. The ends of the strands may be modified by the addition of one or more natural or modified nucleobases to form an overhang. The sense strand of the dsRNA is then designed and synthesized as the complement of the antisense strand and may also contain modifications or additions to either terminus. For example, in one embodiment, both strands of the dsRNA duplex would be complementary over the central nucleobases, each having overhangs at one or both termini.

[0315] For example, a duplex comprising an antisense strand having the sequence CGAGAGGCGGACGGGACCG (SEQ ID NO:1) and having a two-nucleobase overhang of deoxythymidine(dT) would have the following structure:

| | | |
|---|---|---|
| cgagaggcggacgggaccgTT | Antisense | (SEQ ID NO: 2) |
| \|\|\|\|\|\|\|\|\|\|\|\|\|\|\|\|\|\|\| | Strand | |
| TTgctctccgcctgccctggc | Complement | (SEQ ID NO: 3) |
| | Strand | |

[0316] In another embodiment, a duplex comprising an antisense strand having the same sequence CGAGAGGCGGACGGGACCG (SEQ ID NO:1) may be prepared with blunt ends (no single stranded overhang; i.e., the two “TT” overhangs shown above are omitted).

[0317] RNA strands of the duplex can be synthesized by methods disclosed herein or purchased from Dharmacon Research Inc., (Lafayette, Colo.). Once synthesized, the complementary strands are annealed. The single strands are aliquoted and diluted to a concentration of 50 μM. Once diluted, 30 μL of each strand is combined with 15 μL of a 5X solution of annealing buffer. The final concentration of said buffer is 100 mM potassium acetate, 30 mM HEPES-KOH pH 7.4, and 2 mM magnesium acetate. The final volume is 75 μL. This solution is incubated for 1 minute at 90° C. and then centrifuged for 15 seconds. The tube is allowed to sit for 1 hour at 37° C. at which time the dsRNA duplexes are used in experimentation. The final concentration of the dsRNA duplex is 20 μM. This solution can be stored frozen (−20° C.) and freeze-thawed up to 5 times.

[0318] Once prepared, the duplexed antisense compounds are evaluated for their ability to modulate SARS virus expression.

[0319] When cells reached 80% confluency, they are treated with duplexed antisense compounds of the invention. For cells grown in 96-well plates, wells are washed once with 200 μL OPTI-MEM-1 reduced-serum medium (Gibco BRL) and then treated with 130 μL of OPTI-MEM-1 containing 12 μg/mL LIPOFECTIN (Gibco BRL) and the desired duplex antisense compound at a final concentration of 200 nM. After 5 hours of treatment, the medium is replaced with fresh medium. Cells are harvested 16 hours after treatment, at which time RNA is isolated and target reduction measured by RT-PCR.

Additional Approaches to Targeting the SARS Virus Pseudoknot and Frameshift Site Ribosomal Frameshifting

[0320] Programmed ribosomal frameshifting is ubiquitous in all three domains of life. Two components are required to cause frameshifting: a slippery site and a stable RNA structure a little bit downstream. Slippery sites are characterized by the sequence string X XXY YYN, where the initial reading frame is indicated by the spaces and the X and Y can be identical nucleotides. Frameshifting occurs because the RNA structural element a few nucleotides downstream from the slippery site (usually less than 8 nucleotides) causes the ribosome to pause briefly while the tRNA's for the XXY and YYN codons are docked to the mRNA in the ribosome. Because these tRNA's can also dock to the RNA in the −1 frame and still match (at least in the non-wobble positions) the complex slips one position backwards, and then continues to make protein in the -1 frame (XXX YYY N). The downstream RNA structure facilitates the slippage.

[0321] Frameshifting is a widespread phenomenon in viruses, bacteria, protozoa and mammalian systems. Some mammalian genes have programmed frameshift sites. Of course, since viruses replicate in eukaryotic cells, we know that a wide variety of viral frameshift signals work well with eukaryotic ribosomes. Natural frameshift signals vary in efficiency from just a few percent up to nearly 100 percent, depending upon the strength of the signal.

[0322] In viruses, frameshifting is used to produce two different proteins in a desired ratio. HIV uses ribosomal frameshifting to make the structural protein gag, and its polymerase in a specific ratio. HIV needs a lot of gag, but only a little polymerase. About 95% of the time there is no frameshift, and only the gag structural protein is made using the first half of the mRNA. An in-frame stop codon for gag terminates translation. But 5% of the time, when frameshifting occurs, a fusion protein is made that contains polymerase, which HIV needs less of. The strength of the frameshift signal is tuned to produce the desired balance of each protein.

[0323] Another use of frameshifting is to produce two proteins with the same sequence, but different lengths. In this case there is only one productive reading frame and the frameshift throws translation out of frame immediately into a stop codon that results in a shorter than the full length product. An example of this is the dnaX gene of enteric bacteria. The dnax gene produces two proteins, tau and gamma, with different lengths. Tau is shorter than gamma because of the programmed frameshift.

[0324] In nature, the stability of the RNA structure downstream of the frameshift site controls the frequency of frameshifting. In the high percentage frameshift signals the structure is a pseudoknot, and in the low percentage frameshifts, such as HIV, it's a simple hairpin. Furthermore, it has been shown that by increasing the stability of the RNA structure, frameshifting can be enhanced. This can be accomplished by either a site directed mutagenesis that causes a more stable structure, or by adding an antisense oligonuceotide that adds to the length of a stem in a pre-existing structure.

Potential Ribosomalframeshift Site in SARS Virus

[0325] Ribosomal frameshifting has been documented as an essential feature in a number of viruses. These include the retroviruses (such as HIV), the Coronaviridae, Astroviridae, Totiviridae, among other families of viruses. The Coronaviridae is the family of viruses that infect humans and animals, and includes a species of virus that causes a common cold-like respiratory illness known as Human Coronavirus 229E (HCo-V-229E). Also included in this family are an avian infectious bronchitis virus (IBV), murine hepatitis virus (MHV), porcine transmissible gastroenteritis virus PRCoV, procine respiratory coronavirus and bovine coronavirus, among others (Lai and Holmes, Chapter 35 in the virus book). A well studied frameshift site is the Infectious Bronchitis Virus, a coronavirus that infects chickens. The structure of the IBV virus is a slippery site followed by a pseudoknot (see, FIG. 1).

[0326] The reason that coronavirus frameshift site exists is not clear. The frameshift site in coronaviruses is in between ORFs 1a and 1b. ORF 1a contains a number of proteins, including proteases, and ORF 1b contains the RNA-dependent-RNA-Polymerase. The RNA-dependent-RNA-Polymerase is an essential gene. Unlike some other RNA-genome viruses, Coronaviruses do not carry a copy of the RNA-dependent-RNA-Polymerase in the virion particle. Therefore, to succeed in replicating, the RNA-dependent-RNA-Polymerase must be translated directly from the genomic RNA. Since the RNA-dependent-RNA-Polymerase is located downstream of the frameshift site, it is absolutely required that the frameshift signal work in order to produce the coronavirus RNA-dependent-RNA-Polymerase, which is -1 out of frame with respect to the upstream ORF la. Perhaps this is why the infectious bronchitis virus frameshift site is so efficient (most are from 20-40% efficient).

[0327] If the SARS virus behaves the same way as the previously documented coronaviruses, it will have frameshift signal is a similar position of the genome, and the function of the frameshift site will be essential to the lifecycle of the virus. To determine if the SARS virus has a similar frameshift signal, a comparative analysis of SARS virus sequences published in GenBank, and previously known coronaviruses was conducted. The results of this analysis suggest that the SARS virus has a significant degree of sequence homology with the other coronaviruses that have documented frameshift sites. Confirmation that the SARS virus indeed likely has a frameshift site is shown by a comparison of structure. From the sequence comparison it can be determined that the regions involved in forming the slippery site and pseudoknot are more conserved in the alignment. Where changes occur in the pseudoknot structure, they are covarying pairs, which changes sequence, but conserves structure.

Antisense Inhibition of the SARS Virus Ribosomal Frameshift Site.

[0328] Oligonucleotides can be designed to disrupt or enhance the frameshift site. Oligonucleotides can be run beyond the end of stem 2, but breaking it up after nucleating outside the structure.

Cellular Localization

[0329] The present invention also encompasses compounds or molecules that are equipped or formulated with motifs that modulate intracellular distribution, localization, or retention of the molecule within a specific compartment of the cell. The motif specifically associates, complexes, or interacts with cellular components or macromolecules that predominantly reside or traffic to a location, compartment, or domain of a cell in which the basis of antisense activity, be it enzyme or process, occurs. The compounds or molecules of the invention may be synthetic or biological in nature, that regulate gene expression in a sequence-specific manner.

[0330] This invention is useful for antisense-based molecules which distribute or localize to sites in addition to or other than those which precede or are associated with antisense activity. This invention is intended to increase the effective concentration of the antisense molecule at point of action to increase its potency and/or efficacy.

[0331] The following motifs are candidate motifs for attachment or formulation with antisense molecules of interest, e.g. Rnase H ASOs (nucleus/nucleolus), siRNAs (cytoplasm), asRNAs (cytoplasm), 5′ capping inhibitors (nucleus), splicing inhibitors (nucleus), polyadenylation inhibitors (nucleus), translation inhibitors (cytoplasm, or preload in nucleus), 2-5 RNAseL (cytoplasm).

Peptide Motifs

[0332] “Leucine-rich” nuclear export signal (NES) for cytoplasmic localization; e.g. LQLPPLERLTL (rev) (SEQ ID NO:4), DLQKKLEELEL (MAPKK) (SEQ ID NO:5), ELALKLAGLDI (PKI-alpha) (SEQ ID NO:6), ALPHAIMRLDLA (actin) (SEQ ID NO:7).

[0333] KDEL (SEQ ID NO:8) for endoplasmic reticulum localization.

[0334] Arginine/lysine rich motifs for nuclear and/or nucleolar localization; e.g. nucleolar, PQRRNRSRRRRFRGQ (FXR2P) (SEQ ID NO:9), IMRRRGL (Angiogenin) (SEQ ID NO:10), GRKKRRQRRR (HIV-1 TAT) (SEQ ID NO:11).

[0335] Dermaseptin Derivatives (antimicrobial peptide), e.g. ALWKTLLKKVLKA (SEQ ID NO:12), demonstrated uptake into HeLa cells, cytoplasmic localization.

[0336] RS, RE, and RD repeat motifs for nuclear and nuclear speckle localization.

[0337] RG and KS repeat motifs for cytoplasmic localization.

Hydrophobic Motifs

[0338] Alkyl chains, e.g. C₁₀ to C₃₀.

Nucleic Acid Motifs

[0339] A strings—poly A binding protein (nuclear and cytoplasmic forms), e.g. An.

AU Rich Elements—ELAV Family

[0340] e.g. UUAUUUAUU minimum seq/length.

CU rich elements—ELAV Family

[0341] e.g. (CUUU)n recognized by HuD and HuR.

hnRNP Substrates

[0342] e.g. hnRNP A1 and K shuttle between the nucleus and cytoplasm, A1 associates w/PAPBl, transportin, and mRNA in the cytoplasm. High affinity binding site for A1 is UAGGGA/U.

Other Shuttling Protein Substrates (hnRNP-Like)

[0343] e.g. JKTBPs, consensus binding sites (GG)ACUAGC(A).

Y Strings or Tracts

[0344] e.g. substrates for hnRNP I (PTBP1/PTB).

Pumilio Recognition Sequence

[0345] e.g. UGUANAUR, where N is any base and R is a purine (Cell, 2002, 110, 501-12).

Combinatorial Selection

[0346] e.g. N₁₀-Fluorescent or Biotin Tag for identification of sequences that distribute to different subcellular locations.

[0347] Once localized in the correct compartment, enzymes residing there can effect modification of the target nucleic acid. For example, if localization to the cytoplasm is effected, RNAse L can be activated and result in the destruction of nucleic acid targets.

### Example 6

### Oligonucleotide Isolation

[0348] After cleavage from the controlled pore glass solid support and deblocking in concentrated ammonium hydroxide at 55° C. for 12-16 hours, the oligonucleotides or oligonucleosides are recovered by precipitation out of 1 M NH₄OAc with >3 volumes of ethanol. Synthesized oligonucleotides were analyzed by electrospray mass spectroscopy (molecular weight determination) and by capillary gel electrophoresis and judged to be at least 70% full length material. The relative amounts of phosphorothioate and phosphodiester linkages obtained in the synthesis was determined by the ratio of correct molecular weight relative to the -16 amu product (+/−32 +/−48). For some studies oligonucleotides were purified by HPLC, as described by Chiang et al., J. Biol. Chem. 1991, 266, 18162-18171. Results obtained with HPLC-purified material were similar to those obtained with non-HPLC purified material.

### Example 7

### Oligonucleotide Synthesis—96 Well Plate Format

[0349] Oligonucleotides were synthesized via solid phase P(III) phosphoramidite chemistry on an automated synthesizer capable of assembling 96 sequences simultaneously in a 96-well format. Phosphodiester internucleotide linkages were afforded by oxidation with aqueous iodine. Phosphorothioate internucleotide linkages were generated by sulfurization utilizing 3,H-1,2 benzodithiole-3-one 1,1 dioxide (Beaucage Reagent) in anhydrous acetonitrile. Standard base-protected beta-cyanoethyl-diiso-propyl phosphoramidites were purchased from commercial vendors (e.g. PE-Applied Biosystems, Foster City, Calif., or Pharmacia, Piscataway, N.J.). Non-standard nucleosides are synthesized as per standard or patented methods. They are utilized as base protected beta-cyanoethyldiisopropyl phosphoramidites.

[0350] Oligonucleotides were cleaved from support and deprotected with concentrated NH₄OH at elevated temperature (55-60° C.) for 12-16 hours and the released product then dried in vacuo. The dried product was then re-suspended in sterile water to afford a master plate from which all analytical and test plate samples are then diluted utilizing robotic pipettors.

### Example 8

### Oligonucleotide Analysis—96-Well Plate Format

[0351] The concentration of oligonucleotide in each well was assessed by dilution of samples and UV absorption spectroscopy. The full-length integrity of the individual products was evaluated by capillary electrophoresis (CE) in either the 96-well format (Beckman P/ACE™ MDQ) or, for individually prepared samples, on a commercial CE apparatus (e.g., Beckman P/ACE™ 5000, ABI 270). Base and backbone composition was confirmed by mass analysis of the compounds utilizing electrospray-mass spectroscopy. All assay test plates were diluted from the master plate using single and multi-channel robotic pipettors. Plates were judged to be acceptable if at least 85% of the compounds on the plate were at least 85% full length.

### Example 9

### Cell Culture and Oligonucleotide Treatment

[0352] The effect of antisense compounds on target nucleic acid expression can be tested in any of a variety of cell types provided that the target nucleic acid is present at measurable levels. This can be routinely determined using, for example, PCR or Northern blot analysis. The following cell types are provided for illustrative purposes, but other cell types can be routinely used, provided that the target is expressed in the cell type chosen or can be transfected into the cell type or, in the case of an infectious agent, if the foreign nucleic acid is found in the cell type infected. This can be readily determined by methods routine in the art, for example Northern blot analysis, ribonuclease protection assays, or RT-PCR.

Human Cell Lines

T-24 Cells:

[0353] The human transitional cell bladder carcinoma cell line T-24 was obtained from the American Type Culture Collection (ATCC) (Manassas, Va.). T-24 cells were routinely cultured in complete McCoy's 5A basal media (Invitrogen Corporation, Carlsbad, Calif.) supplemented with 10% fetal calf serum (Invitrogen Corporation, Carlsbad, Calif.), penicillin 100 units per mL, and streptomycin 100 micrograms per mL (Invitrogen Corporation, Carlsbad, Calif.). Cells were routinely passaged by trypsinization and dilution when they reached 90% confluence. Cells were seeded into 96-well plates (Falcon-Primaria #353872) at a density of 7000 cells/well for use in RT-PCR analysis.

[0354] For Northern blotting or other analysis, cells may be seeded onto 100 mm or other standard tissue culture plates and treated similarly, using appropriate volumes of medium and oligonucleotide.

A549 Cells:

[0355] The human lung carcinoma cell line A549 was obtained from the American Type Culture Collection (ATCC) (Manassas, Va.). A549 cells were routinely cultured in DMEM basal media (Invitrogen Corporation, Carlsbad, Calif.) supplemented with 10% fetal calf serum (Invitrogen Corporation, Carlsbad, Calif.), penicillin 100 units per mL, and streptomycin 100 micrograms per mL (Invitrogen Corporation, Carlsbad, Calif.). Cells were routinely passaged by trypsinization and dilution when they reached 90% confluence.

NHDF Cells:

[0356] Human neonatal dermal fibroblast (NHDF) were obtained from the Clonetics Corporation (Walkersville, Md.). NHDFs were routinely maintained in Fibroblast Growth Medium (Clonetics Corporation, Walkersville, Md.) supplemented as recommended by the supplier. Cells were maintained for up to 10 passages as recommended by the supplier.

HEK Cells:

[0357] Human embryonic keratinocytes (HEK) were obtained from the Clonetics Corporation (Walkersville, Md.). HEKs were routinely maintained in Keratinocyte Growth Medium (Clonetics Corporation, Walkersville, Md.) formulated as recommended by the supplier. Cells were routinely maintained for up to 10 passages as recommended by the supplier.

Primate Cell Lines

[0358] Vero E6 Cells:

[0359] These cells can be maintained, cultured and inoculated with biological specimens thought to contain the SARS virus via the method of Ksiazek et al., New England Journal of Medicine, 2003, 348(20), 1947-1958. Following infection, RNA can be isolated from the cells and oligonucleotide primers and probes to the virus can be used for quantitation of RNA by RT-PCR by any of the methods of Ksiazek et al., New England Journal of Medicine, 2003, 348(20), 1947-1958 or Drosten et al., New England Journal of Medicine, 2003, volume 348(20), 1967-1976.

Treatment with Antisense Compounds:

[0360] When cells reached 65-75% confluency, they were treated with oligonucleotide. For cells grown in 96-well plates, wells were washed once with 100 μL OPTI-MEM™-1 reduced-serum medium (Invitrogen Corporation, Carlsbad, Calif.) and then treated with 130 μL of OPTI-MEMm-1 containing 3.75 μg/mL LIPOFECTIN™ (Invitrogen Corporation, Carlsbad, Calif.) and the desired concentration of oligonucleotide. Cells are treated and data are obtained in triplicate. After 4-7 hours of treatment at 37° C., the medium was replaced with fresh medium. Cells were harvested 16-24 hours after oligonucleotide treatment.

[0361] The concentration of oligonucleotide used varies from cell line to cell line. To determine the optimal oligonucleotide concentration for a particular cell line, the cells are treated with a positive control oligonucleotide at a range of concentrations. For human cells the positive control oligonucleotide is selected from either ISIS 13920 (TCCGTCATCGCTCCTCAGGG) (SEQ ID NO:13) which is targeted to human H-ras, or ISIS 18078, (GTGCGCGCGAGCCCGAAATC) (SEQ ID NO:14) which is targeted to human Jun-N-terminal kinase-2 (JNK2). Both controls are 2′-O-methoxyethyl gapmers (2′-O-methoxyethyls shown in bold) with a phosphorothioate backbone. For mouse or rat cells the positive control oligonucleotide is ISIS 15770, ATGCATTCTGCCCCCAAGGA (SEQ ID NO:15), a 2′-O-methoxyethyl gapmer (2′-O-methoxyethyls shown in bold) with a phosphorothioate backbone which is targeted to both mouse and rat c-raf. The concentration of positive control oligonucleotide that results in 80% inhibition of c-H-ras (for ISIS 13920), JNK2 (for ISIS 18078) or c-raf (for ISIS 15770) mRNA is then utilized as the screening concentration for new oligonucleotides in subsequent experiments for that cell line. If 80% inhibition is not achieved, the lowest concentration of positive control oligonucleotide that results in 60% inhibition of c-H-ras, JNK2 or c-raf mRNA is then utilized as the oligonucleotide screening concentration in subsequent experiments for that cell line. If 60% inhibition is not achieved, that particular cell line is deemed as unsuitable for oligonucleotide transfection experiments. The concentrations of antisense oligonucleotides used herein are from 50 nM to 300 nM.

### Example 10

### Analysis of Oligonucleotide Inhibition of SARS Virus Expression

[0362] Antisense modulation of SARS virus expression can be assayed in a variety of ways known in the art. For example, SARS virus mRNA levels can be quantitated by, e.g., Northern blot analysis, competitive polymerase chain reaction (PCR), or real-time PCR (RT-PCR). Real-time quantitative PCR is presently suitable. RNA analysis can be performed on total cellular RNA or poly(A)+ mRNA. One method of RNA analysis of the present invention is the use of total cellular RNA as described in other examples herein. Methods of RNA isolation are well known in the art. Northern blot analysis is also routine in the art. Real-time quantitative (PCR) can be conveniently accomplished using the commercially available ABI PRISM™ 7600, 7700, or 7900 Sequence Detection System, available from PE-Applied Biosystems, Foster City, Calif. and used according to manufacturer's instructions.

[0363] Protein levels of SARS virus can be quantitated in a variety of ways well known in the art, such as immunoprecipitation, Western blot analysis (immunoblotting), enzyme-linked immunosorbent assay (ELISA) or fluorescence-activated cell sorting (FACS). Antibodies directed to SARS virus can be identified and obtained from a variety of sources, such as the MSRS catalog of antibodies (Aerie Corporation, Birmingham, MI), or can be prepared via conventional monoclonal or polyclonal antibody generation methods well known in the art.

### Example 11

### Design of Phenotypic Assays and in vivo Studies for the Use of SARS Virus Inhibitors

Phenotypic Assays

[0364] Once SARS virus inhibitors have been identified by the methods disclosed herein, the compounds are further investigated in one or more phenotypic assays, each having measurable endpoints predictive of efficacy in the treatment of a particular disease state or condition.

[0365] Phenotypic assays, kits and reagents for their use are well known to those skilled in the art and are herein used to investigate the role and/or association of SARS virus in health and disease. Representative phenotypic assays, which can be purchased from any one of several commercial vendors, include those for determining cell viability, cytotoxicity, proliferation or cell survival (Molecular Probes, Eugene, Oreg.; PerkinElmer, Boston, Mass.), protein-based assays including enzymatic assays (Panvera, LLC, Madison, Wis.; BD Biosciences, Franklin Lakes, N.J.; Oncogene Research Products, San Diego, Calif.), cell regulation, signal transduction, inflammation, oxidative processes and apoptosis (Assay Designs Inc., Ann Arbor, Mich.), triglyceride accumulation (Sigma-Aldrich, St. Louis, Mo.), angiogenesis assays, tube formation assays, cytokine and hormone assays and metabolic assays (Chemicon International Inc., Temecula, Calif.; Amersham Biosciences, Piscataway, N.J.) blood and other body fluid viral titres.

[0366] In one non-limiting example, cells determined to be appropriate for a particular phenotypic assay (i.e., MCF-7 cells selected for breast cancer studies; adipocytes for obesity studies; blood or sputum samples for viral titres) are treated with SARS virus inhibitors identified from the in vitro studies as well as control compounds at optimal concentrations which are determined by the methods described above. At the end of the treatment period, treated and untreated cells are analyzed by one or more methods specific for the assay to determine phenotypic outcomes and endpoints.

[0367] Phenotypic endpoints include changes in cell morphology over time or treatment dose as well as changes in levels of cellular components such as proteins, lipids, nucleic acids, hormones, saccharides or metals, viral titres, infection or inflammatory markers. Measurements of cellular status which include pH, stage of the cell cycle, intake or excretion of biological indicators by the cell, are also endpoints of interest.

[0368] Analysis of the geneotype of the cell (measurement of the expression of one or more of the genes of the cell) after treatment is also used as an indicator of the efficacy or potency of the SARS virus inhibitors. Hallmark genes, or those genes suspected to be associated with a specific disease state, condition, or phenotype, are measured in both treated and untreated cells.

In vivo Studies

[0369] The individual subjects of the in vivo studies described herein are warm-blooded vertebrate animals, which includes humans.

[0370] The clinical trial is subjected to rigorous controls to ensure that individuals are not unnecessarily put at risk and that they are fully informed about their role in the study.

[0371] To account for the psychological effects of receiving treatments, volunteers are randomly given placebo or SARS virus inhibitor. Furthermore, to prevent the doctors from being biased in treatments, they are not informed as to whether the medication they are administering is a SARS virus inhibitor or a placebo. Using this randomization approach, each volunteer has the same chance of being given either the new treatment or the placebo.

[0372] Volunteers receive either the SARS virus inhibitor or placebo for eight week period with biological parameters associated with the indicated disease state or condition being measured at the beginning (baseline measurements before any treatment), end (after the final treatment), and at regular intervals during the study period. Such measurements include the levels of nucleic acid molecules encoding SARS virus or SARS virus protein levels in body fluids, tissues or organs compared to pre-treatment levels. Other measurements include, but are not limited to, indices of the disease state or condition being treated, body weight, blood pressure, serum titers of pharmacologic indicators of disease or toxicity as well as ADME (absorption, distribution, metabolism and excretion) measurements.

[0373] Information recorded for each patient includes age (years), gender, height (cm), family history of disease state or condition (yes/no), motivation rating (some/moderate/great) and number and type of previous treatment regimens for the indicated disease or condition.

[0374] Volunteers taking part in this study are healthy adults (age 18 to 65 years) and roughly an equal number of males and females participate in the study. Volunteers with certain characteristics are equally distributed for placebo and SARS virus inhibitor treatment. In general, the volunteers treated with placebo have little or no response to treatment, whereas the volunteers treated with the SARS virus inhibitor show positive trends in their disease state or condition index at the conclusion of the study.

### Example 12

### RNA Isolation

Poly(A)+ mRNA Isolation

[0375] Poly(A)+ mRNA was isolated according to Miura et al., (Clin. Chem., 1996, 42, 1758-1764). Other methods for poly(A)+ mRNA isolation are routine in the art. Briefly, for cells grown on 96-well plates, growth medium was removed from the cells and each well was washed with 200 μL cold PBS. 60 μL lysis buffer (10 mM Tris-HCl, pH 7.6, 1 mM EDTA, 0.5 M NaCl, 0.5% NP-40, 20 mM vanadyl-ribonucleoside complex) was added to each well, the plate was gently agitated and then incubated at room temperature for five minutes. 55 μL of lysate was transferred to Oligo d(T) coated 96-well plates (AGCT Inc., Irvine Calif.). Plates were incubated for 60 minutes at room temperature, washed 3 times with 200 μL of wash buffer (10 mM Tris-HCl pH 7.6, 1 mM EDTA, 0.3 M NaCl). After the final wash, the plate was blotted on paper towels to remove excess wash buffer and then air-dried for 5 minutes. 60 μL of elution buffer (5 mM Tris-HCl pH 7.6), preheated to 70° C., was added to each well, the plate was incubated on a 90° C. hot plate for 5 minutes, and the eluate was then transferred to a fresh 96-well plate.

[0376] Cells grown on 100 mm or other standard plates may be treated similarly, using appropriate volumes of all solutions.

Total RNA Isolation

[0377] Total RNA was isolated using an RNEASY 96™ kit and buffers purchased from Qiagen Inc. (Valencia, Calif.) following the manufacturer's recommended procedures. Briefly, for cells grown on 96-well plates, growth medium was removed from the cells and each well was washed with 200 μL cold PBS. 150 μL Buffer RLT was added to each well and the plate vigorously agitated for 20 seconds. 150 μL of 70% ethanol was then added to each well and the contents mixed by pipetting three times up and down. The samples were then transferred to the RNEASY 96™ well plate attached to a QIAVAC™ manifold fitted with a waste collection tray and attached to a vacuum source. Vacuum was applied for 1 minute. 500 μL of Buffer RW1 was added to each well of the RNEASY 96™ plate and incubated for 15 minutes and the vacuum was again applied for 1 minute. An additional 500 μL of Buffer RW1 was added to each well of the RNEASY 96™ plate and the vacuum was applied for 2 minutes. 1 mL of Buffer RPE was then added to each well of the RNEASY 96™ plate and the vacuum applied for a period of 90 seconds. The Buffer RPE wash was then repeated and the vacuum was applied for an additional 3 minutes. The plate was then removed from the QIAVAC™ manifold and blotted dry on paper towels. The plate was then re-attached to the QIAVAC™ manifold fitted with a collection tube rack containing 1.2 mL collection tubes. RNA was then eluted by pipetting 140 μL of RNAse free water into each well, incubating 1 minute, and then applying the vacuum for 3 minutes.

[0378] The repetitive pipetting and elution steps may be automated using a QIAGEN Bio-Robot 9604 (Qiagen, Inc., Valencia Calif.). Essentially, after lysing of the cells on the culture plate, the plate is transferred to the robot deck where the pipetting, DNase treatment and elution steps are carried out.

### Example 13

### Real-Time Quantitative PCR Analysis of SARS virus mRNA Levels

[0379] Quantitation of SARS virus mRNA levels was accomplished by real-time quantitative PCR using the ABI PRISM™ 7600, 7700, or 7900 Sequence Detection System (PE-Applied Biosystems, Foster City, Calif.) according to manufacturer's instructions. This is a closed-tube, non-gel-based, fluorescence detection system which allows high-throughput quantitation of polymerase chain reaction (PCR) products in real-time. As opposed to standard PCR in which amplification products are quantitated after the PCR is completed, products in real-time quantitative PCR are quantitated as they accumulate. This is accomplished by including in the PCR reaction an oligonucleotide probe that anneals specifically between the forward and reverse PCR primers, and contains two fluorescent dyes. A reporter dye (e.g., FAM or JOE, obtained from either PE-Applied Biosystems, Foster City, Calif., Operon Technologies Inc., Alameda, Calif. or Integrated DNA Technologies Inc., Coralville, Iowa) is attached to the 5′ end of the probe and a quencher dye (e.g., TAMRA, obtained from either PE-Applied Biosystems, Foster City, Calif., Operon Technologies Inc., Alameda, Calif. or Integrated DNA Technologies Inc., Coralville, Iowa) is attached to the 3′ end of the probe. When the probe and dyes are intact, reporter dye emission is quenched by the proximity of the 3′ quencher dye. During amplification, annealing of the probe to the target sequence creates a substrate that can be cleaved by the 5′-exonuclease activity of Taq polymerase. During the extension phase of the PCR amplification cycle, cleavage of the probe by Taq polymerase releases the reporter dye from the remainder of the probe (and hence from the quencher moiety) and a sequence-specific fluorescent signal is generated. With each cycle, additional reporter dye molecules are cleaved from their respective probes, and the fluorescence intensity is monitored at regular intervals by laser optics built into the ABI PRISM™ Sequence Detection System. In each assay, a series of parallel reactions containing serial dilutions of mRNA from untreated control samples generates a standard curve that is used to quantitate the percent inhibition after antisense oligonucleotide treatment of test samples.

[0380] Prior to quantitative PCR analysis, primer-probe sets specific to the target gene being measured are evaluated for their ability to be “multiplexed” with a GAPDH amplification reaction. In multiplexing, both the target gene and the internal standard gene GAPDH are amplified concurrently in a single sample. In this analysis, mRNA isolated from untreated cells is serially diluted. Each dilution is amplified in the presence of primer-probe sets specific for GAPDH only, target gene only (“single-plexing”), or both (multiplexing). Following PCR amplification, standard curves of GAPDH and target mRNA signal as a function of dilution are generated from both the single-plexed and multiplexed samples. If both the slope and correlation coefficient of the GAPDH and target signals generated from the multiplexed samples fall within 10% of their corresponding values generated from the single-plexed samples, the primer-probe set specific for that target is deemed multiplexable. Other methods of PCR are also known in the art.

[0381] PCR reagents were obtained from Invitrogen Corporation, (Carlsbad, Calif.). RT-PCR reactions were carried out by adding 20 μL PCR cocktail (2.5× PCR buffer minus MgCl₂, 6.6 mM MgCl₂, 375 μM each of dATP, dCTP, dCTP and dGTP, 375 nM each of forward primer and reverse primer, 125 nM of probe, 4 Units RNAse inhibitor, 1.25 Units PLATINUM® Taq, 5 Units MuLV reverse transcriptase, and 2.5× ROX dye) to 96-well plates containing 30 μL total RNA solution (20-200 ng). The RT reaction was carried out by incubation for 30 minutes at 48° C. Following a 10 minute incubation at 95° C. to activate the PLATINUM Taq, 40 cycles of a two-step PCR protocol were carried out: 95° C. for 15 seconds (denaturation) followed by 60° C. for 1.5 minutes (annealing/extension).

[0382] Gene target quantities obtained by real time RT-PCR are normalized using either the expression level of GAPDH, a gene whose expression is constant, or by quantifying total RNA using RiboGreen™ (Molecular Probes, Inc. Eugene, Oreg.). GAPDH expression is quantified by real time RT-PCR, by being run simultaneously with the target, multiplexing, or separately. Total RNA is quantified using RiboGreen™ RNA quantification reagent (Molecular Probes, Inc. Eugene, Oreg.). Methods of RNA quantification by RiboGreenr are taught in Jones et al, (Analytical Biochemistry, 1998, 265, 368-374).

[0383] In this assay, 170 μL of RiboGreen™ working reagent (RiboGreen™ reagent diluted 1:350 in 10 mM Tris-HCl, 1 mM EDTA, pH 7.5) is pipetted into a 96-well plate containing 30 μL purified, cellular RNA. The plate is read in a CytoFluor 4000 (PE Applied Biosystems) with excitation at 485 nm and emission at 530 nm.

[0384] Probes and primers to SARS virus were designed to hybridize to a SARS virus VIRUS sequence, using published sequence information (GenBank accession number NC_{—}004718.1, incorporated herein as SEQ ID NO:16). For SARS virus the PCR primers can be prepared as by the method of Drosten et al. For human GAPDH the PCR primers can be:

| | | |
|---|---|---|
| forward | GAAGGTGAAGGTCGGAGTC | (SEQ ID NO: 17) |
| primer: | | |
| reverse | GAAGATGGTGATGGGATTTC | (SEQ ID NO: 18) |
| primer: | | |

[0385] and the PCR probe was:

| | |
|---|---|
| 5′ | |
| JOE-CAAGCTTCCCGTTCTCAGCC-TAMRA 3 | (SEQ ID NO: 19) |

where JOE is the fluorescent reporter dye and TAMRA is the quencher dye.

### Example 14

### Northern Blot Analysis of SARS virus mRNA Levels

[0386] Eighteen hours after antisense treatment, cell monolayers were washed twice with cold PBS and lysed in 1 mL RNAZOL™ (TEL-TEST “B” Inc., Friendswood, Tex.). Total RNA was prepared following manufacturer's recommended protocols. Twenty micrograms of total RNA was fractionated by electrophoresis through 1.2% agarose gels containing 1.1% formaldehyde using a MOPS buffer system (AMRESCO, Inc. Solon, Ohio). RNA was transferred from the gel to HYBOND™-N+ nylon membranes (Amersham Pharmacia Biotech, Piscataway, N.J.) by overnight capillary transfer using a Northern/Southern Transfer buffer system (TEL-TEST “B” Inc., Friendswood, Tex). RNA transfer was confirmed by WV visualization. Membranes were fixed by UV cross-linking using a STRATALINKER™ UV Crosslinker 2400 (Stratagene, Inc, La Jolla, Calif.) and then probed using QUICKHYB™ hybridization solution (Stratagene, La Jolla, Calif.) using manufacturer's recommendations for stringent conditions.

[0387] To detect SARS virus, a SARS virus specific probe was prepared. To normalize for variations in loading and transfer efficiency membranes were stripped and probed for human glyceraldehyde-3-phosphate dehydrogenase (GAPDH) RNA (Clontech, Palo Alto, Calif.).

[0388] Hybridized membranes were visualized and quantitated using a PHOSPHORIMAGER™ and IMAGEQUANT™ Software V3.3 (Molecular Dynamics, Sunnyvale, Calif.). Data was normalized to GAPDH levels in untreated controls.

### Example 15

### Antisense Inhibition of SARS virus Expression by Chimeric Phosphorothioate Oligonucleotides having 2′-MOE Wings and a Deoxy Gap

[0389] In accordance with the present invention, a series of antisense compounds are designed to target different regions of the SARS virus RNA, using published sequences (GenBank accession number NC_{—}004718.1, incorporated herein as SEQ ID NO:16). The compounds listed in the accompanying Sequence Listing. “Target site” indicates the first (5′-most) nucleotide number on the particular target sequence to which the compound binds. The compounds can be “gapmers” 20 nucleotides in length. The compounds can be analyzed for their effect on SARS virus mRNA levels by quantitative real-time PCR as described in other examples herein.

[0390] The target regions to which these sequences are complementary are herein referred to as “suitable target segments” and are therefore suitable for targeting by compounds of the present invention. The sequences represent the reverse complement of the compounds listed in the Sequence Listing.

[0391] As these “suitable target segments” can be found by experimentation to be open to, and accessible for, hybridization with the antisense compounds of the present invention, one of skill in the art will recognize or be able to ascertain, using no more than routine experimentation, further embodiments of the invention that encompass other compounds that specifically hybridize to these suitable target segments and consequently inhibit the expression of SARS virus.

[0392] According to the present invention, antisense compounds include antisense oligomeric compounds, antisense oligonucleotides, siRNAs, miRNAs, dsRNAs, duplexed compounds, ribozymes, external guide sequence (EGS) oligonucleotides, alternate splicers, primers, probes, and other short oligomeric compounds which hybridize to at least a portion of the target nucleic acid.

### Example 16

### Western Blot Analysis of SARS virus Protein Levels

[0393] Western blot analysis (immunoblot analysis) is carried out using standard methods. Cells are harvested 16-20 hours after oligonucleotide treatment, washed once with PBS, suspended in Laemmli buffer (100 μl/well), boiled for 5 minutes and loaded on a 16% SDS-PAGE gel. Gels are run for 1.5 hours at 150 V, and transferred to membrane for western blotting. Appropriate primary antibody directed to SARS virus is used, with a radiolabeled or fluorescently labeled secondary antibody directed against the primary antibody species. Bands are visualized using a PHOSPHORIMAGERT (Molecular Dynamics, Sunnyvale Calif.).

### Example 17

### SARS-CoV Sequences

[0394] Several fragments and complete genome sequences of SARS variants are available in the public databases. In accordance with the present invention, antisense compounds can be designed to target different structural regions or variants or motifs of SARS, using the published sequences in Table 2. Such compounds can be designed, synthesized, and tested as disclosed herein.

TABLE 2
Sequences of SARS genomes and fragments

| GENBANK | | |
|---|---|---|
| ACCESSION | SEQUENCE | SEQ ID |
| NUMBER | LENGTH | NO |
| NC_004718.1 | 29736 | 16 |
| AY278741.1 | 29727 | 29737 |
| AY278490.1 | 29291 | 29738 |
| AY278489.1 | 29429 | 29739 |
| AY278488.1 | 28920 | 29740 |
| AY278487.1 | 29430 | 29741 |
| AY278554.1 | 29206 | 29742 |
| AY268049.1 | 433 | 29743 |
| AY278491.2 | 29742 | 29744 |
| AY269391.1 | 405 | 29745 |
| AY274119.1 | 29736 | 29746 |
| AY278554.2 | 29736 | 29747 |
| AY279354.1 | 24774 | 29748 |
| AY274119.2 | 29736 | 29749 |
| NC_004718.2 | 29736 | 29750 |
| AY274119.3 | 29751 | 29751 |
| NC_004718.3 | 29751 | 29752 |
| AY278488.2 | 29725 | 29753 |
| AY271716.1 | 158 | 29754 |
| AY283798.1 | 29711 | 29755 |
| AY283797.1 | 29706 | 29756 |
| AY283796.1 | 29711 | 29757 |
| AY283795.1 | 29705 | 29758 |
| AY283794.1 | 29711 | 29759 |
| AY297028.1 | 29715 | 29760 |
| AY286402.1 | 368 | 29761 |
| AY291451.1 | 29729 | 29762 |
| AY282752.1 | 29736 | 29763 |
| AY268070.1 | 646 | 29764 |
| AY268049.1 | 433 | 29765 |
| AY286320.2 | 1215 | 29766 |
| AY307165.1 | 1269 | 29767 |
| AY278487.3 | 29745 | 29768 |
| AY278489.2 | 29757 | 29769 |
| AY278490.3 | 29740 | 29770 |
| AY279354.2 | 29732 | 29771 |
| AY290752.1 | 1620 | 29772 |
| AY291315.1 | 29727 | 29773 |
| AY321118.1 | 29725 | 29774 |
| AY323974.1 | 666 | 29775 |
| AY323975.1 | 231 | 29776 |
| AY323976.1 | 3768 | 29777 |
| AY323977.1 | 29751 | 29778 |
| AY283798.2 | 29711 | 29779 |
| AP006557.1 | 29727 | 29780 |
| AP006558.1 | 29725 | 29781 |
| AP006559.1 | 29727 | 29782 |
| AP006560.1 | 29727 | 29783 |
| AP006561.1 | 29727 | 29784 |
| AY278488.2 | 29725 | 29785 |
| AY278489.2 | 29757 | 29786 |
| AY278490.3 | 29740 | 29787 |
| AY279354.2 | 29732 | 29788 |
| AY282752.2 | 29736 | 29789 |
| AY283794.1 | 29711 | 29790 |
| AY283795.1 | 29705 | 29791 |
| AY283796.1 | 29711 | 29792 |
| AY283797.1 | 29706 | 29793 |
| AY283798.2 | 29711 | 29794 |
| AY297028.1 | 29715 | 29795 |
| AY304486.1 | 29741 | 29796 |
| AY304488.1 | 29731 | 29797 |
| AY304495.1 | 29720 | 29798 |
| AY310120.1 | 29740 | 29799 |
| AY313906.1 | 29754 | 29800 |
| AY323977.2 | 29751 | 29801 |
| AY338174.1 | 29573 | 29802 |
| AY338175.1 | 29573 | 29803 |
| AY345986.1 | 29736 | 29804 |
| AY345987.1 | 29736 | 29805 |
| AY345988.1 | 29736 | 29806 |
| AY348314.1 | 29573 | 29807 |
| AY350750.1 | 29738 | 29808 |
| AY351680.1 | 29749 | 29809 |
| AY357075.1 | 29738 | 29810 |
| AY357076.1 | 29745 | 29811 |
| AY362698.1 | 29727 | 29812 |
| AY362699.1 | 29727 | 29813 |
| AY394850.1 | 29735 | 29814 |
| AY427439.1 | 29711 | 29815 |
| AY461660.1 | 29715 | 29816 |
| AY485277.1 | 29741 | 29817 |
| AY485278.1 | 29740 | 29818 |
| AY463060.1 | 29013 | 29819 |
| AY463059.1 | 29592 | 29820 |
| AY502923.1 | 29729 | 29821 |
| AY502924.1 | 29727 | 29822 |
| AY502925.1 | 29729 | 29823 |
| AY502926.1 | 29729 | 29824 |
| AY502927.1 | 29729 | 29825 |
| AY502928.1 | 29729 | 29826 |
| AY502929.1 | 29729 | 29827 |
| AY502930.1 | 29729 | 29828 |
| AY502931.1 | 29729 | 29829 |
| AY502932.1 | 29729 | 29830 |

### Example 18

### Antisense Inhibition of the SARS-CoV with Oligonucleotides Complementary to the Positive Strand of the Virus

[0395] In accordance with the present invention, compounds were designed to target different regions or variants or motifs of the SARS virus RNA, using published sequences (Genbank accession number NC_{—}004718.1, NC_{—}004718.3, AY278741.1, AY274119.3 or AY278489.1).

[0396] Compounds targeting SARS are shown in Table 3. “Target site” indicates the first (5′-most) nucleotide number on the particular target sequence to which the compound binds. All compounds in Table 3 are chimeric oligonucleotides (“gapmers”) 20 nucleotides in length, composed of a central “gap” region consisting of ten 2′-deoxynucleotides, which is flanked on both sides (5′ and 3′ directions) by five-nucleotide “wings.” The wings are composed of 2′-O-methoxyethyl nucleotides, also known as 2′-MOE. The internucleoside (backbone) linkages are phosphorothioate (P═S) throughout the oligonucleotide. All cytidine residues are 5-methylcytidines.

TABLE 3

Chimeric phosphorothioate oligonucleotides
targeted to SARS

| | | | | |
|---|---|---|---|---|
| | TARGET | | | |
| | SEQ ID | | | SEQ ID |
| ISIS # | NO | TARGET | SEQUENCE (5′ to 3′) | NO |

| | | | | |
|---|---|---|---|---|
| 329410 | 16 | 13971 | AGATCCTGATTATCTAATGT | 13990 |
| 329411 | 16 | 13977 | CCATTAAGATCCTGATTATC | 13996 |
| 329412 | 16 | 15195 | GGATAATCCCAACCCATAAG | 15214 |
| 329413 | 16 | 15435 | ACAGCTTGACAAATGTTAAA | 15454 |
| 329414 | 16 | 15618 | TCATCAGAAAGAATCATCAT | 15637 |
| 329415 | 16 | 15714 | AACACATTATTTTGATAATA | 15733 |
| 329416 | 16 | 17079 | GCATCAACAGCTGCATGAGA | 17098 |
| 329417 | 16 | 18543 | GGTCCAATCTTGACAAAGTA | 18562 |
| 329418 | 16 | 18770 | ATCTAGTCATGATAGCATCA | 18789 |
| 329419 | 16 | 25053 | CAAACATACCAAGGCCATTT | 25072 |
| 329420 | 16 | 1 | GGTTGGCTTTTCCTGGGTAG | 20 |
| 329421 | 16 | 2 | TGGTTGGCTTTTCCTGGGTA | 21 |
| 329422 | 29737 | 1 | GGTAGGTAAAAACCTAATAT | 29831 |
| 329423 | 29739 | 1 | TGGTTGCGAAAATAAAGGGG | 29832 |
| 329424 | 16 | 192 | CTGATGATCGACTGCAACAC | 211 |
| 329425 | 16 | 202 | CCTAGGTATGCTGATGATCG | 221 |
| 329426 | 16 | 353 | CTCCGATAGGGCCTCTTCCA | 372 |
| 329427 | 16 | 371 | TTTGAGGTGTTCACGTGCCT | 390 |
| 329428 | 16 | 1316 | AGTAGGTAGGTACCCACATG | 1335 |
| 329429 | 16 | 1753 | TTACCGCAGGACTCAACAAT | 1772 |
| 329430 | 16 | 1755 | AGTTACCGCAGGACTCAACA | 1774 |
| 329431 | 16 | 1850 | AGCCTGTGAGGGAAAACCAC | 1869 |
| 329432 | 16 | 2075 | ATTAGACAACCACTGAGAAG | 2094 |
| 329433 | 16 | 2384 | ACGGTAAAGTCCCTTGCTTT | 2403 |
| 329434 | 16 | 2734 | TGAACTTCCCAAACAGTATC | 2753 |
| 329435 | 16 | 2811 | AGACAGAGCACTTTTCATTA | 2830 |
| 329436 | 16 | 3131 | TGAGGCACCAAATTCCAGAG | 3150 |
| 329437 | 16 | 3289 | CATTTAATGGCAACATTGTC | 3308 |
| 329438 | 16 | 4006 | GCATCCTTCTCAAGGAAAGA | 4025 |
| 329439 | 16 | 4252 | TCCTTAGCATTAGGTGCTTC | 4271 |
| 329440 | 16 | 4823 | GTCAAGTGAAAGAACCTCAC | 4842 |
| 329441 | 16 | 5275 | CCAGCACGGGCTCTATAATA | 5294 |
| 329442 | 16 | 5329 | CCAACAGTTTTATTACTGTA | 5348 |
| 329443 | 16 | 5467 | ATCACAGCTTCTACACCCGT | 5486 |
| 329444 | 16 | 5624 | GAATGTACCTTGCTGTAATT | 5643 |
| 329445 | 16 | 5634 | TCGCACATAAGAATGTACCT | 5653 |
| 329446 | 16 | 5995 | GTCATTTGATTTAAATCATC | 6014 |
| 329447 | 16 | 6462 | CCACATAAGCAGCCATAAGA | 6481 |
| 329448 | 16 | 6600 | CTAAGAATGGTTTGACATAA | 6619 |
| 329449 | 16 | 6975 | TAAGATACAATTCTCTAACG | 6994 |
| 329450 | 16 | 7009 | TCACAGAAATCCATAGTAGT | 7028 |
| 329451 | 16 | 7146 | AAACCCACTCAGCGGCCAGA | 7165 |
| 329452 | 16 | 7522 | TTGAGACAATTCCAATTGTG | 7541 |
| 329453 | 16 | 7952 | GGTGTCGACATAAGCATCAA | 7971 |
| 329454 | 16 | 8006 | TGTAGCAACAAGTGCCTTAA | 8025 |
| 329455 | 16 | 8570 | TGTGTAACCATCATGGATTG | 8589 |
| 329456 | 16 | 8578 | ATTTCATTTGTGTAACCATC | 8597 |
| 329457 | 16 | 9091 | GTTACTACTCTAACAGAACC | 9110 |
| 329458 | 16 | 9132 | TTTCGCATGTACCATGTCTA | 9151 |
| 329459 | 16 | 9365 | TCTGAATTTCATAAAGTAGT | 9384 |
| 329460 | 16 | 9875 | TAGAGCCTTTGCTAAGTGGC | 9894 |
| 329461 | 16 | 9918 | GTGGTTGGTAGAGAACATCA | 9937 |
| 329462 | 16 | 9989 | AACTTTGCCTGACGGGAATG | 10008 |
| 329463 | 16 | 10446 | CCATATGATGCATATAGCAG | 10465 |
| 329464 | 16 | 10777 | ATACCATTCTGCAGCAGCTC | 10796 |
| 329465 | 16 | 11187 | CAGACAAGCTAGTGTCAGCC | 11206 |
| 329466 | 16 | 11494 | CACTGTAAGGTGTTGCCAGT | 11513 |
| 329467 | 16 | 11963 | CATTTCCTCGCACAACCTAT | 11982 |
| 329468 | 16 | 11988 | CCTGAAGAGTAGCACGGTTA | 12007 |
| 329469 | 16 | 12254 | TGTTTGCATAGCACTAGTTA | 12273 |
| 329470 | 16 | 12435 | CATATGTAAAGGTGTTACCA | 12454 |
| 329471 | 16 | 13159 | TGGCATCTACAATACAGACA | 13178 |
| 329472 | 16 | 13176 | GATTTGGATGGTCAATGTGG | 13195 |
| 329473 | 16 | 13223 | GGTAGGTATTTGGACGTACT | 13242 |
| 329474 | 16 | 13608 | TTAACCAAGTTATAAATAGT | 13627 |
| 329475 | 16 | 13978 | CCCATTAAGATCCTGATTAT | 13997 |
| 329476 | 16 | 14039 | CCACAATAGGAACTCCGCAG | 14058 |
| 329477 | 16 | 14239 | ACAGTTAATACAATTGGGAT | 14258 |
| 329478 | 16 | 14705 | GATAATAGTCATAATCACTG | 14724 |
| 329479 | 16 | 14828 | GATTGTTAACGATTACTTGG | 14847 |
| 329480 | 16 | 14976 | GCATACTTAAGATTCATTTG | 14995 |
| 329481 | 16 | 15065 | TCAATAATTTCTGATGAAAC | 15084 |
| 329482 | 16 | 15401 | AAGCAGTTGTAGCATCACCG | 15420 |
| 329483 | 16 | 15725 | CCTCAGACATGAACACATTA | 15744 |
| 329484 | 16 | 15817 | CACGTAATCATCTCCTTGTT | 15836 |
| 329485 | 16 | 15885 | GTTTTGACAATATCATCGAC | 15904 |
| 329486 | 16 | 16634 | CCCATGAAAGATGCAATTCT | 16653 |
| 329487 | 16 | 16869 | TAGTGCTCTTGTGGCACTAG | 16888 |
| 329488 | 16 | 17309 | CACGAAGTCTAGCATTGACA | 17328 |
| 329489 | 16 | 17719 | AGGCAATCCTAAGATTTTTG | 17738 |
| 329490 | 16 | 17749 | AGAACCCTGTGATGAATCAA | 17768 |
| 329491 | 16 | 18401 | CTTTATACATGAGTGGTATA | 18420 |
| 329492 | 16 | 18429 | TTAATACGCACTACATTCCA | 18448 |
| 329493 | 16 | 18507 | TCAAAGCCATGCGCCCAAAG | 18526 |
| 329494 | 16 | 18925 | ATGAAGAACTGGAAACTTAT | 18944 |
| 329495 | 16 | 19520 | AACTCTGTAACCTGGTAAAT | 19539 |
| 329496 | 16 | 19532 | CCACATTTTCTAAACTCTGT | 19551 |
| 329497 | 16 | 20753 | CTCTCATGTTGTAGGGTACA | 20772 |
| 329498 | 16 | 21032 | TTTGCTTTATAAATCCACAC | 21051 |
| 329499 | 16 | 21353 | TTTGATTCTCCTTAAGAGAC | 21372 |
| 329500 | 16 | 22147 | ATTTGTAATGTTAATACCAA | 22166 |
| 329501 | 16 | 22992 | CCACAAACCGTGGCCGGTGC | 23011 |
| 329502 | 16 | 23069 | ACACACCAGTACCAGTGAGT | 23088 |
| 329503 | 16 | 23507 | CAGCACCTAAAGACATAGTA | 23526 |
| 329504 | 16 | 23829 | GGGTCAGGTAATATTTGTGA | 23848 |
| 329505 | 16 | 24421 | GGTTTGAAGGCTTTGAAGTC | 24440 |
| 329506 | 16 | 24871 | GAAGTACTTGTCCAGCTCTT | 24890 |
| 329507 | 16 | 25466 | TGGAAGCCCTTATAAAGGGC | 25485 |
| 329508 | 16 | 25880 | GACTCAAGCTGGTAGTAAAC | 25899 |
| 329509 | 16 | 25899 | GTCTGTAGTAATTTGTGTAG | 25918 |
| 329510 | 16 | 26389 | ACGGTAATAGTACCGTTGTC | 26408 |
| 329511 | 16 | 26433 | CTATTACTAGGTTCCATTGT | 26452 |
| 329512 | 16 | 26482 | TTAGAATAGGCAAATTGTAG | 26501 |
| 329513 | 16 | 26781 | CAATGACAAGTTCACTTTCC | 26800 |
| 329514 | 16 | 27130 | CGTCAAGATTCCAAATAGCA | 27149 |
| 329515 | 16 | 27266 | TCAATGTCAGGAAGAGAATA | 27285 |
| 329516 | 16 | 27406 | TAGTGCAAATTTATTGTCAG | 27425 |
| 329517 | 16 | 27501 | ATGAAAAGTTTTGGTGAAAC | 27520 |
| 329518 | 16 | 27538 | TGGCGAGTAGAGCTCTTGTT | 27557 |
| 329519 | 16 | 27894 | CAAAGCCAAGCAGTGCTATA | 27913 |
| 329520 | 16 | 28161 | CAGTTGAATCTGTGGGTCCA | 28180 |
| 329521 | 16 | 29109 | CATCCAATTTAATGGCTCCA | 29128 |
| 329522 | 16 | 29468 | CTTGTGCTGTTTAGTTACGA | 29487 |
| 329523 | 16 | 29504 | AAGATTGCTATGTGAGATTA | 29523 |
| 329524 | 16 | 13377 | ACACCGCAAACCCGTTTAAA | 13396 |
| 329525 | 16 | 13385 | CTGCACTTACACCGCAAACC | 13404 |
| 329526 | 16 | 13392 | AGACGGGCTGCACTTACACC | 13411 |
| 329527 | 16 | 13396 | TGTAAGACGGGCTGCACTTA | 13415 |
| 329528 | 16 | 13426 | GACATCAGTACTAGTGCCTG | 13445 |
| 329529 | 16 | 13445 | TATCAAAAGCCCTGTAGACG | 13464 |
| 329530 | 16 | 13452 | TTGTAAATATCAAAAGCCCT | 13471 |
| 329531 | 16 | 45 | TTTTAAAGTTCGTTTAGAGA | 64 |
| 329532 | 16 | 21464 | TAAACATGTTCGTTTAGTTG | 21483 |
| 329533 | 16 | 25238 | TCCATAAGTTCGTTTATGTG | 25257 |
| 329534 | 16 | 26087 | TACATAAGTTCGTACTCACT | 26106 |
| 329535 | 16 | 26326 | ATAGTTAGTTCGTTTAGACC | 26345 |
| 329536 | 16 | 26891 | AGAAAGCGTTCGTGATGTAG | 26910 |
| 329537 | 16 | 27245 | TTTTCATGTTCGTTTTATGG | 27264 |
| 329538 | 16 | 27751 | GTTTCATGTTCGTTTAGACT | 27770 |
| 329539 | 16 | 28084 | TTAATTTGTTCGTTTATTTA | 28103 |
| 348236 | 29752 | 2 | GGGTAGGTAAAAACCTAATA | 29833 |
| 348468 | 29752 | 257 | AAGGCTCTCCATCTTACCTT | 261 |
| 348469 | 29752 | 21484 | GAAAATAAACATGTTCGTTT | 21488 |
| 348470 | 29752 | 25260 | AAACAAATCCATAAGTTCGT | 25264 |
| 348471 | 29752 | 25681 | AGTTGGCATCATAAAGTAAT | 25685 |
| 348472 | 29752 | 26109 | GAATGAGTACATAAGTTCGT | 26113 |
| 348473 | 29752 | 26390 | GTTGTCTGCCATGATAAGCA | 26394 |
| 348474 | 29752 | 27066 | AAGATGAAACATCTGTTGTC | 27070 |
| 348475 | 29752 | 27265 | AATAATTTTCATGTTCGTTT | 27269 |
| 348476 | 29752 | 28112 | ATTATCAGACATTTTAATTT | 28116 |
| 348477 | 29752 | 28122 | ATTGGGGTCCATTATCAGAC | 28126 |
| 348478 | 29752 | 248 | CATCTTACCTTTCGGTCACA | 252 |
| 348479 | 29752 | 21475 | CATGTTCGTTTAGTTGTTAA | 21479 |
| 348480 | 29752 | 25251 | CATAAGTTCGTTTATGTGTA | 25255 |
| 348481 | 29752 | 25672 | CATAAAGTAATGGGTTCTTG | 25676 |
| 348482 | 29752 | 26100 | CATAAGTTCGTACTCACTTT | 26104 |
| 348483 | 29752 | 26381 | CATGATAAGCAATGTTAAAG | 26385 |
| 348484 | 29752 | 27057 | CATCTGTTGTCACTTACTGT | 27061 |
| 348485 | 29752 | 27256 | CATGTTCGTTTTATGGATAA | 27260 |
| 348486 | 29752 | 28103 | CATTTTAATTTGTTCGTTTA | 28107 |
| 348487 | 29752 | 28113 | CATTATCAGACATTTTAATT | 28117 |
| 348488 | 29752 | 235 | GGTCACACCCGGACGAAACC | 239 |
| 348489 | 29752 | 21462 | TTGTTAACAAGAATATCACT | 21466 |
| 348490 | 29752 | 25238 | ATGTGTAATGTAAT1TGACA | 25242 |
| 348491 | 29752 | 25659 | GTTCTTGGATTTGCACTTCC | 25663 |
| 348492 | 29752 | 26087 | TCACTTTCTTGTGCTTACAA | 26091 |
| 348493 | 29752 | 26368 | GTTAAAGTTCCAAACAGAAT | 26372 |
| 348494 | 29752 | 27044 | TTACTGTACTAGCAAAGCAA | 27048 |
| 348495 | 29752 | 27243 | TGGATAATCTAACTCCATAG | 27247 |
| 348496 | 29752 | 28090 | TCGTTTATTTAAAACAACAA | 28094 |
| 348497 | 29752 | 28100 | TTTAATTTGTTCGTTTATTT | 28104 |

[0397] Another series of compounds targeting SARS are shown in Table 4. “Target site” indicates the first (5′-most) nucleotide number on the particular target sequence to which the compound binds. All compounds in Table 4 are composed of 2′-O-methoxyethyl nucleotides, also known as 2′-MOE. The internucleoside (backbone) linkages are phosphodiester (P═O) throughout the oligonucleotide. All cytidine residues are 5-methylcytidines.

TABLE 4

Uniform 2′-MOE phosphodiester oligonucleotides
targeting SARS

| | | | | |
|---|---|---|---|---|
| | TARGET | | | SEQ ID |
| ISIS # | SEQ ID NO | TARGET | SEQUENCE (5′ to 3′) | NO |

| | | | | |
|---|---|---|---|---|
| 329720 | 16 | 13377 | ACACCGCAAACCCGTTTAAA | 13396 |
| 329721 | 16 | 13385 | CTGCACTTACACCGCAAACC | 13404 |
| 329722 | 16 | 13392 | AGACGGGCTGCACTTACACC | 13411 |
| 329724 | 16 | 13396 | TGTAAGACGGGCTGCACTTA | 13415 |
| 329727 | 16 | 13426 | GACATCAGTACTAGTGCCTG | 13445 |
| 329729 | 16 | 13445 | TATCAAAAGCCCTGTAGACG | 13464 |
| 329731 | 16 | 13452 | TTGTAAATATCAAAAGCCCT | 13471 |
| 332768 | 29752 | 13418 | AGACGGGCT | 29834 |
| 334923 | 29752 | 13378 | AAACGTTGATGCATC | 29835 |
| 334924 | 29752 | 13379 | AAAACGTTGATGCAT | 29836 |
| 334925 | 29752 | 13380 | AAAAACGTTGATGCA | 29837 |
| 334926 | 29752 | 13381 | TAAAAACGTTGATGC | 29838 |
| 334927 | 29752 | 13382 | TTAAAAACGTTGATG | 29839 |
| 334928 | 29752 | 13383 | TTTAAAAACGTTGAT | 29840 |
| 334929 | 29752 | 13384 | GTTTAAAAACGTTGA | 29841 |
| 334930 | 29752 | 13385 | CGTTTAAAAACGTTG | 29842 |
| 334931 | 29752 | 13386 | CCGTTTAAAAACGTT | 29843 |
| 334932 | 29752 | 13387 | CCCGTTTAAAAACGT | 29844 |
| 334933 | 29752 | 13388 | ACCCGTTTAAAAACG | 29845 |
| 334934 | 29752 | 13389 | AACCCGTTTAAAAAC | 29846 |
| 334935 | 29752 | 13390 | AAACCCGTTTAAAAA | 29847 |
| 334936 | 29752 | 13391 | CAAACCCGTTTAAAA | 29848 |
| 334937 | 29752 | 13392 | GCAAACCCGTTTAAA | 29849 |
| 334938 | 29752 | 13393 | CGCAAACCCGTTTAA | 29850 |
| 334939 | 29752 | 13394 | CCGCAAACCCGTTTA | 29851 |
| 334940 | 29752 | 13395 | ACCGCAAACCCGTTT | 29852 |
| 334941 | 29752 | 13396 | CACCGCAAACCCGTT | 29853 |
| 334942 | 29752 | 13397 | ACACCGCAAACCCGT | 29854 |
| 334943 | 29752 | 13398 | TACACCGCAAACCCG | 29855 |
| 334944 | 29752 | 13399 | TTACACCGCAAACCC | 29856 |
| 334945 | 29752 | 13400 | CTTACACCGCAAACC | 29857 |
| 334946 | 29752 | 13401 | ACTTACACCGCAAAC | 29858 |
| 334947 | 29752 | 13402 | CACTTACACCGCAAA | 29859 |
| 334948 | 29752 | 13403 | GCACTTACACCGCAA | 29860 |
| 334949 | 29752 | 13404 | TGCACTTACACCGCA | 29861 |
| 334950 | 29752 | 13405 | CTGCACTTACACCGC | 29862 |
| 334951 | 29752 | 13406 | GCTGCACTTACACCG | 29863 |
| 334952 | 29752 | 13407 | GGCTGCACTTACACC | 29864 |
| 334953 | 29752 | 13408 | GGGCTGCACTTACAC | 29865 |
| 334954 | 29752 | 13409 | CGGGCTGCACTTACA | 29866 |
| 334955 | 29752 | 13410 | ACGGGCTGCACTTAC | 29867 |
| 334956 | 29752 | 13411 | GACGGGCTGCACTTA | 29868 |
| 334957 | 29752 | 13412 | AGACGGGCTGCACTT | 29869 |
| 334958 | 29752 | 13413 | AAGACGGGCTGCACT | 29870 |
| 334959 | 29752 | 13414 | TAAGACGGGCTGCAC | 29871 |
| 334960 | 29752 | 13415 | GTAAGACGGGCTGCA | 29872 |
| 334961 | 29752 | 13416 | TGTAAGACGGGCTGC | 29873 |
| 334962 | 29752 | 13417 | GTGTAAGACGGGCTG | 29874 |
| 334963 | 29752 | 13418 | GGTGTAAGACGGGCT | 29875 |
| 334964 | 29752 | 13419 | CGGTGTAAGACGGGC | 29876 |
| 334965 | 29752 | 13420 | ACGGTGTAAGACGGG | 29877 |
| 334966 | 29752 | 13421 | CACGGTGTAAGACGG | 29878 |
| 334967 | 29752 | 13422 | GCACGGTGTAAGACG | 29879 |
| 334968 | 29752 | 13423 | CGCACGGTGTAAGAC | 29880 |
| 334969 | 29752 | 13424 | CCGCACGGTGTAAGA | 29881 |
| 334970 | 29752 | 13425 | GCCGCACGGTGTAAG | 29882 |
| 334971 | 29752 | 13426 | TGCCGCACGGTGTAA | 29883 |
| 334972 | 29752 | 13427 | GTGCCGCACGGTGTA | 29884 |
| 334973 | 29752 | 13428 | TGTGCCGCACGGTGT | 29885 |
| 334974 | 29752 | 13429 | CTGTGCCGCACGGTG | 29886 |
| 334975 | 29752 | 13430 | CCTGTGCCGCACGGT | 29887 |
| 334976 | 29752 | 13431 | GCCTGTGCCGCACGG | 29888 |
| 334977 | 29752 | 13432 | TGCCTGTGCCGCACG | 29889 |
| 334978 | 29752 | 13433 | GTGCCTGTGCCGCAC | 29890 |
| 334979 | 29752 | 13434 | AGTGCCTGTGCCGCA | 29891 |
| 334980 | 29752 | 13435 | TAGTGCCTGTGCCGC | 29892 |
| 334981 | 29752 | 13436 | CTAGTGCCTGTGCCG | 29893 |
| 334982 | 29752 | 13437 | ACTAGTGCCTGTGCC | 29894 |
| 334983 | 29752 | 13438 | TACTAGTGCCTGTGC | 29895 |
| 334984 | 29752 | 13439 | GTACTAGTGCCTGTG | 29896 |
| 334985 | 29752 | 13440 | AGTACTAGTGCCTGT | 29897 |
| 334986 | 29752 | 13441 | CAGTACTAGTGCCTG | 29898 |
| 334987 | 29752 | 13442 | TCAGTACTAGTGCCT | 29899 |
| 334988 | 29752 | 13443 | ATCAGTACTAGTGCC | 29900 |
| 334989 | 29752 | 13444 | CATCAGTACTAGTGC | 29901 |
| 334990 | 29752 | 13445 | ACATCAGTACTAGTG | 29902 |
| 334991 | 29752 | 13446 | GACATCAGTACTAGT | 29903 |
| 334992 | 29752 | 13447 | CGACATCAGTACTAG | 29904 |
| 334993 | 29752 | 13448 | ACGACATCAGTACTA | 29905 |
| 334994 | 29752 | 13449 | GACGACATCAGTACT | 29906 |
| 334995 | 29752 | 13450 | AGACGACATCAGTAC | 29907 |
| 334996 | 29752 | 13451 | TAGACGACATCAGTA | 29908 |
| 334997 | 29752 | 13452 | GTAGACGACATCAGT | 29909 |
| 334998 | 29752 | 13453 | TGTAGACGACATCAG | 29910 |
| 334999 | 29752 | 13454 | CTGTAGACGACATCA | 29911 |
| 335000 | 29752 | 13455 | CCTGTAGACGACATC | 29912 |
| 335001 | 29752 | 13456 | CCCTGTAGACGACAT | 29913 |
| 335002 | 29752 | 13457 | GCCCTGTAGACGACA | 29914 |
| 335003 | 29752 | 13458 | AGCCCTGTAGACGAC | 29915 |
| 335004 | 29752 | 13459 | AAGCCCTGTAGACGA | 29916 |
| 335005 | 29752 | 13460 | AAAGCCCTGTAGACG | 29917 |
| 335006 | 29752 | 13461 | AAAAGCCCTGTAGAC | 29918 |
| 335007 | 29752 | 13462 | CAAAAGCCCTGTAGA | 29919 |
| 335008 | 29752 | 13463 | TCAAAAGCCCTGTAG | 29920 |
| 335009 | 29752 | 13464 | ATCAAAAGCCCTGTA | 29921 |
| 335010 | 29752 | 13465 | TATCAAAAGCCCTGT | 29922 |
| 335011 | 29752 | 13466 | ATATCAAAAGCCCTG | 29923 |
| 335012 | 29752 | 13467 | AATATCAAAAGCCCT | 29924 |
| 335013 | 29752 | 13468 | AAATATCAAAAGCCC | 29925 |
| 335014 | 29752 | 13469 | TAAATATCAAAAGCC | 29926 |
| 335015 | 29752 | 13470 | GTAAATATCAAAAGC | 29927 |
| 335016 | 29752 | 13471 | TGTAAATATCAAAAG | 29928 |
| 335017 | 29752 | 13472 | TTGTAAATATCAAAA | 29929 |
| 335018 | 29752 | 13473 | GTTGTAAATATCAAA | 29930 |
| 335019 | 29752 | 13474 | CGTTGTAAATATCAA | 29931 |
| 335020 | 29752 | 13475 | TCGTTGTAAATATCA | 29932 |
| 335021 | 29752 | 13476 | TTCGTTGTAAATATC | 29933 |
| 339281 | 29752 | 13448 | TGTAGACGACATCAGTACTA | 13452 |
| 339282 | 29752 | 13449 | CTGTAGACGACATCAGTACT | 13453 |
| 339283 | 29752 | 13450 | CCTGTAGACGACATCAGTAC | 13454 |
| 339284 | 29752 | 13451 | CCCTGTAGACGACATCAGTA | 13455 |
| 339285 | 29752 | 13452 | GCCCTGTAGACGACATCAGT | 13456 |
| 339286 | 29752 | 13453 | AGCCCTGTAGACGACATCAG | 13457 |
| 339287 | 29752 | 13454 | AAGCCCTGTAGACGACATCA | 13458 |
| 339288 | 29752 | 13455 | AAAGCCCTGTAGACGACATC | 13459 |
| 339289 | 29752 | 13456 | AAAAGCCCTGTAGACGACAT | 13460 |
| 339290 | 29752 | 13457 | CAAAAGCCCTGTAGACGACA | 13461 |
| 339291 | 29752 | 13458 | TCAAAAGCCCTGTAGACGAC | 13462 |
| 339292 | 29752 | 13459 | ATCAAAAGCCCTGTAGACGA | 13463 |
| 339293 | 29752 | 13461 | ATATCAAAAGCCCTGTAGAC | 13465 |
| 339294 | 29752 | 13462 | AATATCAAAAGCCCTGTAGA | 13466 |
| 339295 | 29752 | 13463 | AAATATCAAAAGCCCTGTAG | 13467 |
| 339296 | 29752 | 13464 | TAAATATCAAAAGCCCTGTA | 13468 |
| 339297 | 29752 | 13465 | GTAAATATCAAAAGCCCTGT | 13469 |
| 339298 | 29752 | 13466 | TGTAAATATCAAAAGCCCTG | 13470 |

[0398] ISIS 329733, also a uniform 2′-MOE oligonucleotide with a phosphodiester backbone (AGTAGGCT, incorporated herein as SEQ ID NO:29934), was designed to target site 13398 of the sequence with Genbank accession number NC_{—}004718.1 (SEQ ID NO:16). This 9-mer mimics one side of stem 2 and part of stem 1, and is designed to disrupt the pseudoknot by binding to one side of stem 2 and coaxially stacked nucleotides in stem 1, and as such, is not antisense to a contiguous nucleotide stretch on the target sequence.

[0399] Another series of compounds targeting SARS are shown in Table 5. “Target site” indicates the first (5′-most) nucleotide number on the particular target sequence to which the compound binds. All compounds in Table 5 are composed of 2′-O-methoxyethyl nucleotides, also known as 2′-MOE. The internucleoside (backbone) linkages are phosphorothioate (P═S) throughout the oligonucleotide. All cytidine residues are 5-methylcytidines.

TABLE 5

Uniform 2′-MOE phosphorothioate oligonucleotides targeting
SARS

| | | | | |
|---|---|---|---|---|
| | TARGET | | | SEQ |
| ISIS # | SEQ ID NO | TARGET | SEQUENCE (5′ to 3′) | ID NO |

| | | | | |
|---|---|---|---|---|
| 329540 | 16 | 1 | GGTTGGCTTTTCCTGGGTAG | 20 |
| 329541 | 16 | 2 | TGGTTGGCTTTTCCTGGGTA | 21 |
| 329542 | 29737 | 1 | GGTAGGTAAAAACCTAATAT | 29831 |
| 329543 | 29739 | 1 | TGGTTGCGAAAATAAAGGGG | 29832 |
| 329545 | 29739 | 13377 | ACACCGCAAACCCGTTTAAA | 29833 |
| 329546 | 16 | 13385 | CTGCACTTACACCGCAAACC | 13396 |
| 329547 | 16 | 13392 | AGACGGGCTGCACTTACACC | 13404 |
| 329548 | 16 | 13396 | TGTAAGACGGGCTGCACTTA | 13411 |
| 329549 | 16 | 13426 | GACATCAGTACTAGTGCCTG | 13415 |
| 329550 | 16 | 13445 | TATCAAAAGCCCTGTAGACG | 13445 |
| 329551 | 16 | 13452 | TTGTAAATATCAAAAGCCCT | 13464 |
| 329552 | 16 | 45 | TTTTAAAGTTCGTTTAGAGA | 13471 |
| 329553 | 16 | 21464 | TAAACATGTTCGTTTAGTTG | 64 |
| 329554 | 16 | 25238 | TCCATAAGTTCGTTTATGTG | 21483 |
| 329555 | 16 | 26087 | TACATAAGTTCGTACTCACT | 25257 |
| 329556 | 16 | 26326 | ATAGTTAGTTCGTTTAGACC | 26106 |
| 329557 | 16 | 26891 | AGAAAGCGTTCGTGATGTAG | 26345 |
| 329558 | 16 | 27245 | TTTTCATGTTCGTTTTATGG | 26910 |
| 329559 | 16 | 27751 | GTTTCATGTTCGTTTAGACT | 27264 |
| 329560 | 16 | 28084 | TTAATTTGTTCGTTTATTTA | 27770 |
| 330674 | 16 | 53 | GTTCGTTTAGAGAACAGATC | 28103 |
| 332767 | 29751 | 13418 | AGACGGGCT | 57 |
| 348237 | 29752 | 2 | GGGTAGGTAAAAACCTAATA | 58 |
| 348240 | 29752 | 3 | TGGGTAGGTAAAAACCTAAT | 29833 |
| 348241 | 29752 | 4 | CTGGGTAGGTAAAAACCTAA | 29834 |
| 348242 | 29752 | 5 | CCTGGGTAGGTAAAAACCTA | 29835 |
| 348243 | 29752 | 6 | TCCTGGGTAGGTAAAAACCT | 29836 |
| 348244 | 29752 | 7 | TTCCTGGGTAGGTAAAAACC | 29837 |
| 348245 | 29752 | 8 | TTTCCTGGGTAGGTAAAAAC | 29838 |
| 348246 | 29752 | 9 | TTTTCCTGGGTAGGTAAAAA | 29839 |
| 348247 | 29752 | 10 | CTTTTCCTGGGTAGGTAAAA | 29840 |
| 348248 | 29752 | 11 | GCTTTTCCTGGGTAGGTAAA | 29841 |
| 348249 | 29752 | 12 | GGCTTTTCCTGGGTAGGTAA | 29842 |
| 348250 | 29752 | 13 | TGGCTTTTCCTGGGTAGGTA | 29843 |
| 348251 | 29752 | 14 | TTGGCTTTTCCTGGGTAGGT | 29844 |
| 348252 | 29752 | 15 | GTTGGCTTTTCCTGGGTAGG | 29845 |
| 348253 | 29752 | 18 | TTGGTTGGCTTTTCCTGGGT | 29846 |
| 348254 | 29752 | 19 | GTTGGTTGGCTTTTCCTGGG | 22 |
| 348255 | 29752 | 20 | GGTTGGTTGGCTTTTCCTGG | 23 |
| 348256 | 29752 | 22 | GAGGTTGGTTGGCTTTTCCT | 24 |
| 348257 | 29752 | 24 | TCGAGGTTGGTTGGCTTTTC | 26 |
| 348258 | 29752 | 26 | GATCGAGGTTGGTTGGCTTT | 28 |
| 348259 | 29752 | 30 | AAGAGATCGAGGTTGGTTGG | 30 |
| 348260 | 29752 | 32 | ACAAGAGATCGAGGTTGGTT | 34 |
| 348261 | 29752 | 34 | CTACAAGAGATCGAGGTTGG | 36 |
| 348262 | 29752 | 36 | ATCTACAAGAGATCGAGGTT | 38 |
| 348263 | 29752 | 38 | AGATCTACAAGAGATCGAGG | 40 |
| 348264 | 29752 | 40 | ACAGATCTACAAGAGATCGA | 42 |
| 348265 | 29752 | 42 | GAACAGATCTACAAGAGATC | 44 |
| 348266 | 29752 | 44 | GAGAACAGATCTACAAGAGA | 46 |
| 348267 | 29752 | 46 | TAGAGAACAGATCTACAAGA | 48 |
| 348268 | 29752 | 48 | TTTAGAGAACAGATCTACAA | 50 |
| 348269 | 29752 | 50 | CGTTTAGAGAACAGATCTAC | 52 |
| 348270 | 29752 | 52 | TTCGTTTAGAGAACAGATCT | 54 |
| 348271 | 29752 | 54 | AGTTCGTTTAGAGAACAGAT | 56 |
| 348528 | 29752 | 257 | AAGGCTCTCCATCTTACCTT | 58 |
| 348529 | 29752 | 21484 | GAAAATAAACATGTTCGTTT | 261 |
| 348530 | 29752 | 25260 | AAACAAATCCATAAGTTCGT | 21488 |
| 348531 | 29752 | 25681 | AGTTGGCATCATAAAGTAAT | 25264 |
| 348532 | 29752 | 26109 | GAATGAGTACATAAGTTCGT | 25685 |
| 348533 | 29752 | 26390 | GTTGTCTGCCATGATAAGCA | 26113 |
| 348534 | 29752 | 27066 | AAGATGAAACATCTGTTGTC | 26394 |
| 348535 | 29752 | 27265 | AATAATTTTCATGTTCGTTT | 27070 |
| 348536 | 29752 | 28112 | ATTATCAGACATTTTAATTT | 27269 |
| 348537 | 29752 | 28122 | ATTGGGGTCCATTATCAGAC | 28116 |
| 348538 | 29752 | 248 | CATCTTACCTTTCGGTCACA | 28126 |
| 348539 | 29752 | 21475 | CATGTTCGTTTAGTTGTTAA | 252 |
| 348540 | 29752 | 25251 | CATAAGTTCGTTTATGTGTA | 21479 |
| 348541 | 29752 | 25672 | CATAAAGTAATGGGTTCTTG | 25255 |
| 348542 | 29752 | 26100 | CATAAGTTCGTACTCACTTT | 25676 |
| 348543 | 29752 | 26381 | CATGATAAGCAATGTTAAAG | 26104 |
| 348544 | 29752 | 27057 | CATCTGTTGTCACTTACTGT | 26385 |
| 348545 | 29752 | 27256 | CATGTTCGTTTTATGGATAA | 27061 |
| 348546 | 29752 | 28103 | CATTTTAATTTGTTCGTTTA | 27260 |
| 348547 | 29752 | 28113 | CATTATCAGACATTTTAATT | 28107 |
| 348548 | 29752 | 235 | GGTCACACCCGGACGAAACC | 28117 |
| 348549 | 29752 | 21462 | TTGTTAACAAGAATATCACT | 239 |
| 348550 | 29752 | 25238 | ATGTGTAATGTAATTTGACA | 21466 |
| 348551 | 29752 | 25659 | GTTCTTGGATTTGCACTTCC | 25242 |
| 348552 | 29752 | 26087 | TCACTTTCTTGTGCTTACAA | 25663 |
| 348553 | 29752 | 26368 | GTTAAAGTTCCAAACAGAAT | 26091 |
| 348554 | 29752 | 27044 | TTACTGTACTAGCAAAGCAA | 26372 |
| 348555 | 29752 | 27243 | TGGATAATCTAACTCCATAG | 27048 |
| 348556 | 29752 | 28090 | TCGTTTATTTAAAACAACAA | 27247 |
| 348557 | 29752 | 28100 | TTTAATTTGTTCGTTTATTT | 28094 |
| 329544 | 29752 | 1 | ATGATGTTGAGCTGGTTGCGAAAATAAAGGGG | 28104 |

[0400] ISIS 329591, also a uniform 2′-MOE oligonucleotide with a phosphorothioate backbone (AGTAGGGCT, incorporated herein as SEQ ID NO:29934), was designed to target site 13398 of the sequence with Genbank accession number NC_{—}004718.1 (SEQ ID NO:16). This 9-mer mimics one side of stem 2 and part of stem 1, and is designed to disrupt the pseudoknot by binding to one side of stem 2 and coaxially stacked nucleotides in stem 1, and as such, is not antisense to a contiguous nucleotide stretch on the target sequence.

[0401] Another series of compounds targeting SARS are shown in Table 6. “Target site” indicates the first (5′-most) nucleotide number on the particular target sequence to which the compound binds. All compounds in Table 6 are LNAs. The internucleoside (backbone) linkages are phosphodiester (P═O) throughout the oligonucleotide. All cytidine residues are 5-methylcytidines.

TABLE 6

LNA oligonucleotides targeting SARS

| | TARGET | TARGET | | SEQ ID |
|---|---|---|---|---|
| ISIS # | SEQ ID NO | SITE | SEQUENCE (5′ to 3′) | NO |
| 339335 | 29752 | 13453 | TGTAGACGACATCAG | 29949 |
| 339336 | 29752 | 13456 | CCCTGTAGACGACAT | 29950 |

[0402] Oligonucleotides disclosed herein can be designed and used to target particular features or structural attributes of the SARS Co-V. The series of oligonucleotides ISIS 329410 to ISIS 329419 targets sites conserved between SARS and at least one other coronavirus. The series ISIS 329424 to ISIS 329523 targets randomly selected sites conserved among SARS variants. ISIS 329420 to ISIS 329423 and ISIS 329540 to ISIS 329544 target the 5′ end of the positive strand of at least one of the full-length variants. ISIS 329524 to ISIS 329530, ISIS 329545 to ISIS 329551, ISIS 329720 to ISIS 329722, ISIS 329724, ISIS 329727, ISIS 329729 and ISIS 329731 target sites in or near the pseudoknot. ISIS 332767 and ISIS 332768 are 9-mers targeting the end of stem 1 and stem 2 of the pseudoknot. ISIS 329531 to ISIS 329539 and ISIS 329552 to ISIS 329560 target possible primer binding sites. ISIS 330674 is designed to prevent hybridization of the leader by targeting the 3′ end of the leader sequence.

[0403] ISIS 329591 (AGTAGGGCT, incorporated herein as SEQ ID NO:29934), a uniform 2′-MOE oligonucleotide with a phosphorothioate backbone, and ISIS 329733, a uniform 2′-MOE oligonucleotide with a phosphodiester backbone (AGTAGGGCT, SEQ ID NO:29934), were designed to site 13398 of the sequence with Genbank accession number NC_{—}004718.1 (SEQ ID NO:16). These 9-mers mimic one side of stem 2 and part of stem 1, and are designed to disrupt the pseudoknot by binding to one side of stem 2 and coaxially stacked nucleotides in stem 1.

### Example 19

### RNA/DNA Duplexes Targeting SARS Co-V

[0404] In accordance with the present invention, a series of nucleic acid duplexes comprising the antisense compounds of the present invention and their complements were designed to target SARS with siRNA. The ends of the strands have been modified by the addition of one or more nucleobases to form an overhang. The sense strand of the dsRNA is then designed and synthesized as the complement of the antisense strand and also contains additions to the 3′-terminus. Thus, both strands of the dsRNA duplex would be complementary over the central nucleobases, each having overhangs at one or both termini.

[0405] For example, a duplex comprising an antisense strand having the sequence CGAGAGGCGGACGGGACCG (SEQ ID NO:1) and having a two-nucleobase overhang of deoxythymidine(dT) would have the following structure:

| | | |
|---|---|---|
| cgagaggcggacgggaccgTT | Antisense | (SEQ ID NO: 2) |
| \|\|\|\|\|\|\|\|\|\|\|\|\|\|\|\|\|\|\| | Strand | |
| TTgctctccgcctgccctggc | Complement | (SEQ ID NO: 3) |
| | Strand | |

[0406] Once synthesized, the complementary strands are annealed. The duplex compounds targeting SARS are shown in Table 7. Each antisense oligonucleotide is immediately followed by its complement in Table 7. “Target site” indicates the first (5′-most) nucleotide number on the particular target sequence to which the antisense strand of the compound binds. All antisense compounds and their complements in Table 5 are oligonucleotides composed of a central region consisting of ribonucleotides, flanked on the 3′ end with 2 2′-deoxyribonucleotides (shown in BOLD). The internucleoside (backbone) linkages are phosphodiester (P═O) throughout the antisense oligonucleotide and the complement sequence of the duplex.

TABLE 7

Full oligonucleotide duplexes with 3′-overhangs targeting
SARS

| | | | | | |
|---|---|---|---|---|---|
| | | TARGET | TARGET | | SEQ ID |
| ISIS # | STRAND | SEQ ID NO | SITE | SEQUENCE (5′ to 3′) | NO |

| | | | | | |
|---|---|---|---|---|---|
| 329608 | Antisense | 16 | 190 | UGAUGAUCGACUGCAACACGG | 29951 |
| 329598 | Complement | 16 | 190 | GUGUUGCAGUCGAUCAUCAGC | 29952 |
| 329609 | Antisense | 16 | 2732 | GAACUUCCCAAACAGUAUCTT | 29953 |
| 329599 | Complement | 16 | 2732 | GAUACTGUUUGGGAAGUUCAA | 29954 |
| 329610 | Antisense | 16 | 5622 | AAUGUACCUUGCUGUAAUUTA | 29955 |
| 329600 | Complement | 16 | 5622 | AAUUACAGCAAGGUACAUUCT | 29956 |
| 329611 | Antisense | 16 | 8004 | GUAGCAACAAGUGCCUUAAGT | 29957 |
| 329601 | Complement | 16 | 8004 | UUAAGGCACUUGUUGCUACAG | 29958 |
| 329612 | Antisense | 16 | 10775 | UACCAUUCUGCAGCAGCUCTT | 29959 |
| 329602 | Complement | 16 | 10775 | GAGCUGCUGCAGAAUGGUATG | 29960 |
| 329613 | Antisense | 16 | 13606 | UAACCAAGUUAUAAAUAGUCT | 29961 |
| 329603 | Complement | 16 | 13606 | ACUAUUUAUAACUUGGUUAAA | 29962 |
| 329614 | Antisense | 16 | 17717 | GGCAAUCCUAAGAUUUUUGAA | 29963 |
| 329604 | Complement | 16 | 17717 | CAAAAAUCUUAGGAUUGCCTA | 29964 |
| 329615 | Antisense | 16 | 21351 | UUGAUUCUCCUUAAGAGACAT | 29965 |
| 329605 | Complement | 16 | 21351 | GUCUCUUAAGGAGAAUCAAAT | 29966 |
| 329616 | Antisense | 16 | 25897 | UCUGUAGUAAUUUGUGUAGAC | 29967 |
| 329606 | Complement | 16 | 25897 | CUACACAAAUUACUACAGACA | 29968 |
| 329617 | Antisense | 16 | 27892 | AAAGCCAAGCAGUGCUAUAAG | 29969 |
| 329607 | Complement | 16 | 27892 | UAUAGCACUGCUUGGCUUUGT | 29970 |

[0407] The siRNA duplexes disclosed in Table 7 target randomly selected sites conserved among SARS variants.

### Example 20

### Antisense Inhibition of the SARS-CoV with Oligonucleotides Complentary to the Negative Strand of the Virus

[0408] Compounds targeting SARS are shown in Table 8. “Target site” indicates the first (5′-most) nucleotide number on the particular target sequence to which the compound binds. All compounds in Table 8 are chimeric oligonucleotides (“gapmers”) 20 nucleotides in length, composed of a central “gap” region consisting of ten 2′-deoxynucleotides, which is flanked on both sides (5′ and 3′ directions) by five-nucleotide “wings.” The wings are composed of 2′-O-methoxyethyl nucleotides, also known as 2′-MOE. The internucleoside (backbone) linkages are phosphorothioate (P═S) throughout the oligonucleotide. All cytidine residues are 5-methylcytidines.

TABLE 8

Chimeric phosphorothioate oligonucleotides
targeted to SARS

| | | | | |
|---|---|---|---|---|
| | TARGET | TARGET | | SEQ ID |
| ISIS # | SEQ ID NO | SITE | SEQUENCE (5′ to 3′) | NO |

| | | | | |
|---|---|---|---|---|
| 329561 | 16 | 192 | GTGTTGCAGTCGATCATCAG | 29971 |
| 329562 | 16 | 1753 | ATTGTTGAGTCCTGCGGTAA | 29972 |
| 329563 | 16 | 2734 | GATACTGTTTGGGAAGTTCA | 29973 |
| 329564 | 16 | 4252 | GAAGCACCTAATGCTAAGGA | 29974 |
| 329565 | 16 | 5624 | AATTACAGCAAGGTACATTC | 29975 |
| 329566 | 16 | 6975 | CGTTAGAGAATTGTATCTTA | 29976 |
| 329567 | 16 | 8006 | TTAAGGCACTTGTTGCTACA | 29977 |
| 329568 | 16 | 9132 | TAGACATGGTACATGCGAAA | 29978 |
| 329569 | 16 | 10777 | GAGCTGCTGCAGAATGGTAT | 29979 |
| 329570 | 16 | 12254 | TAACTAGTGCTATGCAAACA | 29980 |
| 329571 | 16 | 13608 | ACTATTTATAACTTGGTTAA | 29981 |
| 329572 | 16 | 15817 | AACAAGGAGATGATTACGTG | 29982 |
| 329573 | 16 | 17719 | CAAAAATCTTAGGATTGCCT | 29983 |
| 329574 | 16 | 18925 | ATAAGTTTCCAGTTCTTCAT | 29984 |
| 329575 | 16 | 21353 | GTCTCTTAAGGAGAATCAAA | 29985 |
| 329576 | 16 | 23829 | TCACAAATATTACCTGACCC | 29986 |
| 329577 | 16 | 25899 | CTACACAAATTACTACAGAC | 29987 |
| 329578 | 16 | 27130 | TGCTATTTGGAATCTTGACG | 29988 |
| 329579 | 16 | 27894 | TATAGCACTGCTTGGCTTTG | 29989 |
| 329580 | 16 | 29504 | TAATCTCACATAGCAATCTT | 29990 |
| 330481 | 16 | 45 | TCTCTAAACGAACTTTAAAA | 29991 |
| 330482 | 16 | 21464 | CAACTAAACGAACATGTTTA | 29992 |
| 330483 | 16 | 25238 | CACATAAACGAACTTATGGA | 29993 |
| 330484 | 16 | 26087 | AGTGAGTACGAACTTATGTA | 29994 |
| 330485 | 16 | 26326 | GGTCTAAACGAACTAACTAT | 29995 |
| 330486 | 16 | 26891 | CTACATCACGAACGCTTTCT | 29996 |
| 330487 | 16 | 27245 | CCATAAAACGAACATGAAAA | 29997 |
| 330488 | 16 | 27751 | AGTCTAAACGAACATGAAAC | 29998 |
| 330489 | 16 | 28084 | TAAATAAACGAACAAATTAA | 29999 |

[0409] Another series of compounds targeting SARS is shown in Table 9. “Target site” indicates the first (5′-most) nucleotide number on the particular target sequence to which the compound binds. All compounds in Table 9 are composed of 2′-O-methoxyethyl nucleotides, also known as 2′-MOE. The internucleoside (backbone) linkages are phosphodiester (P═O) throughout the oligonucleotide. All cytidine residues are 5-methylcytidines.

TABLE 9

Uniform 2′-MOE phosphodiester oligonucleotides targeting
SARS

| | | | | |
|---|---|---|---|---|
| | TARGET | | | |
| | SEQ ID | TARGET | | SEQ ID |
| ISIS # | NO | SITE | SEQUENCE (5′ to 3′) | NO |

| | | | | |
|---|---|---|---|---|
| 329581 | 29752 | 16 | CTACCCAGGAAAAGCCAACC | 30000 |
| 329582 | 29752 | 17 | TACCCAGGAAAAGCCAACCA | 30001 |
| 329583 | 29737 | 1 | ATATTAGGTTTTTACCTACC | 30002 |
| 329584 | 29739 | 1 | CCCCTTTATTTTCGCAACCA | 30003 |
| 329585 | 29739 | 1 | CCCCTTTATTTTCGCAACCAGCTCAACATCAT | 30004 |
| 330490 | 16 | 45 | TCTCTAAACGAACTTTAAAA | 30005 |
| 330491 | 16 | 21464 | CAACTAAACGAACATGTTTA | 30006 |
| 330492 | 16 | 25238 | CACATAAACGAACTTATGGA | 30007 |
| 330493 | 16 | 26087 | AGTGAGTACGAACTTATGTA | 30008 |
| 330494 | 16 | 26326 | GGTCTAAACGAACTAACTAT | 30009 |
| 330495 | 16 | 26891 | CTACATCACGAACGCTTTCT | 30010 |
| 330496 | 16 | 27245 | CCATAAAACGAACATGAAAA | 30011 |
| 330497 | 16 | 27751 | AGTCTAAACGAACATGAAAC | 30012 |
| 330498 | 16 | 28084 | TAAATAAACGAACAAATTAA | 30013 |

[0410] Oglionucleotides dislosed herein can be designed and used to target particular features or structural attributes of the SARS Co-V. The series ISIS 329561 to 329580 targets randomly selected sites conserved among SARS variants. The series ISIS 329581 to ISIS 329585 mimic the 5′ end of the positive strand of at least one of the full-length variants. ISIS 330481 to ISIS 330489 and ISIS 330490 to ISIS 330498 target possible primer binding sites.

[0411] ISIS 330673 (ATATTAGGTTTTTACCTACCCAGGAAAAGCCAACCAACCTC GATCTCTTGTAGATCTGTTCTCTAAACGAAC, incorporated herein as SEQ ID NO:30014), which targets site 1 of the sequence with Genbank accession number AY274119.3 (SEQ ID NO:29751), is a uniform 2′- MOE oligonucleotide with phosphorothioate backbone (P═S), and a single 3′ dideoxy nucleotide. This oligonucleotide is a 72-mer mimic of the leader sequence with a non-extendable 3′ end.

### Example 21

### Control Oligonucleotides for SARS Experiments

[0412] The control oligonucleotides for the experiments are listed in Table 10.

[0413] Except for ISIS 289606, 329586 and 329587 which are uniform 2′-MOE oligonucleotides with phosphorothioate (P═S) backbones, and ISIS 329804, which is a uniform 2′-MOE oligonucleotide with a phosphodiester (P═O) backbone, all control compounds in Table 10 are “gapmers” 20 nucleotides in length, composed of a central “gap” region consisting of ten 2′-deoxynucleotides, which is flanked on both sides (5′ and 3′ directions) by five-nucleotide 2′-MOE “wings.” The gapmers have phosphorothioate backbones (P═S) and all cytidine residues are 5-methylcytidine.

TABLE 10

Control oligonucleotides

| | | |
|---|---|---|
| | | SEQ ID |
| ISIS # | SEQUENCE (5′ to 3′) | NO |

| | | |
|---|---|---|
| 20569 | GTGCGCGCGAGCCCGAAA | 30015 |
| 29837 | TCGATCTCCTTTTATGCCC | 30016 |
| 113529 | CTCTTACTGTGCTGTGGAC | 30017 |
| 114845 | TACGTCCGGAGGCGTACG | 30018 |
| 122291 | TATTCCACGAACGTAGGCT | 30019 |
| 129686 | CGTTATTAACCTCCGTTGA | 30020 |
| 129687 | ACAAGCGTCAACCGTATT | 30021 |
| 129688 | TTCGCGGCTGGACGATTCA | 30022 |
| 129689 | GAGGTCTCGACTTACCCGC | 30023 |
| 129690 | TTAGAATACGTCGCGTTAT | 30024 |
| 129691 | ATGCATACTACGAAAGGC | 30025 |
| 129694 | GTACAGTTATGCGCGGTA | 30026 |
| 129695 | TTCTACCTCGCGCGATTTA | 30027 |
| 129696 | ATTCGCCAGACAACACTG | 30028 |
| 129700 | TAGTGCGGACCTACCCAC | 30029 |
| 141923 | CCTTCCCTGAAGGTTCCTC | 30030 |
| 289606 | CCTTCCCTGAAGGTTCCTC | 30031 |
| 329586 | GTGCGCGCGAGCCCGAAA | 30032 |
| 329587 | TAGTGCGGACCTACCCAC | 30033 |
| 329804 | CCTTCCCTGAAGGTTCCTC | 30034 |

### Example 22

### Target mRNA Reduction in Vero C1008 Cells

[0414] To confirm the feasibility of using antisense oligonucleotides to inhibit target mRNA expression in a cell line permissive for SARS infection, ISIS 116847 (CTGCTAGCCTCTGGATTTGA, incorporated herein as SEQ ID NO:30035), targeted to PTEN, an endogenous mRNA in Vero C1008 cells, was tested for its ability to inhibit expression. The high homology between monkey and human PTEN allowed for the use of the ISIS 116847, which was designed to target the human PTEN sequence. Also tested were ISIS 289841 (CTAAGCGCTCAATGAACATG, incorporated herein as SEQ ID NO:30036), targeted to human Forkhead box OIA (Forkhead), ISIS 122976 (TTGTCACCTTGTGCTCCACA, incorporated herein as SEQ ID NO:30037), targeted to human MEKK3, and ISIS 129690 (TTAGAATACGTCGCGTTATG, incorporated herein as SEQ ID NO:30024), a scrambled control.

[0415] ISIS 116847, ISIS 289841, and ISIS 122976 are “gapmers” 20 nucleotides in length, composed of a central “gap” region consisting of ten 2′-deoxynucleotides, which is flanked on both sides (5′ and 3′ directions) by five-nucleotide 2′-MOE “wings.” The gapmers have, phosphorothioate backbones (P═S) and all cytidine residues are 5-methylcytidine.

[0416] In addition, siRNA designed to target human PTEN (Dharmacon, Inc., Lafayette, Colo.) were tested. The siRNA was comprised of an antisense strand and a complement strand, which were comprised of 19 ribonucleotides linked by alternating phosphothioate and phosphodiester bonds, and flanked on the 3′ end with 2 2′-deoxyribonucleotides (shown in BOLD). For PTEN siRNA, the antisense strand is ISIS 263186 (CTGCTAGCCTCTGGATTTGTT, incorporated herein as SEQ ID NO:30038) and the complement strand is ISIS 263187 (CAAATCCAGAGGCTAGCAGTT, incorporated herein as SEQ ID NO:30039). Also tested were siRNAs targeted to human MEKK3. For MEKK3 siRNA, the antisense strand is ISIS 316404 (TGTCACCTTGTGCTCCACATC, incorporated herein as SEQ ID NO:30040) and the complement strand is ISIS 316398 (TGTGGAGCACAAGGTGACAAC, incorporated herein as SEQ ID NO:30041). The primer probe set designed to target the human PTEN was

| | |
|---|---|
| Forward primer: | |
| AATGGCTAAGTGAAGATGACAATCAT | (SEQ ID NO: 30042) |
| Reverse primer: | |
| TGCACATATCATTACACCAGTTCGT | (SEQ ID NO: 30043) |
| Probe: | |
| FAM- | (SEQ ID NO: 30044) |
| TTGCAGCAATTCACTGTAAAGCTGGAAAGG- | |
| TAMRA, | |

[0417] where FAM is the fluorescent reporter dye and TAMRA is the quencher dye.

[0418] The African green monkey normal kidney cell line Vero C1008 (also known as Vero E6) was obtained from the American Type Culture Collection (Manassas, Va.). (Vero C1008 is a clone of Vero 76 which is also obtained from the American Type Culture Collection (Manassas, Va.), and can be cultured under the same conditions.) Vero C1008 cells were routinely cultured in DMEM supplemented with 10% fetal bovine serum and 1% penicillin/streptomycin and adjusted to contain 4 mM L-glutamine, 1.5 g/L sodium bicarbonate and 4.5 g/L glucose (Invitrogen Life Technologies, Carlsbad, Calif. Cells were routinely passaged by trypsinization and dilution when they reached 90% confluence, and were seeded onto 96-well plates (Falcon-353047) for use in antisense oligonucleotide transfection. Cells were transfected with 2.5 μg Lipofectin/100 μM oligonucleotide/mL Opti-MEM. The siRNAs were also tested using 5 μg Lipofectin/100 nM oligonucleotide/mL OptiMEM (labeled as 2× in the table). Ribogreen was used to measure total RNA.

[0419] Results of the experiment are presented in Table 11 as percent inhibition relative to untreated controls.

TABLE 11
PTEN mRNA Target Reduction in Vero C1008 Cells

| | % Inhibition | | |
|---|---|---|---|
| | Dose of | | |
| | oligonucleotides (nM) | | |
| Treatment | 25 | 50 | 100 |
| 289841 | 10 | 15 | 24 |
| 129690 | 7 | 6 | 8 |
| 116847 | 74 | 86 | 92 |
| 263186 + 263187 | 48 | 48 | 64 |
| 263186 + 263187 2x | 34 | 54 | 82 |
| 122976 | 0 | 0 | 10 |
| si-122976 | 0 | 0 | 0 |
| si-122976 2x | 20 | 0 | 0 |

[0420] The results presented in Table 11 show that antisense oligonucleotides targeted to PTEN (ISIS 116847, si-1 16847) successfully reduce expression in a dose-dependent, target-specific manner in Vero C1008 cells.

[0421] Similarly, reduction of Forkhead mRNA was assayed in Vero C1008 Cells.

[0422] A primer probe set designed to target human Forkhead is

| | |
|---|---|
| Forward primer: | |
| TGCATTTCGCTACCCGAGTT | (SEQ ID NO: 30045) |
| Reverse primer: | |
| CATCAACATCAGGCACTTCTCAG | (SEQ ID NO: 30046) |
| Probe: | |
| FAM- | (SEQ ID NO: 30047) |
| CAGTGCAGATTCCACGTTCTTGTTCCGATA- | |
| TAMRA, | |

[0423] where FAM is the fluorescent reporter dye and TAMRA is the quencher dye.

[0424] Results are presented in Table 12 as percent inhibition relative to untreated control.

TABLE 12
Forkhead mRNA Target Reduction in Vero C1008 Cells

| | % Inhibition | | |
|---|---|---|---|
| | Dose of | | |
| | oligonucleotides (nM) | | |
| Treatment | 25 | 50 | 100 |
| 289841 | 32 | 51 | 81 |
| 129690 | 7 | 15 | 8 |
| 116847 | 17 | 0 | 22 |
| 263186 + 263187 | 33 | 17 | 21 |
| 263186 + 263187 2x | 10 | 3 | 32 |
| 122976 | 6 | 0 | 8 |
| si-122976 | 3 | 8 | 11 |
| si-122976 2x | 42 | 15 | 13 |

[0425] The results presented in Table 12 show that ISIS 289841 targeted to Forkhead mRNA successfully reduces expression in a dose-dependent, target-specific manner in Vero C1008 cells.

### Example 23

### Determination of Non-specific Inhibition of SARS-CoV by Transfection Reagent Methods and Validation of SARS Infection Assay in Vero 76 Cells

[0426] Transfection reagents were tested for toxicity in Vero 76 cells. Furthermore, control oligonucleotides were tested for efficacy against infection of Vero 76 cells with the Toronto-2 strain of SARS-CoV.

[0427] The protocols described indicate volumes were optimized for transfection experiments in 96-well plate format. Reagent volumes can be adjusted to compensate for other cell culture formats.

[0428] Oligonucleotide plates were removed from storage and brought to room temperature. Pre-warmed Opti-MEM (Invitrogen Life Technologies, Carlsbad, Calif.) was added to oligonucleotide plates at a volume of 50 μL/well. Plates were agitated to dissolve oligonucleotides (generally a minimum time of 15 minutes). 45 minutes to an hour prior to oligonucleotide transfection, 15 μL of Lipofectin (Invitrogen Life Technologies, Carlsbad, Calif.) was added into 2 mL of Opi-MEM, 20 μL of OligofectAMINE (Invitrogen Life Technologies, Carlsbad, Calif.) was added in 2 mL of Opti-MEM, and 5 μL Cytofectin (Gene Therapy Systems, San Diego, Calif.) was added in 2 mL Opti-MEM. Each mixture was incubated for 30 minutes at room temperature before 75 μL/well of each mixture was added onto appropriate wells of the oligonucleotide plate that contains 200 nM oligonucleotide. The oligonucleotides and transfection reagents were incubated at room temperature for about 15 minutes to allow complex formation.

[0429] Media was removed from a 96 well plate containing Vero 76 cells which had been seeded at a density of ˜10⁵ cells/mL. For this assay, cells can be transfected at confluency of about 65-100%. Results presented in Table 13 are from cells transfected at a confluency of about 90-95%. 100 μL/well of oligonucleotide/transfection reagent/Opti-MEM was transferred from the oligonucleotide plate onto the cells. Cells were incubated for 4 hours at which time the transfection reagent was removed and cells were washed once with serum containing growth medium prior to addition of 50 [L assay medium (IMEM containing 2% FBS, L-glutamine, and penicillin/streptomycin) per well. Cells were allowed to recover for at least 2 hours in standard cell culture conditions prior to viral infection.

[0430] For viral infection, pre-titred SARS Toronto-2 virus (2.1×10⁸ pfu/mL) stock, diluted in assay medium and added at a multiplicity of infection of 0.3 to 0.5 or media was added to the wells at 50 μL/well. The plate was incubated for 72 hours in normal cell culture conditions. Quantification of live cells was performed using an MTS reagent (Cell Titer 96 Aqueous One solution, Promega, Madison, Wis.), and the % toxicity and % killing was calculated.

[0431] Control oligonucleotides ISIS 129686, ISIS 129689, ISIS 129690, ISIS 129691, ISIS 129694, ISIS 129695, ISIS 129700, and ISIS 141923, described in Example 20 were tested in the above assay for toxicity and efficacy. Results are presented in Table 14 as % toxicity and % viral activity. Toxicity refers to the toxicity due to the transfection reagent or oligonucleotide. Viral activity reflects the ability of the virus to infect the cells, wherein a viral activity greater than 100% would indicate increased virulence and a viral activity less than 100% would indicate inhibition of virulence. Viral activity for virus control was 84%.

TABLE 13
Effect of transfection reagents and control antisense
oligonucleotides on SARS activity in Vero 76 cells

| | Transfection | | % Viral | |
|---|---|---|---|---|
| Compound | Reagent | % Toxicity | Activity | SEQ ID NO |
| 129686 | Lipofectin | 2.4 | 89 | 30020 |
| | OligofectAMINE | 2.4 | 92 | |
| | Cytofectin | 0.0 | 93 | |
| 129689 | Lipofectin | 3.7 | 91 | 30023 |
| | OligofectAMINE | 3.1 | 93 | |
| | Cytofectin | 3.9 | 92 | |
| 129690 | Lipofectin | 7.4 | 88 | 30024 |
| | OligofectAMINE | 0.9 | 92 | |
| | Cytofectin | 3.0 | 93 | |
| 129691 | Lipofectin | 8.3 | 92 | 30025 |
| | OligofectAMINE | 6.7 | 92 | |
| | Cytofectin | 9.7 | 93 | |
| 129694 | Lipofectin | 7.7 | 90 | 30026 |
| | OligofectAMINE | 5.6 | 91 | |
| | Cytofectin | 4.6 | 91 | |
| 129695 | Lipofectin | 6.7 | 91 | 30027 |
| | OligofectAMINE | 6.2 | 91 | |
| | Cytofectin | 5.2 | 92 | |
| 129700 | Lipofectin | 6.2 | 91 | 30029 |
| | OligofectAMINE | 10.5 | 91 | |
| | Cytofectin | 8.2 | 93 | |
| 141923 | Lipofectin | 7.7 | 88 | 30030 |
| | OligofectAMINE | 6.0 | 93 | |
| | Cytofectin | 8.2 | 93 | |

[0432] No significant toxicity was observed with any transfection reagent or oligonucleotide used in the assay. None of the test compounds demonstrated efficacy versus the SARS Toronto-2 strain. Thus, the assay was deemed valid for use with the ilogonucleotide/transfection reagent system described. Lipofectin was chosen as the transfection reagent for subsequent studies, and was used at a ratio of 3 μL Lipofectin/100 nM oligonucleotide/1 mL Opti-MEM.

### Example 24

### Antisense Oligonucleotide Inhibition of SARS Activity in Vero 76 Cells: MTS Assay

[0433] Antisense oligonucleotides targeting the SARS-CoV gene were tested in the assay described in Example 22, using the Lipofectin reagent (Invitrogen Life Technologies, Carlsbad, Calif.) at 3 μL Lipofectin/100 nM oligonucleotide/1 mL Opti-MEM.

[0434] The experiment consisted of 4 plates containing the compounds, and each plate was tested in duplicate yielding a total of 8 plates. Each plate contained 12 negative control oligonucleotides: ISIS 129686, 129687, 129688, 129689, 129690, 129691, 129694, 129695, 141923, 289606, 329586, 329804, indicated in bold in the table. Included in the assay were the 5-10-5 MOE gapmers ISIS 330538 (ATAAATTATTTCTGTGGCTG, incorporated herein as SEQ ID NO:30048) targeted to CEACAMI, and ISIS 333040 (TTGAGCTTCTTGCTGTGGAT, incorporated herein as SEQ ID NO:30049), ISIS 333048 (CATGATGTCCCGCACGGTGG, incorporated herein as SEQ ID NO:30050), ISIS 333049 AATAGCCCGTCACATTGAGG, incorporated herein as SEQ ID NO:30051), ISIS 333054 (ACCCACTTGATGTTGGCTTT, incorporated here in as SEQ ID NO:30052), and ISIS 333057 (GCTGTTTTCTGTGAACCACT, incorporated herein as SEQ ID NO:30053) targeted to aminopeptidase N. Also contemplated as a control is ISIS 2922 (GCGTTTGCTCTTCTTCTTGCG, incorporated herein as SEQ ID NO:30054), a uniform 2′-deoxynucleotide with a phosphothioate backbone designed to human herpesvirus 5. Data are presented as the average of two O.D. measurements (Envision microplate reader, Perkin-Elmer) per antisense oligonucleotide tested. The replicate plates averaged for each data point are indicated in Table 14 “Plates.” Each plate contained 4 of each of the following control wells: media alone with no cells (Media), media and virus with no cells (Media+Virus), cells alone with no virus or oligonucleotide treatment (Cell Control), and cells and virus with no oligonucleotide treatment (Virus Control). The O.D. presented for each of these controls is thus the average of eight measurements for each set of duplicate plates. Because the O.D. measured is proportional to the number of living cells in culture, the O.D. is indicative of “viral activity”, wherein an O.D. reading close to that for the Cell Control suggests inhibition of virus activity by the treatment, and an O.D. reading close to that for the Virus Control suggest no affect on virus activity.

TABLE 14
Effect of antisense inhibitors on SARS activity
in Vero 76 cells: MTS assay

| | Treatment | | |
|---|---|---|---|
| Plates | (ISIS # or description) | Viral activity (O.D.) | SEQ ID NO |
| A + B | Media | 0.09 | N/A |
| A + B | Media + V | 0.09 | N/A |
| A + B | CC | 0.87 | N/A |
| A + B | VC | 0.46 | N/A |
| A + B | 129686 | 0.50 | 30020 |
| A + B | 129687 | 0.55 | 30021 |
| A + B | 129688 | 0.52 | 30022 |
| A + B | 129689 | 0.52 | 30023 |
| A + B | 129690 | 0.52 | 30024 |
| A + B | 129691 | 0.52 | 30025 |
| A + B | 129694 | 0.51 | 30026 |
| A + B | 129695 | 0.51 | 30027 |
| A + B | 141923 | 0.53 | 30027 |
| A + B | 289606 | 0.47 | 30030 |
| A + B | 329586 | 0.50 | 30031 |
| A + B | 329804 | 0.55 | 30032 |
| A + B | 329492 | 0.54 | 18448 |
| A + B | 329493 | 0.57 | 18526 |
| A + B | 329494 | 0.53 | 18944 |
| A + B | 329495 | 0.53 | 19539 |
| A + B | 329496 | 0.40 | 19551 |
| A + B | 329497 | 0.46 | 20772 |
| A + B | 329498 | 0.45 | 21051 |
| A + B | 329499 | 0.47 | 21372 |
| A + B | 329500 | 0.49 | 22166 |
| A + B | 329501 | 0.45 | 23011 |
| A + B | 329502 | 0.49 | 23088 |
| A + B | 329503 | 0.42 | 23526 |
| A + B | 329504 | 0.49 | 23848 |
| A + B | 329505 | 0.48 | 24440 |
| A + B | 329506 | 0.53 | 24890 |
| A + B | 329507 | 0.47 | 25485 |
| A + B | 329508 | 0.52 | 25899 |
| A + B | 329509 | 0.50 | 25918 |
| A + B | 329510 | 0.51 | 26408 |
| A + B | 329511 | 0.49 | 26452 |
| A + B | 329512 | 0.46 | 26501 |
| A + B | 329513 | 0.45 | 26800 |
| A + B | 329514 | 0.54 | 27149 |
| A + B | 329515 | 0.45 | 27285 |
| A + B | 329516 | 0.51 | 27425 |
| A + B | 329517 | 0.52 | 27520 |
| A + B | 329518 | 0.50 | 27557 |
| A + B | 329519 | 0.41 | 27913 |
| A + B | 329410 | 0.47 | 13990 |
| A + B | 329411 | 0.45 | 13996 |
| A + B | 329412 | 0.51 | 15214 |
| A + B | 329413 | 0.56 | 15454 |
| A + B | 329414 | 0.47 | 15637 |
| A + B | 329415 | 0.46 | 15733 |
| A + B | 329416 | 0.50 | 17098 |
| A + B | 329417 | 0.44 | 18562 |
| A + B | 329418 | 0.49 | 18789 |
| A + B | 329419 | 0.49 | 25072 |
| A + B | 329520 | 0.48 | 28180 |
| A + B | 329521 | 0.50 | 29128 |
| A + B | 329522 | 0.51 | 29487 |
| A + B | 329523 | 0.53 | 29523 |
| A + B | 329561 | 0.49 | 29971 |
| A + B | 329562 | 0.51 | 29972 |
| A + B | 329563 | 0.45 | 29973 |
| A + B | 329564 | 0.48 | 29974 |
| A + B | 329565 | 0.45 | 29975 |
| A + B | 329566 | 0.49 | 29976 |
| A + B | 329567 | 0.51 | 29977 |
| A + B | 329568 | 0.53 | 29978 |
| A + B | 329569 | 0.31 | 29979 |
| A + B | 329570 | 0.46 | 29980 |
| A + B | 329571 | 0.47 | 29981 |
| A + B | 329572 | 0.31 | 29982 |
| A + B | 329573 | 0.43 | 29983 |
| A + B | 329574 | 0.35 | 29984 |
| A + B | 329575 | 0.41 | 29985 |
| A + B | 329576 | 0.48 | 29986 |
| A + B | 329577 | 0.50 | 29987 |
| A + B | 329578 | 0.53 | 29988 |
| A + B | 329579 | 0.53 | 29989 |
| A + B | 329580 | 0.52 | 29990 |
| A + B | 329420 | 0.49 | 20 |
| A + B | 329421 | 0.56 | 21 |
| A + B | 329422 | 0.43 | 29831 |
| A + B | 329423 | 0.49 | 29832 |
| A + B | 329540 | 0.55 | 20 |
| A + B | 329541 | 0.56 | 21 |
| C + D | Media | 0.09 | N/A |
| C + D | Media + V | 0.09 | N/A |
| C + D | CC | 0.87 | N/A |
| C + D | VC | 0.46 | N/A |
| C + D | 129686 | 0.50 | 30020 |
| C + D | 129687 | 0.55 | 30021 |
| C + D | 129688 | 0.52 | 30022 |
| C + D | 129689 | 0.52 | 30023 |
| C + D | 129690 | 0.52 | 30024 |
| C + D | 129691 | 0.52 | 30025 |
| C + D | 129694 | 0.51 | 30026 |
| C + D | 129695 | 0.51 | 30027 |
| C + D | 141923 | 0.53 | 30027 |
| C + D | 289606 | 0.47 | 30030 |
| C + D | 329586 | 0.50 | 30031 |
| C + D | 329804 | 0.55 | 30032 |
| C + D | 329492 | 0.54 | 18448 |
| C + D | 329493 | 0.57 | 18526 |
| C + D | 329494 | 0.53 | 18944 |
| C + D | 329495 | 0.53 | 19539 |
| C + D | 329496 | 0.40 | 19551 |
| C + D | 329497 | 0.46 | 20772 |
| C + D | 329498 | 0.45 | 21051 |
| C + D | 329499 | 0.47 | 21372 |
| C + D | 329500 | 0.49 | 22166 |
| C + D | 329501 | 0.45 | 23011 |
| C + D | 329502 | 0.49 | 23088 |
| C + D | 329503 | 0.42 | 23526 |
| C + D | 329504 | 0.49 | 23848 |
| C + D | 329505 | 0.48 | 24440 |
| C + D | 329506 | 0.53 | 24890 |
| C + D | 329507 | 0.47 | 25485 |
| C + D | 329508 | 0.52 | 25899 |
| C + D | 329509 | 0.50 | 25918 |
| C + D | 329510 | 0.51 | 26408 |
| C + D | 329511 | 0.49 | 26452 |
| C + D | 329512 | 0.46 | 26501 |
| C + D | 329513 | 0.45 | 26800 |
| C + D | 329514 | 0.54 | 27149 |
| C + D | 329515 | 0.45 | 27285 |
| C + D | 329516 | 0.51 | 27425 |
| C + D | 329517 | 0.52 | 27520 |
| C + D | 329518 | 0.50 | 27557 |
| C + D | 329519 | 0.41 | 27913 |
| C + D | 329410 | 0.47 | 13990 |
| C + D | 329411 | 0.45 | 13996 |
| C + D | 329412 | 0.51 | 15214 |
| C + D | 329413 | 0.56 | 15454 |
| C + D | 329414 | 0.47 | 15637 |
| C + D | 329415 | 0.46 | 15733 |
| C + D | 329416 | 0.50 | 17098 |
| C + D | 329417 | 0.44 | 18562 |
| C + D | 329418 | 0.49 | 18789 |
| C + D | 329419 | 0.49 | 25072 |
| C + D | 329520 | 0.48 | 28180 |
| C + D | 329521 | 0.50 | 29128 |
| C + D | 329522 | 0.51 | 29487 |
| C + D | 329523 | 0.53 | 29523 |
| C + D | 329561 | 0.49 | 29971 |
| C + D | 329562 | 0.51 | 29972 |
| C + D | 329563 | 0.45 | 29973 |
| C + D | 329564 | 0.48 | 29974 |
| C + D | 329565 | 0.45 | 29975 |
| C + D | 329566 | 0.49 | 29976 |
| C + D | 329567 | 0.51 | 29977 |
| C + D | 329568 | 0.53 | 29978 |
| C + D | 329569 | 0.31 | 29979 |
| C + D | 329570 | 0.46 | 29980 |
| C + D | 329571 | 0.47 | 29981 |
| C + D | 329572 | 0.31 | 29982 |
| C + D | 329573 | 0.43 | 29983 |
| C + D | 329574 | 0.35 | 29984 |
| C + D | 329575 | 0.41 | 29985 |
| C + D | 329576 | 0.48 | 29986 |
| C + D | 329577 | 0.50 | 29987 |
| C + D | 329578 | 0.53 | 29988 |
| C + D | 329579 | 0.53 | 29989 |
| C + D | 329580 | 0.52 | 29990 |
| C + D | 329420 | 0.49 | 20 |
| C + D | 329421 | 0.56 | 21 |
| C + D | 329422 | 0.43 | 29831 |
| C + D | 329423 | 0.49 | 29832 |
| C + D | 329540 | 0.55 | 20 |
| C + D | 329541 | 0.56 | 21 |
| E + F | Media | 0.09 | N/A |
| E + F | Media + V | 0.09 | N/A |
| E + F | CC | 0.80 | N/A |
| E + F | VC | 0.44 | N/A |
| E + F | 129686 | 0.46 | 30020 |
| E + F | 129687 | 0.44 | 30021 |
| E + F | 129688 | 0.50 | 30022 |
| E + F | 129689 | 0.46 | 30023 |
| E + F | 129690 | 0.47 | 30024 |
| E + F | 129691 | 0.45 | 30025 |
| E + F | 129694 | 0.48 | 30026 |
| E + F | 129695 | 0.48 | 30027 |
| E + F | 141923 | 0.52 | 30027 |
| E + F | 289606 | 0.49 | 30030 |
| E + F | 329586 | 0.45 | 30031 |
| E + F | 329804 | 0.47 | 30032 |
| E + F | 329542 | 0.45 | 29831 |
| E + F | 329543 | 0.49 | 29832 |
| E + F | 329544 | 0.48 | 29833 |
| E + F | 329581 | 0.41 | 30000 |
| E + F | 329582 | 0.43 | 30001 |
| E + F | 329583 | 0.49 | 30002 |
| E + F | 329584 | 0.47 | 30003 |
| E + F | 329585 | 0.52 | 30004 |
| E + F | 329524 | 0.52 | 13396 |
| E + F | 329525 | 0.54 | 13404 |
| E + F | 329526 | 0.49 | 13411 |
| E + F | 329527 | 0.44 | 13415 |
| E + F | 329528 | 0.51 | 13445 |
| E + F | 329529 | 0.43 | 13464 |
| E + F | 329530 | 0.50 | 13471 |
| E + F | 329545 | 0.40 | 29833 |
| E + F | 329546 | 0.47 | 13396 |
| E + F | 329547 | 0.57 | 13404 |
| E + F | 329548 | 0.47 | 13411 |
| E + F | 329549 | 0.53 | 13415 |
| E + F | 329550 | 0.57 | 13445 |
| E + F | 329551 | 0.53 | 13464 |
| E + F | 329552 | 0.54 | 13471 |
| E + F | 329553 | 0.57 | 64 |
| E + F | 329554 | 0.51 | 21483 |
| E + F | 329555 | 0.51 | 25257 |
| E + F | 329556 | 0.50 | 26106 |
| E + F | 329557 | 0.47 | 26345 |
| E + F | 329558 | 0.54 | 26910 |
| E + F | 329559 | 0.55 | 27264 |
| E + F | 329560 | 0.50 | 27770 |
| E + F | 330490 | 0.53 | 30005 |
| E + F | 330491 | 0.48 | 30006 |
| E + F | 330492 | 0.48 | 30007 |
| E + F | 330493 | 0.50 | 30008 |
| E + F | 330494 | 0.49 | 30009 |
| E + F | 330495 | 0.47 | 30010 |
| E + F | 330496 | 0.51 | 30011 |
| E + F | 330497 | 0.41 | 30012 |
| E + F | 330498 | 0.44 | 30013 |
| E + F | 329531 | 0.50 | 64 |
| E + F | 329532 | 0.54 | 21483 |
| E + F | 329533 | 0.48 | 25257 |
| E + F | 329534 | 0.54 | 26106 |
| E + F | 329535 | 0.51 | 26345 |
| E + F | 329536 | 0.52 | 26910 |
| E + F | 329537 | 0.52 | 27264 |
| E + F | 329538 | 0.55 | 27770 |
| E + F | 329539 | 0.49 | 28103 |
| E + F | 330481 | 0.46 | 28103 |
| E + F | 330482 | 0.41 | 29992 |
| E + F | 330483 | 0.46 | 29993 |
| E + F | 330484 | 0.54 | 29994 |
| E + F | 330485 | 0.51 | 29995 |
| E + F | 330486 | 0.49 | 29996 |
| E + F | 330487 | 0.51 | 29997 |
| E + F | 330488 | 0.48 | 29998 |
| E + F | 330489 | 0.52 | 29999 |
| E + F | 333040 | 0.56 | 30049 |
| E + F | 333048 | 0.55 | 30050 |
| E + F | 333049 | 0.51 | 30051 |
| E + F | 333054 | 0.48 | 30052 |
| E + F | 333057 | 0.41 | 30053 |
| E + F | 330538 | 0.45 | 30048 |
| E + F | 329591 | 0.49 | 29934 |
| E + F | 329729 | 0.38 | 13464 |
| E + F | 334962 | 0.41 | 29874 |
| E + F | 334963 | 0.46 | 298975 |
| G + H | Media | 0.09 | N/A |
| G + H | Media + V | 0.09 | N/A |
| G + H | CC | 0.87 | N/A |
| G + H | VC | 0.38 | N/A |
| G + H | 129686 | 0.44 | 30020 |
| G + H | 129687 | 0.49 | 30021 |
| G + H | 129688 | 0.43 | 30022 |
| G + H | 129689 | 0.55 | 30023 |
| G + H | 129690 | 0.56 | 30024 |
| G + H | 129691 | 0.50 | 30025 |
| G + H | 129694 | 0.54 | 30026 |
| G + H | 129695 | 0.54 | 30027 |
| G + H | 141923 | 0.52 | 30027 |
| G + H | 289606 | 0.50 | 30030 |
| G + H | 329586 | 0.36 | 30031 |
| G + H | 329804 | 0.50 | 30032 |
| G + H | 334996 | 0.48 | 30034 |
| G + H | 334998 | 0.51 | 29910 |
| G + H | 335001 | 0.51 | 29913 |
| G + H | 335003 | 0.51 | 29914 |
| G + H | 335005 | 0.47 | 29917 |

### Example 25

### Antisense Oligonucleotide Inhibition of SARS Activity in Vero 76 Cells: Neutral Red (NR) Assay

[0435] Antisense oligonucleotides targeting the SARS-CoV gene were transfected as in example 23, using 3 μL Lipofectin/100 nM oligonucleotide/1 mL Opti-MEM. Cells were exposed to CoV at an MOI of 0.3 for 1 hour, and washed with assay medium which was replaced.

[0436] Viability was tested using NR after cells had recovered for 72 hours post-infection. As cells lose viability, they lose the ability to take up NR. Each plate contained 12 negative control oligonucleotides indicated in bold in the table. Data are presented as the average of two O.D. measurements per antisense oligonucleotide tested. The replicate plates averaged for each data point are indicated in Table 15 “Plates.” Each plate contained 4 of each of the following control wells: media alone with no cells (Media), media and virus with no cells (Media+Virus), cells alone with no virus or oligonucleotide treatment (Cell Control), and cells and virus with no oligonucleotide treatment (Virus Control). The O.D. presented for each of these controls is thus the average of eight measurements for each set of duplicate plates. Because the O.D. measured is proportional to the number of living cells in culture, the O.D. is indicative of “viral activity”, wherein an O.D. reading close to that for the Cell Control suggests inhibition of virus activity by the treatment, and an O.D. reading close to that for the Virus Control suggest no affect on virus activity.

TABLE 15
Effect of antisense inhibitors on SARS activity in
Vero 76 cells: NR assay

| | Treatment | | |
|---|---|---|---|
| Plates | (ISIS # or description) | Viral Activity (O.D.) | SEQ ID NO |
| 1 + 2 | Media | 0.97 | N/A |
| 1 + 2 | Media + Virus | 0.64 | N/A |
| 1 + 2 | Cell Control | 0.83 | N/A |
| 1 + 2 | Virus Control | 1.15 | N/A |
| 1 + 2 | 129686 | 0.40 | 30020 |
| 1 + 2 | 129687 | 0.47 | 30021 |
| 1 + 2 | 129688 | 0.47 | 30022 |
| 1 + 2 | 129689 | 0.60 | 30023 |
| 1 + 2 | 129690 | 0.69 | 30024 |
| 1 + 2 | 129691 | 0.36 | 30025 |
| 1 + 2 | 129694 | 0.71 | 30026 |
| 1 + 2 | 129695 | 0.52 | 30027 |
| 1 + 2 | 141923 | 1.39 | 30027 |
| 1 + 2 | 289606 | 0.44 | 30030 |
| 1 + 2 | 329586 | 1.20 | 30031 |
| 1 + 2 | 329804 | 1.00 | 30032 |
| 1 + 2 | 329424 | 0.39 | 211 |
| 1 + 2 | 329425 | 0.29 | 221 |
| 1 + 2 | 329426 | 0.47 | 372 |
| 1 + 2 | 329427 | 0.56 | 390 |
| 1 + 2 | 329428 | 0.36 | 1335 |
| 1 + 2 | 329429 | 0.61 | 1772 |
| 1 + 2 | 329430 | 1.01 | 1774 |
| 1 + 2 | 329431 | 0.68 | 1869 |
| 1 + 2 | 329432 | 0.52 | 2094 |
| 1 + 2 | 329433 | 0.80 | 2403 |
| 1 + 2 | 329434 | 0.40 | 2753 |
| 1 + 2 | 329435 | 0.76 | 2830 |
| 1 + 2 | 329436 | 1.10 | 3150 |
| 1 + 2 | 329437 | 0.36 | 3308 |
| 1 + 2 | 329438 | 0.67 | 4025 |
| 1 + 2 | 329439 | 0.75 | 4271 |
| 1 + 2 | 329440 | 1.00 | 4842 |
| 1 + 2 | 329441 | 0.56 | 5294 |
| 1 + 2 | 329442 | 0.78 | 5348 |
| 1 + 2 | 329443 | 0.64 | 5486 |
| 1 + 2 | 329444 | 0.37 | 5643 |
| 1 + 2 | 329445 | 0.85 | 5653 |
| 1 + 2 | 329446 | 0.54 | 6014 |
| 1 + 2 | 329447 | 0.31 | 6481 |
| 1 + 2 | 329448 | 0.81 | 6619 |
| 1 + 2 | 329449 | 0.87 | 6994 |
| 1 + 2 | 329450 | 0.55 | 7028 |
| 1 + 2 | 329451 | 0.70 | 7165 |
| 1 + 2 | 329452 | 0.53 | 7541 |
| 1 + 2 | 329453 | 1.10 | 7971 |
| 1 + 2 | 329454 | 0.57 | 8025 |
| 1 + 2 | 329455 | 0.55 | 8589 |
| 1 + 2 | 329456 | 0.77 | 8597 |
| 1 + 2 | 329457 | 0.60 | 9110 |
| 1 + 2 | 329458 | 0.86 | 9151 |
| 1 + 2 | 329459 | 1.10 | 9384 |
| 1 + 2 | 329460 | 0.57 | 9894 |
| 1 + 2 | 329461 | 1.07 | 9937 |
| 1 + 2 | 329462 | 0.50 | 10008 |
| 1 + 2 | 329463 | 1.16 | 10465 |
| 1 + 2 | 329464 | 0.92 | 10796 |
| 1 + 2 | 329465 | 0.85 | 11206 |
| 1 + 2 | 329466 | 0.72 | 11513 |
| 1 + 2 | 329467 | 0.61 | 11982 |
| 1 + 2 | 329468 | 0.81 | 12007 |
| 1 + 2 | 329469 | 0.63 | 12273 |
| 1 + 2 | 329470 | 0.85 | 12454 |
| 1 + 2 | 329471 | 1.08 | 13178 |
| 1 + 2 | 329472 | 1.11 | 13195 |
| 1 + 2 | 329473 | 0.84 | 13242 |
| 1 + 2 | 329591 | 0.43 | 29934 |
| 1 + 2 | 329729 | 0.40 | 13464 |
| 3 + 4 | Media | 0.64 | N/A |
| 3 + 4 | Media + Virus | 0.67 | N/A |
| 3 + 4 | Cell Control | 1.36 | N/A |
| 3 + 4 | Virus Control | 0.47 | N/A |
| 3 + 4 | 129686 | 0.91 | 30020 |
| 3 + 4 | 129687 | 0.47 | 30021 |
| 3 + 4 | 129688 | 0.61 | 30022 |
| 3 + 4 | 129689 | 0.37 | 30023 |
| 3 + 4 | 129690 | 0.38 | 30024 |
| 3 + 4 | 129691 | 0.39 | 30025 |
| 3 + 4 | 129694 | 0.66 | 30026 |
| 3 + 4 | 129695 | 0.24 | 30027 |
| 3 + 4 | 141923 | 0.50 | 30027 |
| 3 + 4 | 289606 | 0.57 | 30030 |
| 3 + 4 | 329586 | 0.47 | 30031 |
| 3 + 4 | 329804 | 0.51 | 30032 |
| 3 + 4 | 329410 | 0.39 | 13990 |
| 3 + 4 | 329411 | 0.41 | 13996 |
| 3 + 4 | 329412 | 0.28 | 15214 |
| 3 + 4 | 329413 | 0.39 | 15454 |
| 3 + 4 | 329474 | 0.37 | 13627 |
| 3 + 4 | 329475 | 0.83 | 13997 |
| 3 + 4 | 329476 | 0.49 | 14058 |
| 3 + 4 | 329477 | 0.38 | 14258 |
| 3 + 4 | 329478 | 0.88 | 14724 |
| 3 + 4 | 329479 | 0.56 | 14847 |
| 3 + 4 | 329480 | 0.98 | 14995 |
| 3 + 4 | 329481 | 0.65 | 15084 |
| 3 + 4 | 329482 | 0.34 | 15420 |
| 3 + 4 | 329483 | 0.36 | 15744 |
| 3 + 4 | 329484 | 0.38 | 15836 |
| 3 + 4 | 329485 | 0.35 | 15904 |
| 3 + 4 | 329486 | 0.38 | 16653 |
| 3 + 4 | 329487 | 0.44 | 16888 |
| 3 + 4 | 329488 | 0.29 | 17328 |
| 3 + 4 | 329489 | 0.40 | 17738 |
| 3 + 4 | 329490 | 0.62 | 17768 |
| 3 + 4 | 329491 | 0.35 | 18420 |
| 3 + 4 | 329492 | 0.39 | 18448 |
| 3 + 4 | 329493 | 0.32 | 18526 |
| 3 + 4 | 329494 | 0.34 | 18944 |
| 3 + 4 | 329495 | 0.36 | 19539 |
| 3 + 4 | 329496 | 0.28 | 19551 |
| 3 + 4 | 329497 | 0.27 | 20772 |
| 3 + 4 | 329498 | 0.47 | 21051 |
| 3 + 4 | 329499 | 0.44 | 21372 |
| 3 + 4 | 329500 | 0.64 | 22166 |
| 3 + 4 | 329501 | 0.33 | 23011 |
| 3 + 4 | 329502 | 0.46 | 23088 |
| 3 + 4 | 329503 | 0.50 | 23526 |
| 3 + 4 | 329504 | 0.37 | 23848 |
| 3 + 4 | 329505 | 0.25 | 24440 |
| 3 + 4 | 329506 | 1.07 | 24890 |
| 3 + 4 | 329507 | 0.62 | 25485 |
| 3 + 4 | 329508 | 0.47 | 25899 |
| 3 + 4 | 329509 | 0.38 | 25918 |
| 3 + 4 | 329510 | 0.47 | 26408 |
| 3 + 4 | 329511 | 0.40 | 26452 |
| 3 + 4 | 329512 | 0.94 | 26501 |
| 3 + 4 | 329513 | 0.32 | 26800 |
| 3 + 4 | 329514 | 0.41 | 27149 |
| 3 + 4 | 329515 | 0.53 | 27285 |
| 3 + 4 | 329516 | 0.49 | 27425 |
| 3 + 4 | 329517 | 0.44 | 27520 |
| 3 + 4 | 329518 | 0.54 | 27557 |
| 3 + 4 | 329519 | 0.44 | 27913 |
| 3 + 4 | 334962 | 0.53 | 29874 |
| 3 + 4 | 334963 | 0.32 | 29875 |
| 5 + 6 | Media | 0.75 | N/A |
| 5 + 6 | Media + Virus | 0.81 | N/A |
| 5 + 6 | Cell Control | 1.24 | N/A |
| 5 + 6 | Virus Control | 0.50 | N/A |
| 5 + 6 | 129686 | 0.44 | 30020 |
| 5 + 6 | 129687 | 0.47 | 30021 |
| 5 + 6 | 129688 | 0.37 | 30022 |
| 5 + 6 | 129689 | 0.39 | 30023 |
| 5 + 6 | 129690 | 0.39 | 30024 |
| 5 + 6 | 129691 | 0.70 | 30025 |
| 5 + 6 | 129694 | 0.43 | 30026 |
| 5 + 6 | 129695 | 0.43 | 30027 |
| 5 + 6 | 141923 | 0.38 | 30027 |
| 5 + 6 | 289606 | 0.47 | 30030 |
| 5 + 6 | 329586 | 0.52 | 30031 |
| 5 + 6 | 329804 | 0.41 | 30032 |
| 5 + 6 | 329414 | 0.40 | 15637 |
| 5 + 6 | 329415 | 0.43 | 15733 |
| 5 + 6 | 329416 | 0.42 | 17098 |
| 5 + 6 | 329417 | 0.29 | 18562 |
| 5 + 6 | 329418 | 0.35 | 18789 |
| 5 + 6 | 329419 | 0.32 | 25072 |
| 5 + 6 | 329420 | 0.26 | 20 |
| 5 + 6 | 329421 | 0.80 | 21 |
| 5 + 6 | 329422 | 0.38 | 29831 |
| 5 + 6 | 329423 | 0.35 | 29832 |
| 5 + 6 | 329520 | 0.38 | 28180 |
| 5 + 6 | 329521 | 0.32 | 29128 |
| 5 + 6 | 329522 | 0.36 | 29487 |
| 5 + 6 | 329523 | 0.51 | 29523 |
| 5 + 6 | 329524 | 0.30 | 13396 |
| 5 + 6 | 329525 | 0.29 | 13404 |
| 5 + 6 | 329526 | 0.39 | 13411 |
| 5 + 6 | 329527 | 0.52 | 13415 |
| 5 + 6 | 329528 | 0.49 | 13445 |
| 5 + 6 | 329529 | 0.43 | 13464 |
| 5 + 6 | 329540 | 0.61 | 20 |
| 5 + 6 | 329541 | 0.60 | 21 |
| 5 + 6 | 329542 | 0.31 | 29831 |
| 5 + 6 | 329543 | 0.40 | 29832 |
| 5 + 6 | 329544 | 0.30 | 28104 |
| 5 + 6 | 329561 | 0.43 | 29971 |
| 5 + 6 | 329562 | 0.28 | 29972 |
| 5 + 6 | 329563 | 0.40 | 29973 |
| 5 + 6 | 329564 | 0.27 | 29974 |
| 5 + 6 | 329565 | 0.30 | 29975 |
| 5 + 6 | 329566 | 0.46 | 29976 |
| 5 + 6 | 329567 | 0.33 | 29977 |
| 5 + 6 | 329568 | 0.43 | 29978 |
| 5 + 6 | 329569 | 0.39 | 29979 |
| 5 + 6 | 329570 | 0.30 | 29980 |
| 5 + 6 | 329571 | 0.39 | 29981 |
| 5 + 6 | 329572 | 0.29 | 29982 |
| 5 + 6 | 329573 | 0.35 | 29983 |
| 5 + 6 | 329574 | 0.35 | 29984 |
| 5 + 6 | 329575 | 0.38 | 29985 |
| 5 + 6 | 329576 | 0.34 | 29986 |
| 5 + 6 | 329577 | 0.34 | 29987 |
| 5 + 6 | 329578 | 0.28 | 29988 |
| 5 + 6 | 329579 | 0.26 | 29989 |
| 5 + 6 | 329580 | 0.56 | 29990 |
| 5 + 6 | 329581 | 0.33 | 30000 |
| 5 + 6 | 329582 | 0.25 | 30001 |
| 5 + 6 | 329583 | 0.31 | 30002 |
| 5 + 6 | 329584 | 0.40 | 30003 |
| 5 + 6 | 329585 | 0.31 | 30004 |
| 5 + 6 | 334996 | 0.42 | 29908 |
| 5 + 6 | 334998 | 0.36 | 29910 |
| 7 + 8 | Media | 0.99 | N/A |
| 7 + 8 | Media + Virus | 0.70 | N/A |
| 7 + 8 | Cell Control | 1.21 | N/A |
| 7 + 8 | Virus Control | 0.58 | N/A |
| 7 + 8 | 129686 | 0.57 | 30020 |
| 7 + 8 | 129687 | 0.47 | 30021 |
| 7 + 8 | 129688 | 0.44 | 30022 |
| 7 + 8 | 129689 | 0.39 | 30023 |
| 7 + 8 | 129690 | 0.74 | 30024 |
| 7 + 8 | 129691 | 1.04 | 30025 |
| 7 + 8 | 129694 | 0.46 | 30026 |
| 7 + 8 | 129695 | 0.41 | 30027 |
| 7 + 8 | 141923 | 0.31 | 30027 |
| 7 + 8 | 289606 | 0.87 | 30030 |
| 7 + 8 | 329586 | 0.55 | 30031 |
| 7 + 8 | 329804 | 0.52 | 30032 |
| 7 + 8 | 329530 | 0.83 | 13471 |
| 7 + 8 | 329531 | 0.26 | 64 |
| 7 + 8 | 329532 | 0.22 | 21483 |
| 7 + 8 | 329533 | 0.24 | 25257 |
| 7 + 8 | 329534 | 0.21 | 26106 |
| 7 + 8 | 329535 | 0.27 | 26345 |
| 7 + 8 | 329536 | 0.19 | 26910 |
| 7 + 8 | 329537 | 0.29 | 27264 |
| 7 + 8 | 329538 | 0.26 | 27770 |
| 7 + 8 | 329539 | 0.46 | 28103 |
| 7 + 8 | 329545 | 1.03 | 29833 |
| 7 + 8 | 329546 | 0.60 | 13396 |
| 7 + 8 | 329547 | 0.98 | 13404 |
| 7 + 8 | 329548 | 1.00 | 13411 |
| 7 + 8 | 329549 | 0.45 | 13415 |
| 7 + 8 | 329550 | 0.53 | 13445 |
| 7 + 8 | 329551 | 0.68 | 13464 |
| 7 + 8 | 329552 | 0.40 | 13471 |
| 7 + 8 | 329553 | 0.29 | 64 |
| 7 + 8 | 329554 | 0.27 | 21483 |
| 7 + 8 | 329555 | 0.31 | 25257 |
| 7 + 8 | 329556 | 0.42 | 26106 |
| 7 + 8 | 329557 | 0.22 | 26345 |
| 7 + 8 | 329558 | 0.38 | 26910 |
| 7 + 8 | 329559 | 0.30 | 27264 |
| 7 + 8 | 329560 | 0.32 | 27770 |
| 7 + 8 | 330481 | 0.27 | 29991 |
| 7 + 8 | 330482 | 0.33 | 29992 |
| 7 + 8 | 330483 | 0.40 | 29993 |
| 7 + 8 | 330484 | 0.37 | 29994 |
| 7 + 8 | 330485 | 0.35 | 29995 |
| 7 + 8 | 330486 | 0.17 | 29996 |
| 7 + 8 | 330487 | 0.27 | 29997 |
| 7 + 8 | 330488 | 0.27 | 29998 |
| 7 + 8 | 330489 | 0.25 | 29999 |
| 7 + 8 | 330490 | 0.32 | 30005 |
| 7 + 8 | 330491 | 0.36 | 30006 |
| 7 + 8 | 330492 | 0.30 | 30007 |
| 7 + 8 | 330493 | 0.31 | 30008 |
| 7 + 8 | 330494 | 0.23 | 30009 |
| 7 + 8 | 330495 | 0.20 | 30010 |
| 7 + 8 | 330496 | 0.58 | 30011 |
| 7 + 8 | 330497 | 0.40 | 30012 |
| 7 + 8 | 330498 | 0.31 | 30013 |
| 7 + 8 | 330538 | 0.26 | 30048 |
| 7 + 8 | 333040 | 0.39 | 30049 |
| 7 + 8 | 333048 | 0.47 | 30050 |
| 7 + 8 | 333049 | 0.29 | 30051 |
| 7 + 8 | 333054 | 0.34 | 30052 |
| 7 + 8 | 333057 | 0.26 | 30053 |
| 7 + 8 | 334996 | 0.42 | 29908 |
| 7 + 8 | 334998 | 0.36 | 29910 |
| 7 + 8 | 335001 | 0.33 | 29913 |
| 7 + 8 | 335003 | 0.37 | 29915 |
| 7 + 8 | 335005 | 0.32 | 29917 |

[0437] Based on the O.D. as compared to that for cell control and virus control for replicate plates 3 and 4, ISIS 329475, ISIS 329478, ISIS 329480, ISIS 329506, and ISIS 329512 were identified as potential inhibitors of viral activity. For replicate plates 5 and 6, ISIS 329421, ISIS 329540, and ISIS 329541 were identified as potential inhibitors of viral activity. For replicate plates 7 and 8, ISIS 329530, ISIS 329545, ISIS 329547, and ISIS 329548 were identified as potential inhibitors of viral activity.

### Example 26

### Antisense Oligonucleotide Inhibition of SARS Activity in Vero 76 Cells: NR Assay

[0438] Antisense oligonucleotides targeted to SARS were tested for inhibition of SARS activity in an additional assay. Vero cells were transfected with the oligonucleotides as described in Example 22 prior to exposure with the SARS coronavirus Urbani strain 200300592 at a multiplicity of infection of 0.001. A pair of non-infected wells served as controls. The plates were scored visually at 4 days post virus exposure for cytopathic effect (CPE). Medium was removed from each well of a plate that had been scored for CPE, and 0.034% NR was added to each well. After a 2 hour incubation at 37° C. in the dark, the NR solution was removed from the wells, rinsed, and the remaining dye was extracted using ethanol buffered with Sorenson's citrate buffer. Dye uptake was read at absorbances of 540 nm and 450 nm with a microplate reader (Bio-Tek EL 1309; Bio-Tek Instruments, Inc., Winooski, Vt.).

[0439] The absorbance value indicates the amount of NR taken up by the cells. As cells lose viability, they lose the ability to take up NR. Compounds that had absorbance values within 40% of the uninfected control cells were considered potential inhibitors of SARS-CoV.

[0440] Of the compounds tested, 17 oligonucleotides were identified as potential inhibitors of SARS-CoV: ISIS 329437, ISIS 329474, ISIS 329475, ISIS 329481, ISIS 329483, ISIS 329487, ISIS 329488, ISIS 329497, ISIS 329504, ISIS 329505, ISIS 329513, ISIS 329521, ISIS 329540, ISIS 329541, ISIS 329547, ISIS 329550, and ISIS 329551.

### Example 27

### Characterization of a Frameshift Site in the RNA of the SARS Coronavirus

[0441] In accordance with the present invention, a comparative sequence analysis (CSA) method was developed to locate the essential “signature” structures of the RNA that are conserved across species, for drug design and screening. The CSA approach is based on the paradigm that RNAs tend to conserve functionally relevant structures during evolution, and by comparing sequences across different organisms, one can identify the secondary structures that are preserved in spite of alterations in individual bases. RNAs have conserved secondary structures with base-pairing interactions which are more conserved than primary sequences. This is due to the introduction of compensatory mutations to maintain base-pair complementarity. These compensatory mutations can be identified in an iterative process of comparing sequences using a technique called covariance analysis performed on multiple sequence alignments. Most of the well-known RNA structures have been discovered using this method (R. R. Gutell, Curr. Opin. Struct. Biol. 3, 313-322 (1993); R. Durbin, S. Eddy, A. Krogh, G. Mitchison, Biological Sequence Analysis: Probabilistic Models of Proteins and Nucleic Acids (Cambridge University Press, Cambridge, 1998), and the results have been verified by physical methods like crystallography and NMR.

[0442] In order to identify phylogenetically conserved RNA targets in the SARS coronavirus and other coronaviruses, whole genome sequences of coronavirus sequences in GenBank were analyzed. These sequences represent examples of all major groups of this family and include: Transmissible gastroenteritis virus (GenBank accession number NC_{—}002306, incorporated herein as SEQ ID NO:30055); Human coronavirus 229E (GenBank accession number NC_{—}002645, incorporated herein as SEQ ID NO:30056); Porcine epidemic diarrhea virus (GenBank accession number NC_{—}003436, incorporated herein as SEQ ID NO:30057); Avian infectious bronchitis virus (GenBank accession number NC_{—}001451, incorporated herein as SEQ ID NO:30058); SARS coronavirus (GenBank accession number NC_{—}004718, incorporated herein as SEQ ID NO:29752); Murine hepatitis virus (GenBank accession number NC_{—}001846, incorporated herein as SEQ ID NO:30059) and Bovine coronavirus (GenBank accession number NC_{—}003045, incorporated herein as SEQ ID NO:30060). These sequences are shown to contain thymine (T) but one of ordinary skill in the art will appreciate that thymine (T) is generally replaced by uracil (U) in RNA sequences.

[0443] By the iterative process described above, structure-based alignments spanning all of these viruses were generated. One of the well-characterized structures in the coronavirus genome is its pseudoknot-containing frameshift site which is essential for the life cycle of the virus. The results of sequence analysis indicated that the SARS virus has a significant degree of sequence homology with the other coronaviruses that have documented frameshift sites (Figure $). From the sequence comparison it was determined that the component regions of the slippery site and pseudoknot are generally conserved in the alignment. This analysis has verified that the SARS coronavirus contains a pseudoknot motif and frameshift site common to other coronaviruses, which appears to control the expression of the essential RNA-dependent RNA polymerase (RdRp) gene in a similar manner. These characteristics make the SARS coronavirus 1a/1b frameshift site a useful target for drug discovery.

[0444] One with ordinary skill in the art will recognize that characterization of a frameshift site of a virus further enables characterization of sub-segments of the frameshift site which include the slippery site and the pseudoknot. One with ordinary skill in the art will also recognize that characterization of a pseudoknot also enables one to characterize the loops and stems within the pseudoknot.

### Example 28

### Construction of the Plasmid pSARS and in vitro Transcription of SARS RNA Including the Frameshift Site

[0445] In accordance with the present invention, a 79-bp SARS coronavirus DNA construct which includes the frameshift site was constructed by annealing long DNA oligonucleotides (overlapping by 15 base pairs) with subsequent extension by Pfu DNA polymerase to form double-stranded DNA. This fragment was then re-amplified in a PCR reaction with a forward primer that introduced an EcoRi restriction site and T7 RNA polymerase recognized sequences at its 5′ end, and a reverse primer that introduced a HindIII restriction site at its 3′ end. After restriction digestion, the PCR product was cloned into a pUC19 vector which had been previously digested with HindII and EcoRI. The resulting plasmid designated herein as “pSARS” was sequenced to confirm that the desired SARS RNA could be transcribed from the T7 promoter. The plasmid was linearized with HindIII and the T7 MEGAShort™ in vitro transcription assay kit was used to generate a large quantity of RNA according to the manufacturer's procedures. An 85-nt RNA with GG and AGCU flanking the SARS sequence due to the T7 transcription start and the 5′ overhang of the HindII cut on the template strain, showed as a major band (>95% purity) on a 6% denaturing polyacrylamide gel. This RNA band was recovered from the gel and eluted overnight in 2 mM ammonium acetate with incubation at 4° C. The RNA was precipitated with 10 mM ammonium acetate.

### Example 29

### Construction of Reporting Plasmids pSARS1, pSARS2 and pSARS3

[0446] For determination of modulation of frameshifting efficiency (see Example 30) three different frameshift reporting plasmids are required, all of which contain the frameshifting site of the SARS coronavirus fused to the firefly luciferase reporter gene such that the reporter gene is translated only if the 1b reading frame is translated. Thus, if a frameshift from 1a to 1b does not occur, the reporter gene is not translated. The three frameshift reporting plasmids are herein designated pSARS1, pSARS2 and pSARS3. pSARS1 (SEQ ID NO:30061) functions as a positive control, pSARS2 (SEQ ID NO:30062) represents the natural SARS coronavirus frameshifting site and pSARS3 (SEQ ID NO:30063) is employed as a negative control.

[0447] Relative to the natural SARS coronavirus frameshifting site of pSARS2, pSARS1 has a replacement of the sequence TTTTT (beginning 2 nucleotides to the 5′ end of the slippery site) with CTGCTG. This modification results in an RNA whose slippery site is abolished and which is completely translated in the 1b reading frame from the 5′ end of the nucleotide replacements. Thus, a constant “simulated frameshift” occurs and 100% of translated protein contains the luciferase reporter gene.

[0448] Relative to the natural SARS coronavirus frameshifting site of pSARS2, the negative control pSARS3 has a replacement of the sequence TTTTTA (beginning 2 nucleotides to the 5′ end of the slippery site) with CTG. This modification results in an RNA whose slippery site is abolished and which is completely translated in the 1b reading frame from the 5′ end of the nucleotide replacement site. However, in contrast to pSARS1, the replacement of TTTTTA with CTG introduces a stop codon 15 nucleotides downstream from the replacement site. This stop codon prevents the luciferase reporter gene from being translated and thus, the plasmid pSARS3 functions as a negative control.

[0449] Using the 79-bp PCR product from the previous construction of pSARS as template, two consecutive PCR reactions were carried out to extend the expected DNA fragment 21-bp beyond the 5′ of the slippery site and simultaneously introduce restriction cut sites at both ends of the product for cloning. The first round of PCR yielded an intermediate product that had a BamHI site added to the immediate downstream of the SARS 1a/1b pseudoknot but just upstream of a start codon ATG. The ATG on the reverse primer was designed to be in-frame with the SARS 1b gene. From the first amino acid resulting from the frameshift to the methionine encoded by the ATG, there is a 90-bp sequence encoding 30 amino acids that are part of the 1b translation product. The second round of PCR used the product of first round PCR as template. The forward primers bear different sequences for different constructs. In addition, a NheI restriction site was designed at the 5′ end of these forward primers. SARS1_F_NheI was used to generate the DNA fragment for the positive control plasmid pSARS1. SARS2_F_NheI was for the plasmid pSARS2 containing natural slippage sequence and SARS3_F_NheI was for the negative control plasmid pSARS3. Separately, a firefly luciferase gene (F-luc, Promega, Madison, Wis.) was cloned into a commercial vector pcDNA5.1 (Invitrogen, Carlsbad, Calif.) under the control of a T7 promoter. This created plasmid, herein designated pFluc has a NheI site at about 20 nucleotides downstream of the T7 transcription start and a BamHI site immediately upstream of the ATG start codon of the F-luc. The PCR products were digested with NheI and BamHI and cloned into pFluc to generate pSARS1, pSARS2 and pSARS3.

### Example 30

### In vitro Assay of Frameshifting Efficiency of Model RNA of the SARS Coronavirus

[0450] Reporting plasmids (pSARS1, pSARS2 and pSARS3) representing model RNA constructs were linearized with EcoRI and in vitro transcribed to produce a ˜2.1k-nt capped mRNA with a MESSENGER machine kit (Ambion, Austin, Tex). Between the constructs, expression of an active firefly luciferase encoded by the mRNA is solely dependent on the ribosomal slippage mechanism. The mRNAs were purified with a MEGAclear™ kit (Ambion, Austin, Tex) and the concentration was determined from a UV reading. 2 μl RNA and 2 μl H₂O (or compounds) were mixed in a well of a 96 well plate for scintillation counting, 16 μl rabbit reticulocyte lysate was added into the well and incubated for one and half hour at 30° C. 20 μl luciferase substrate (Promega, Madison, Wis.) was added into the reaction and mixed for 1 minute. The light emission (LE) was measured on a Topcounter (Canberra-Packard Company, Meriden, Conn., USA).

[0451] Determination of frameshift efficiency (FSE) is performed as follows:
FSE=(LE of pSARS2−LE of pSARS3)/(LE of pSARS1−LE of pSARS3)×100%
The frameshift efficiency of the frameshifting site of the natural SARS coronavirus was thus found to be 40±4%.

### Example 31

### Modulation of Frameshifting Efficiency of the Model RNA of the SARS Coronavirus by 2′-O-Methoxyethyl Oligonucleotides

[0452] In accordance with the present invention, a series of antisense compounds were designed to target different regions of the frameshift site of the model RNA constructs of the SARS coronavirus (GenBank accession number NC_{—}004718, incorporated herein as SEQ ID NO:16). The compounds are shown in Table 16. “Target site” indicates the first (5′-most) nucleotide number to which the compound binds (with reference to SEQ ID NO:16). The oligonucleotides tested include: ISIS 329721, ISIS 329722, ISIS 329724, ISIS 329727, ISIS 329729, ISIS 329731, ISIS 329550, and ISIS 339289. The negative control oligonucleotide was ISIS 329804. All compounds in Table 16 are uniform 2′-O-methoxyethyl oligonucleotides 20 nucleotides in length. The internucleoside (backbone) linkages are phosphodiester (P═O) throughout the oligonucleotide except for ISIS 329550 in which the internucleoside linkages are phosphorothioate (P═S). All cytidine residues are 5-methylcytidines. The compounds were analyzed for their effect on ribosomal frameshifting of the RNA of coronaviruses as described in Example 30. Standard error is +4%. Percent inhibition provides an indication of the effectiveness of each oligonucleotide in decreasing the frameshift efficiency and is calculated as follows:

TABLE 16
Modulation of Frameshifting Efficiency of RNA of the SARS
Coronavirus by 2′-O-Methoxyethyl Oligonucleotides

| | | | | | % Inhibition |
|---|---|---|---|---|---|
| Oligo | | | Oligo- | Frameshift | of |
| (ISIS | Target | Target | nucleotide | Efficiency | Frameshift |
| No) | Site | Region | Conc. (μM) | (%) | Efficiency |
| 329721 | 13385 | stem 1 up | 50 | 96 | 0 |
| 329721 | 13385 | stem 1 up | 25 | 105 | 0 |
| 329721 | 13385 | stem 1 up | 15 | 109 | 0 |
| 329721 | 13385 | stem 1 up | 10 | 89 | 0 |
| 329721 | 13385 | stem 1 up | 5 | 88 | 0 |
| 329721 | 13385 | stem 1 up | 0.5 | 69 | 0 |
| 329721 | 13385 | stem 1 up | 0.02 | 52 | 0 |
| 329721 | 13385 | stem 1 up | 0.002 | 55 | 0 |
| 329722 | 13392 | loop 1 | 160 | 4 | 91 |
| 329722 | 13392 | loop 1 | 20 | 13 | 66 |
| 329722 | 13392 | loop 1 | 15 | 13 | 67 |
| 329722 | 13392 | loop 1 | 10 | 13 | 68 |
| 329722 | 13392 | loop 1 | 5 | 18 | 55 |
| 329722 | 13392 | loop 1 | 0.2 | 45 | 0 |
| 329722 | 13392 | loop 1 | 0.02 | 47 | 0 |
| 329722 | 13392 | loop 1 | 0.002 | 52 | 0 |
| 329724 | 13396 | stem 2 down | 70 | 8 | 67 |
| 329724 | 13396 | stem 2 down | 20 | 9 | 66 |
| 329724 | 13396 | stem 2 down | 10 | 10 | 61 |
| 329724 | 13396 | stem 2 down | 5 | 15 | 44 |
| 329724 | 13396 | stem 2 down | 1 | 22 | 15 |
| 329724 | 13396 | stem 2 down | 0.2 | 25 | 4 |
| 329724 | 13396 | stem 2 down | 0.02 | 28 | 0 |
| 329724 | 13396 | stem 2 down | 0.002 | 26 | 1 |
| 329727 | 13426 | loop 2 | 58 | 8 | 69 |
| 329727 | 13426 | loop 2 | 20 | 7 | 71 |
| 329727 | 13426 | loop 2 | 15 | 10 | 60 |
| 329727 | 13426 | loop 2 | 10 | 13 | 52 |
| 329727 | 13426 | loop 2 | 5 | 13 | 51 |
| 329727 | 13426 | loop 2 | 0.2 | 27 | 0 |
| 329727 | 13426 | loop 2 | 0.02 | 29 | 0 |
| 329727 | 13426 | loop 2 | 0.002 | 27 | 0 |
| 339289 | 13441 | stem 2 up | 5 | 0 | 100 |
| 339289 | 13441 | stem 2 up | 2 | 0 | 98 |
| 339289 | 13441 | stem 2 up | 1 | 2 | 92 |
| 339289 | 13441 | stem 2 up | 0.8 | 3 | 86 |
| 339289 | 13441 | stem 2 up | 0.4 | 6 | 73 |
| 339289 | 13441 | stem 2 up | 0.3 | 6 | 73 |
| 339289 | 13441 | stem 2 up | 0.2 | 9 | 61 |
| 339289 | 13441 | stem 2 up | 0.1 | 14 | 35 |
| 339289 | 13441 | stem 2 up | 0.05 | 20 | 9 |
| 339289 | 13441 | stem 2 up | 0.01 | 20 | 8 |
| 329729 | 13445 | stem 2 up | 5 | 2 | 96 |
| 329729 | 13445 | stem 2 up | 1 | 8 | 81 |
| 329729 | 13445 | stem 2 up | 0.5 | 13 | 66 |
| 329729 | 13445 | stem 2 up | 0.2 | 20 | 50 |
| 329729 | 13445 | stem 2 up | 0.1 | 34 | 16 |
| 329729 | 13445 | stem 2 up | 0.01 | 40 | 1 |
| 329729 | 13445 | stem 2 up | 0.001 | 41 | 0 |
| 329731 | 13452 | stem 2 up | 33.8 | 0 | 100 |
| 329731 | 13452 | stem 2 up | 25 | 2 | 93 |
| 329731 | 13452 | stem 2 up | 15 | 6 | 76 |
| 329731 | 13452 | stem 2 up | 10 | 12 | 53 |
| 329731 | 13452 | stem 2 up | 5 | 12 | 54 |
| 329731 | 13452 | stem 2 up | 1 | 18 | 30 |
| 329731 | 13452 | stem 2 up | 0.02 | 22 | 15 |
| 329731 | 13452 | stem 2 up | 0.002 | 21 | 19 |
| 329550 | 13445 | stem 2 up | 28 | 1 | 96 |
| 329550 | 13445 | stem 2 up | 14 | 0 | 99 |
| 329550 | 13445 | stem 2 up | 2.8 | 3 | 91 |
| 329550 | 13445 | stem 2 up | 1.4 | 4 | 85 |
| 329550 | 13445 | stem 2 up | 0.7 | 6 | 79 |
| 329550 | 13445 | stem 2 up | 0.14 | 18 | 37 |
| 329550 | 13445 | stem 2 up | 0.014 | 30 | 0 |
| 329550 | 13445 | stem 2 up | 0.0014 | 28 | 0 |
| 329804 | — | control | 39.5 | 46 | 0 |
| 329804 | — | control | 25 | 58 | 0 |
| 329804 | — | control | 15 | 49 | 0 |
| 329804 | — | control | 10 | 34 | 15 |
| 329804 | — | control | 5 | 34 | 15 |
| 329804 | — | control | 0.2 | 39 | 3 |
| 329804 | — | control | 0.02 | 41 | 0 |

[0453] As indicated in Table 16, the control oligonucleotide ISIS 329804 had a minimal effect on frameshift efficiency. Measurements of frameshift inhibition at 10 and 5 μM oligonucleotide were only slightly greater than experimental error while at other concentrations of oligonucleotide, frameshift inhibition was not observed at all.

[0454] Oligonucleotides 329722, 329724, 329727, 329550 and 329731 were effective at inhibiting frameshift efficiency at oligonucleotide concentrations ranging from 25-5 μM where IC50 values are estimated to be in the 10-5 μM within experimental error.

[0455] Oligonucleotides 329729 and 339289 were even more effective at inhibiting frameshift efficiency, having an IC50 value of 0.2 μM and 0.15 μM respectively.

[0456] Oligonucleotide 329721 had the effect of increasing the frameshift efficiency.

[0457] The foregoing example indicates that oligonucleotides are effective at both decreasing and increasing the frameshift efficiency of a ribosomal frameshift site of viral RNA.

[0458] Various modifications of the invention, in addition to those described herein, will be apparent to those skilled in the art from the foregoing description. Such modifications are also intended to fall within the scope of the appended claims. Each of the patents, applications, printed publications, and other published documents mentioned or referred to in this specification are herein incorporated by reference in their entirety. Those skilled in the art will appreciate that numerous changes and modifications may be made to the embodiments of the invention and that such changes and modifications may be made without departing from the spirit of the invention. It is therefore intended that the appended claims cover all such equivalent variations as fall within the true spirit and scope of the invention.

1. An oligomeric compound comprising from 8 to about 80 nucleobases targeted to a nucleic acid molecule encoding severe acute respiratory syndrome (SARS) virus, wherein the compound hybridizes with the nucleic acid molecule encoding SARS virus and reduces the expression of SARS virus by at least 50%.

2. A compound of claim 1 comprising from 12 to about 50 nucleobases.

3. A compound of claim 2 comprising from 15 to about 30 nucleobases.

4. A compound of claim 1 which is an oligonucleotide.

5. A compound of claim 4 which is an antisense oligonucleotide.

6. A compound of claim 4 which is a DNA oligonucleotide.

7. A compound of claim 4 which is an RNA oligonucleotide.

8. A compound of claim 4 which is a chimeric oligonucleotide.

9. A compound of claim 4 wherein at least a portion of the compound hybridizes with RNA to form an oligonucleotide-RNA duplex.

10. A compound of claim 1 having at least 70% complementarity with the nucleic acid molecule encoding SARS virus.

11. A compound of claim 1 having at least 80% complementarity with the nucleic acid molecule encoding SARS virus.

12. A compound of claim 1 having at least 90% complementarity with the nucleic acid molecule encoding SARS virus.

13. A compound of claim 1 having at least 95% complementarity with the nucleic acid molecule encoding SARS virus.

14. A compound of claim 1 having at least one modified internucleoside linkage, modified sugar moiety, or modified nucleobase.

15. A compound of claim 14 having at least one 2′-O-methoxyethyl sugar moiety.

16. A compound of claim 14 having at least one phosphorothioate internucleoside linkage.

17. A compound of claim 1 having at least one 5-methylcytosine.

18. A method of reducing the expression of a SARS virus in cells or tissues comprising contacting the cells or tissues with a compound of claim 1 so that expression of SARS virus is reduced.

19. A method of screening for a modulator of a SARS virus comprising:
a) contacting a suitable target region of a nucleic acid molecule encoding a SARS virus with one or more candidate modulators of SARS virus; and
b) identifying one or more modulators of SARS virus expression that modulate the expression of the SARS virus.

20. A method of claim 19 wherein the modulator of SARS virus expression comprises an oligonucleotide, an antisense oligonucleotide, a DNA oligonucleotide, an RNA oligonucleotide, a chimeric oligonucleotide, or an RNA oligonucleotide having at least a portion that is hybridizable with RNA to form an oligonucleotide-RNA duplex.

21. A diagnostic method for identifying a disease state comprising identifying the presence of a SARS virus in a sample using at least one primer.

22. A kit or assay device comprising the compound of claim 1.

23. A method of treating an animal having a disease or condition associated with a SARS virus comprising administering to the animal a therapeutically or prophylactically effective amount of the compound of claim 1 so that expression of SARS virus is reduced.

24. A method of claim 23 wherein the disease or condition is a viral infection.

25. A compound 8 to 80 nucleobases in length targeted to a frameshift site of viral RNA, wherein the compound specifically hybridizes with the frameshift site and modulates the process of ribosomal frameshifting of the viral RNA.

26. The compound of claim 25 comprising 8 to 50 nucleobases in length.

27. The compound of claim 26 comprising 8 to 30 nucleobases in length.

28. The compound of claim 25 comprising an oligonucleotide.

29. The compound of claim 28 comprising an antisense oligonucleotide.

30. The compound of claim 28 comprising a DNA oligonucleotide.

31. The compound of claim 28 comprising an RNA oligonucleotide.

32. The compound of claim 28 comprising a chimeric oligonucleotide.

33. The compound of claim 28 wherein at least a portion of said compound hybridizes with RNA to form an oligonucleotide-RNA duplex.

34. The compound of claim 25 having at least 70% complementarity with the frameshift site of viral RNA, the compound specifically hybridizing to the frameshift site and modulating the function of the frameshift site.

35. The compound of claim 25 having at least 80% complementarity with the frameshift site of viral RNA, the compound specifically hybridizing to the frameshift site and modulating the function of the frameshift site.

36. The compound of claim 25 having at least 90% complementarity with the frameshifting site of viral RNA, the compound specifically hybridizing to the frameshift site and modulating the function of the frameshift site.

37. The compound of claim 25 having at least 95% complementarity with the frameshift site of viral RNA, the compound specifically hybridizing to the frameshift site and modulating the function of the frameshift site.

38. The compound of claim 25 having at least one modified internucleoside linkage, sugar moiety, or nucleobase.

39. The compound of claim 25 having at least one 2′-O-methoxyethyl sugar moiety.

40. The compound of claim 25 having at least one phosphodiester internucleoside linkage.

41. The compound of claim 25 having at least one 5-methylcytosine.

42. A method of modulating the frameshift efficiency of a coronavirus comprising contacting the coronavirus with a compound of claim 25 so that frameshifting efficiency of the coronavirus is modulated.

43. A method of screening for a modulator of a frameshift site comprising:
a) contacting a target segment of a frameshift site with one or more candidate modulators of the frameshift site; and
b) measuring the extent of frameshift modulation.

44. The method of claim 43 wherein the modulator of the frameshift site comprises an oligonucleotide, an antisense oligonucleotide, a DNA oligonucleotide, an RNA oligonucleotide, an RNA oligonucleotide having at least a portion of the RNA oligonucleotide capable of hybridizing with RNA to form an oligonucleotide-RNA duplex, or a chimeric oligonucleotide.

45. A kit or assay device comprising the compound of claim 25.

46. A method of treating an individual having a disease or condition associated with a coronavirus comprising administering to the individual a therapeutically or prophylactically effective amount of the compound of claim 25 so that the propagation of the coronavirus is inhibited as a result of modulation of the frameshift site of said coronavirus.

47. A ribosomal frameshift reporting plasmid comprising a viral sequence containing a ribosomal frameshift site and a luciferase reporter gene.

48. The ribosomal frameshift reporting plasmid of claim 47 wherein the viral sequence is of a coronavirus.

49. The ribosomal frameshift reporting plasmid of claim 48 wherein the coronavirus is the SARS coronavirus.

50. The ribosomal frameshift reporting plasmid of claim 49 having a sequence of SEQ ID NOs: 8, 9 or 10.

51. A method of characterization of a previously uncharacterized frameshift site in a coronavirus RNA comprising:
a) obtaining RNA sequences of known coronaviruses with known frameshift sites;
b) obtaining an RNA sequence of a coronavirus with an uncharacterized frameshift site; and
c) performing covariance analysis on multiple sequence alignments of the RNA sequences of known coronaviruses and the RNA sequence of the coronavirus with an uncharacterized frameshift site.

52. The method of claim 51 wherein characterization of the frameshift site comprises identification of a slippery site.

53. The method of claim 51 wherein characterization of the frameshift site comprises identification of a pseudoknot site.

54. The method of claim 53 wherein the stems and loops of the pseudoknot are characterized.

The application's sequence listing, which the Patent Office published only in electronic form, follows.

SEQUENCE LISTING (30063 sequences)

SEQ ID NO: 1 - DNA, 19 bp, Artificial Sequence
  Antisense compound
cgagaggcggacgggaccg

SEQ ID NO: 2 - DNA, 21 bp, Artificial Sequence
  misc_feature 1-19: oligonucleotide duplex; bases at designated positions are in ribonucleotides.
cgagaggcggacgggaccgtt

SEQ ID NO: 3 - DNA, 21 bp, Artificial Sequence
  misc_feature 1-19: oligonucleotide duplex; bases at designated positions are in ribonucleotides.
uugcucuccgccugcccuggc

SEQ ID NO: 4 - protein, 11 aa, Artificial Sequence
  Peptide motif
LQLPPLERLTL

SEQ ID NO: 5 - protein, 11 aa, Artificial Sequence
  Peptide motif
DLQKKLEELEL

SEQ ID NO: 6 - protein, 11 aa, Artificial Sequence
  Peptide motif
ELALKLAGLDI

SEQ ID NO: 7 - protein, 12 aa, Artificial Sequence
  Peptide motif
ALPHAIMRLDLA

SEQ ID NO: 8 - protein, 4 aa, Artificial Sequence
  Peptide motif
KDEL

SEQ ID NO: 9 - protein, 15 aa, Artificial Sequence
  Peptide motif
PQRRNRSRRRRFRGQ

SEQ ID NO: 10 - protein, 7 aa, Artificial Sequence
  Peptide motif
IMRRRGL

SEQ ID NO: 11 - protein, 10 aa, Artificial Sequence
  Peptide motif
GRKKRRQRRR

SEQ ID NO: 12 - protein, 13 aa, Artificial Sequence
  Peptide motif
ALWKTLLKKVLKA

SEQ ID NO: 13 - DNA, 20 bp, Artificial Sequence
  Antisense compound
tccgtcatcgctcctcaggg

SEQ ID NO: 14 - DNA, 20 bp, Artificial Sequence
  Antisense compound
gtgcgcgcgagcccgaaatc

SEQ ID NO: 15 - DNA, 20 bp, Artificial Sequence
  Antisense compound
atgcattctgcccccaagga

SEQ ID NO: 16 - DNA, 29736 bp, Artificial Sequence
  Antisense compound
ctacccaggaaaagccaaccaacctcgatctcttgtagatctgttctctaaacgaactttaaaatctgtgtagctgtcgctcggctgcatgcctagtgcacctacgcagtataaacaataataaattttactgtcgttgacaagaaacgagtaactcgtccctcttctgcagactgcttacggtttcgtccgtgttgcagtcgatcatcagcatacctaggtttcgtccgggtgtgaccgaaaggtaagatggagagccttgttcttggtgtcaacgagaaaacacacgtccaactcagtttgcctgtccttcaggttagagacgtgctagtgcgtggcttcggggactctgtggaagaggccctatcggaggcacgtgaacacctcaaaaatggcacttgtggtctagtagagctggaaaaaggcgtactgccccagcttgaacagccctatgtgttcattaaacgttctgatgccttaagcaccaatcacggccacaaggtcgttgagctggttgcagaaatggacggcattcagtacggtcgtagcggtataacactgggagtactcgtgccacatgtgggcgaaaccccaattgcataccgcaatgttcttcttcgtaagaacggtaataagggagccggtggtcatagctatggcatcgatctaaagtcttatgacttaggtgacgagcttggcactgatcccattgaagattatgaacaaaactggaacactaagcatggcagtggtgcactccgtgaactcactcgtgagctcaatggaggtgcagtcactcgctatgtcgacaacaatttctgtggcccagatgggtaccctcttgattgcatcaaagattttctcgcacgcgcgggcaagtcaatgtgcactctttccgaacaacttgattacatcgagtcgaagagaggtgtctactgctgccgtgaccatgagcatgaaattgcctggttcactgagcgctctgataagagctacgagcaccagacacccttcgaaattaagagtgccaagaaatttgacactttcaaaggggaatgcccaaagtttgtgtttcctcttaactcaaaagtcaaagtcattcaaccacgtgttgaaaagaaaaagactgagggtttcatggggcgtatacgctctgtgtaccctgttgcatctccacaggagtgtaacaatatgcacttgtctaccttgatgaaatgtaatcattgcgatgaagtttcatggcagacgtgcgactttctgaaagccacttgtgaacattgtggcactgaaaatttagttattgaaggacctactacatgtgggtacctacctactaatgctgtagtgaaaatgccatgtcctgcctgtcaagacccagagattggacctgagcatagtgttgcagattatcacaaccactcaaacattgaaactcgactccgcaagggaggtaggactagatgttttggaggctgtgtgtttgcctatgttggctgctataataagcgtgcctactgggttcctcgtgctagtgctgatattggctcaggccatactggcattactggtgacaatgtggagaccttgaatgaggatctccttgagatactgagtcgtgaacgtgttaacattaacattgttggcgattttcatttgaatgaagaggttgccatcattttggcatctttctctgcttctacaagtgcctttattgacactataaagagtcttgattacaagtctttcaaaaccattgttgagtcctgcggtaactataaagttaccaagggaaagcccgtaaaaggtgcttggaacattggacaacagagatcagttttaacaccactgtgtggttttccctcacaggctgctggtgttatcagatcaatttttgcgcgcacacttgatgcagcaaaccactcaattcctgatttgcaaagagcagctgtcaccatacttgatggtatttctgaacagtcattacgtcttgtcgacgccatggtttatacttcagacctgctcaccaacagtgtcattattatggcatatgtaactggtggtcttgtacaacagacttctcagtggttgtctaatcttttgggcactactgttgaaaaactcaggcctatctttgaatggattgaggcgaaacttagtgcaggagttgaatttctcaaggatgcttgggagattctcaaatttctcattacaggtgtttttgacatcgtcaagggtcaaatacaggttgcttcagataacatcaaggattgtgtaaaatgcttcattgatgttgttaacaaggcactcgaaatgtgcattgatcaagtcactatcgctggcgcaaagttgcgatcactcaacttaggtgaagtcttcatcgctcaaagcaagggactttaccgtcagtgtatacgtggcaaggagcagctgcaactactcatgcctcttaaggcaccaaaagaagtaacctttcttgaaggtgattcacatgacacagtacttacctctgaggaggttgttctcaagaacggtgaactcgaagcactcgagacgcccgttgatagcttcacaaatggagctatcgtcggcacaccagtctgtgtaaatggcctcatgctcttagagattaaggacaaagaacaatactgcgcattgtctcctggtttactggctacaaacaatgtctttcgcttaaaagggggtgcaccaattaaaggtgtaacctttggagaagatactgtttgggaagttcaaggttacaagaatgtgagaatcacatttgagcttgatgaacgtgttgacaaagtgcttaatgaaaagtgctctgtctacactgttgaatccggtaccgaagttactgagtttgcatgtgttgtagcagaggctgttgtgaagactttacaaccagtttctgatctccttaccaacatgggtattgatcttgatgagtggagtgtagctacattctacttatttgatgatgctggtgaagaaaacttttcatcacgtatgtattgttccttttaccctccagatgaggaagaagaggacgatgcagagtgtgaggaagaagaaattgatgaaacctgtgaacatgagtacggtacagaggatgattatcaaggtctccctctggaatttggtgcctcagctgaaacagttcgagttgaggaagaagaagaggaagactggctggatgatactactgagcaatcagagattgagccagaaccagaacctacacctgaagaaccagttaatcagtttactggttatttaaaacttactgacaatgttgccattaaatgtgttgacatcgttaaggaggcacaaagtgctaatcctatggtgattgtaaatgctgctaacatacacctgaaacatggtggtggtgtagcaggtgcactcaacaaggcaaccaatggtgccatgcaaaaggagagtgatgattacattaagctaaatggccctcttacagtaggagggtcttgtttgctttctggacataatcttgctaagaagtgtctgcatgttgttggacctaacctaaatgcaggtgaggacatccagcttcttaaggcagcatatgaaaatttcaattcacaggacatcttacttgcaccattgttgtcagcaggcatatttggtgctaaaccacttcagtctttacaagtgtgcgtgcagacggttcgtacacaggtttatattgcagtcaatgacaaagctctttatgagcaggttgtcatggattatcttgataacctgaagcctagagtggaagcacctaaacaagaggagccaccaaacacagaagattccaaaactgaggagaaatctgtcgtacagaagcctgtcgatgtgaagccaaaaattaaggcctgcattgatgaggttaccacaacactggaagaaactaagtttcttaccaataagttactcttgtttgctgatatcaatggtaagctttaccatgattctcagaacatgcttagaggtgaagatatgtctttccttgagaaggatgcaccttacatggtaggtgatgttatcactagtggtgatatcacttgtgttgtaataccctccaaaaaggctggtggcactactgagatgctctcaagagctttgaagaaagtgccagttgatgagtatataaccacgtaccctggacaaggatgtgctggttatacacttgaggaagctaagactgctcttaagaaatgcaaatctgcattttatgtactaccttcagaagcacctaatgctaaggaagagattctaggaactgtatcctggaatttgagagaaatgcttgctcatgctgaagagacaagaaaattaatgcctatatgcatggatgttagagccataatggcaaccatccaacgtaagtataaaggaattaaaattcaagagggcatcgttgactatggtgtccgattcttcttttatactagtaaagagcctgtagcttctattattacgaagctgaactctctaaatgagccgcttgtcacaatgccaattggttatgtgacacatggttttaatcttgaagaggctgcgcgctgtatgcgttctcttaaagctcctgccgtagtgtcagtatcatcaccagatgctgttactacatataatggatacctcacttcgtcatcaaagacatctgaggagcactttgtagaaacagtttctttggctggctcttacagagattggtcctattcaggacagcgtacagagttaggtgttgaatttcttaagcgtggtgacaaaattgtgtaccacactctggagagccccgtcgagtttcatcttgacggtgaggttctttcacttgacaaactaaagagtctcttatccctgcgggaggttaagactataaaagtgttcacaactgtggacaacactaatctccacacacagcttgtggatatgtctatgacatatggacagcagtttggtccaacatacttggatggtgctgatgttacaaaaattaaacctcatgtaaatcatgagggtaagactttctttgtactacctagtgatgacacactacgtagtgaagctttcgagtactaccatactcttgatgagagttttcttggtaggtacatgtctgctttaaaccacacaaagaaatggaaatttcctcaagttggtggtttaacttcaattaaatgggctgataacaattgttatttgtctagtgttttattagcacttcaacagcttgaagtcaaattcaatgcaccagcacttcaagaggcttattatagagcccgtgctggtgatgctgctaacttttgtgcactcatactcgcttacagtaataaaactgttggcgagcttggtgatgtcagagaaactatgacccatcttctacagcatgctaatttggaatctgcaaagcgagttcttaatgtggtgtgtaaacattgtggtcagaaaactactaccttaacgggtgtagaagctgtgatgtatatgggtactctatcttatgataatcttaagacaggtgtttccattccatgtgtgtgtggtcgtgatgctacacaatatctagtacaacaagagtcttcttttgttatgatgtctgcaccacctgctgagtataaattacagcaaggtacattcttatgtgcgaatgagtacactggtaactatcagtgtggtcattacactcatataactgctaaggagaccctctatcgtattgacggagctcaccttacaaagatgtcagagtacaaaggaccagtgactgatgttttctacaaggaaacatcttacactacaaccatcaagcctgtgtcgtataaactcgatggagttacttacacagagattgaaccaaaattggatgggtattataaaaaggataatgcttactatacagagcagcctatagaccttgtaccaactcaaccattaccaaatgcgagttttgataatttcaaactcacatgttctaacacaaaatttgctgatgatttaaatcaaatgacaggcttcacaaagccagcttcacgagagctatctgtcacattcttcccagacttgaatggcgatgtagtggctattgactatagacactattcagcgagtttcaagaaaggtgctaaattactgcataagccaattgtttggcacattaaccaggctacaaccaagacaacgttcaaaccaaacacttggtgtttacgttgtctttggagtacaaagccagtagatacttcaaattcatttgaagttctggcagtagaagacacacaaggaatggacaatcttgcttgtgaaagtcaacaacccacctctgaagaagtagtggaaaatcctaccatacagaaggaagtcatagagtgtgacgtgaaaactaccgaagttgtaggcaatgtcatacttaaaccatcagatgaaggtgttaaagtaacacaagagttaggtcatgaggatcttatggctgcttatgtggaaaacacaagcattaccattaagaaacctaatgagctttcactagccttaggtttaaaaacaattgccactcatggtattgctgcaattaatagtgttccttggagtaaaattttggcttatgtcaaaccattcttaggacaagcagcaattacaacatcaaattgcgctaagagattagcacaacgtgtgtttaacaattatatgccttatgtgtttacattattgttccaattgtgtacttttactaaaagtaccaattctagaattagagcttcactacctacaactattgctaaaaatagtgttaagagtgttgctaaattatgtttggatgccggcattaattatgtgaagtcacccaaattttctaaattgttcacaatcgctatgtggctattgttgttaagtatttgcttaggttctctaatctgtgtaactgctgcttttggtgtactcttatctaattttggtgctccttcttattgtaatggcgttagagaattgtatcttaattcgtctaacgttactactatggatttctgtgaaggttcttttccttgcagcatttgtttaagtggattagactcccttgattcttatccagctcttgaaaccattcaggtgacgatttcatcgtacaagctagacttgacaattttaggtctggccgctgagtgggttttggcatatatgttgttcacaaaattcttttatttattaggtctttcagctataatgcaggtgttctttggctattttgctagtcatttcatcagcaattcttggctcatgtggtttatcattagtattgtacaaatggcacccgtttctgcaatggttaggatgtacatcttctttgcttctttctactacatatggaagagctatgttcatatcatggatggttgcacctcttcgacttgcatgatgtgctataagcgcaatcgtgccacacgcgttgagtgtacaactattgttaatggcatgaagagatctttctatgtctatgcaaatggaggccgtggcttctgcaagactcacaattggaattgtctcaattgtgacacattttgcactggtagtacattcattagtgatgaagttgctcgtgatttgtcactccagtttaaaagaccaatcaaccctactgaccagtcatcgtatattgttgatagtgttgctgtgaaaaatggcgcgcttcacctctactttgacaaggctggtcaaaagacctatgagagacatccgctctcccattttgtcaatttagacaatttgagagctaacaacactaaaggttcactgcctattaatgtcatagtttttgatggcaagtccaaatgcgacgagtctgcttctaagtctgcttctgtgtactacagtcagctgatgtgccaacctattctgttgcttgaccaagctcttgtatcagacgttggagatagtactgaagtttccgttaagatgtttgatgcttatgtcgacaccttttcagcaacttttagtgttcctatggaaaaacttaaggcacttgttgctacagctcacagcgagttagcaaagggtgtagctttagatggtgtcctttctacattcgtgtcagctgcccgacaaggtgttgttgataccgatgttgacacaaaggatgttattgaatgtctcaaactttcacatcactctgacttagaagtgacaggtgacagttgtaacaatttcatgctcacctataataaggttgaaaacatgacgcccagagatcttggcgcatgtattgactgtaatgcaaggcatatcaatgcccaagtagcaaaaagtcacaatgtttcactcatctggaatgtaaaagactacatgtctttatctgaacagctgcgtaaacaaattcgtagtgctgccaagaagaacaacataccttttagactaacttgtgctacaactagacaggttgtcaatgtcataactactaaaatctcactcaagggtggtaagattgttagtacttgttttaaacttatgcttaaggccacattattgtgcgttcttgctgcattggtttgttatatcgttatgccagtacatacattgtcaatccatgatggttacacaaatgaaatcattggttacaaagccattcaggatggtgtcactcgtgacatcatttctactgatgattgttttgcaaataaacatgctggttttgacgcatggtttagccagcgtggtggttcatacaaaaatgacaaaagctgccctgtagtagctgctatcattacaagagagattggtttcatagtgcctggcttaccgggtactgtgctgagagcaatcaatggtgacttcttgcattttctacctcgtgtttttagtgctgttggcaacatttgctacacaccttccaaactcattgagtatagtgattttgctacctctgcttgcgttcttgctgctgagtgtacaatttttaaggatgctatgggcaaacctgtgccatattgttatgacactaatttgctagagggttctatttcttatagtgagcttcgtccagacactcgttatgtgcttatggatggttccatcatacagtttcctaacacttacctggagggttctgttagagtagtaacaacttttgatgctgagtactgtagacatggtacatgcgaaaggtcagaagtaggtatttgcctatctaccagtggtagatgggttcttaataatgagcattacagagctctatcaggagttttctgtggtgttgatgcgatgaatctcatagctaacatctttactcctcttgtgcaacctgtgggtgctttagatgtgtctgcttcagtagtggctggtggtattattgccatattggtgacttgtgctgcctactactttatgaaattcagacgtgtttttggtgagtacaaccatgttgttgctgctaatgcacttttgtttttgatgtctttcactatactctgtctggtaccagcttacagctttctgccgggagtctactcagtcttttacttgtacttgacattctatttcaccaatgatgtttcattcttggctcaccttcaatggtttgccatgttttctcctattgtgcctttttggataacagcaatctatgtattctgtatttctctgaagcactgccattggttctttaacaactatcttaggaaaagagtcatgtttaatggagttacatttagtaccttcgaggaggctgctttgtgtacctttttgctcaacaaggaaatgtacctaaaattgcgtagcgagacactgttgccacttacacagtataacaggtatcttgctctatataacaagtacaagtatttcagtggagccttagatactaccagctatcgtgaagcagcttgctgccacttagcaaaggctctaaatgactttagcaactcaggtgctgatgttctctaccaaccaccacagacatcaatcacttctgctgttctgcagagtggttttaggaaaatggcattcccgtcaggcaaagttgaagggtgcatggtacaagtaacctgtggaactacaactcttaatggattgtggttggatgacacagtatactgtccaagacatgtcatttgcacagcagaagacatgcttaatcctaactatgaagatctgctcattcgcaaatccaaccatagctttcttgttcaggctggcaatgttcaacttcgtgttattggccattctatgcaaaattgtctgcttaggcttaaagttgatacttctaaccctaagacacccaagtataaatttgtccgtatccaacctggtcaaacattttcagttctagcatgctacaatggttcaccatctggtgtttatcagtgtgccatgagacctaatcataccattaaaggttctttccttaatggatcatgtggtagtgttggttttaacattgattatgattgcgtgtctttctgctatatgcatcatatggagcttccaacaggagtacacgctggtactgacttagaaggtaaattctatggtccatttgttgacagacaaactgcacaggctgcaggtacagacacaaccataacattaaatgttttggcatggctgtatgctgctgttatcaatggtgataggtggtttcttaatagattcaccactactttgaatgactttaaccttgtggcaatgaagtacaactatgaacctttgacacaagatcatgttgacatattgggacctctttctgctcaaacaggaattgccgtcttagatatgtgtgctgctttgaaagagctgctgcagaatggtatgaatggtcgtactatccttggtagcactattttagaagatgagtttacaccatttgatgttgttagacaatgctctggtgttaccttccaaggtaagttcaagaaaattgttaagggcactcatcattggatgcttttaactttcttgacatcactattgattcttgttcaaagtacacagtggtcactgtttttctttgtttacgagaatgctttcttgccatttactcttggtattatggcaattgctgcatgtgctatgctgcttgttaagcataagcacgcattcttgtgcttgtttctgttaccttctcttgcaacagttgcttactttaatatggtctacatgcctgctagctgggtgatgcgtatcatgacatggcttgaattggctgacactagcttgtctggttataggcttaaggattgtgttatgtatgcttcagctttagttttgcttattctcatgacagctcgcactgtttatgatgatgctgctagacgtgtttggacactgatgaatgtcattacacttgtttacaaagtctactatggtaatgctttagatcaagctatttccatgtgggccttagttatttctgtaacctctaactattctggtgtcgttacgactatcatgtttttagctagagctatagtgtttgtgtgtgttgagtattacccattgttatttattactggcaacaccttacagtgtatcatgcttgtttattgtttcttaggctattgttgctgctgctactttggccttttctgtttactcaaccgttacttcaggcttactcttggtgtttatgactacttggtctctacacaagaatttaggtatatgaactcccaggggcttttgcctcctaagagtagtattgatgctttcaagcttaacattaagttgttgggtattggaggtaaaccatgtatcaaggttgctactgtacagtctaaaatgtctgacgtaaagtgcacatctgtggtactgctctcggttcttcaacaacttagagtagagtcatcttctaaattgtgggcacaatgtgtacaactccacaatgatattcttcttgcaaaagacacaactgaagctttcgagaagatggtttctcttttgtctgttttgctatccatgcagggtgctgtagacattaataggttgtgcgaggaaatgctcgataaccgtgctactcttcaggctattgcttcagaatttagttctttaccatcatatgccgcttatgccactgcccaggaggcctatgagcaggctgtagctaatggtgattctgaagtcgttctcaaaaagttaaagaaatctttgaatgtggctaaatctgagtttgaccgtgatgctgccatgcaacgcaagttggaaaagatggcagatcaggctatgacccaaatgtacaaacaggcaagatctgaggacaagagggcaaaagtaactagtgctatgcaaacaatgctcttcactatgcttaggaagcttgataatgatgcacttaacaacattatcaacaatgcgcgtgatggttgtgttccactcaacatcataccattgactacagcagccaaactcatggttgttgtccctgattatggtacctacaagaacacttgtgatggtaacacctttacatatgcatctgcactctgggaaatccagcaagttgttgatgcggatagcaagattgttcaacttagtgaaattaacatggacaattcaccaaatttggcttggcctcttattgttacagctctaagagccaactcagctgttaaactacagaataatgaactgagtccagtagcactacgacagatgtcctgtgcggctggtaccacacaaacagcttgtactgatgacaatgcacttgcctactataacaattcgaagggaggtaggtttgtgctggcattactatcagaccaccaagatctcaaatgggctagattccctaagagtgatggtacaggtacaatttacacagaactggaaccaccttgtaggtttgttacagacacaccaaaagggcctaaagtgaaatacttgtacttcatcaaaggcttaaacaacctaaatagaggtatggtgctgggcagtttagctgctacagtacgtcttcaggctggaaatgctacagaagtacctgccaattcaactgtgctttccttctgtgcttttgcagtagaccctgctaaagcatataaggattacctagcaagtggaggacaaccaatcaccaactgtgtgaagatgttgtgtacacacactggtacaggacaggcaattactgtaacaccagaagctaacatggaccaagagtcctttggtggtgcttcatgttgtctgtattgtagatgccacattgaccatccaaatcctaaaggattctgtgacttgaaaggtaagtacgtccaaatacctaccacttgtgctaatgacccagtgggttttacacttagaaacacagtctgtaccgtctgcggaatgtggaaaggttatggctgtagttgtgaccaactccgcgaacccttgatgcagtctgcggatgcatcaacgtttttaaacgggtttgcggtgtaagtgcagcccgtcttacaccgtgcggcacaggcactagtactgatgtcgtctacagggcttttgatatttacaacgaaaaagttgctggttttgcaaagttcctaaaaactaattgctgtcgcttccaggagaaggatgaggaaggcaatttattagactcttactttgtagttaagaggcatactatgtctaactaccaacatgaagagactatttataacttggttaaagattgtccagcggttgctgtccatgactttttcaagtttagagtagatggtgacatggtaccacatatatcacgtcagcgtctaactaaatacacaatggctgatttagtctatgctctacgtcattttgatgagggtaattgtgatacattaaaagaaatactcgtcacatacaattgctgtgatgatgattatttcaataagaaggattggtatgacttcgtagagaatcctgacatcttacgcgtatatgctaacttaggtgagcgtgtacgccaatcattattaaagactgtacaattctgcgatgctatgcgtgatgcaggcattgtaggcgtactgacattagataatcaggatcttaatgggaactggtacgatttcggtgatttcgtacaagtagcaccaggctgcggagttcctattgtggattcatattactcattgctgatgcccatcctcactttgactagggcattggctgctgagtcccatatggatgctgatctcgcaaaaccacttattaagtgggatttgctgaaatatgattttacggaagagagactttgtctcttcgaccgttattttaaatattgggaccagacataccatcccaattgtattaactgtttggatgataggtgtatccttcattgtgcaaactttaatgtgttattttctactgtgtttccacctacaagttttggaccactagtaagaaaaatatttgtagatggtgttccttttgttgtttcaactggataccattttcgtgagttaggagtcgtacataatcaggatgtaaacttacatagctcgcgtctcagtttcaaggaacttttagtgtatgctgctgatccagctatgcatgcagcttctggcaatttattgctagataaacgcactacatgcttttcagtagctgcactaacaaacaatgttgcttttcaaactgtcaaacccggtaattttaataaagacttttatgactttgctgtgtctaaaggtttctttaaggaaggaagttctgttgaactaaaacacttcttctttgctcaggatggcaacgctgctatcagtgattatgactattatcgttataatctgccaacaatgtgtgatatcagacaactcctattcgtagttgaagttgttgataaatactttgattgttacgatggtggctgtattaatgccaaccaagtaatcgttaacaatctggataaatcagctggtttcccatttaataaatggggtaaggctagactttattatgactcaatgagttatgaggatcaagatgcacttttcgcgtatactaagcgtaatgtcatccctactataactcaaatgaatcttaagtatgccattagtgcaaagaatagagctcgcaccgtagctggtgtctctatctgtagtactatgacaaatagacagtttcatcagaaattattgaagtcaatagccgccactagaggagctactgtggtaattggaacaagcaagttttacggtggctggcataatatgttaaaaactgtttacagtgatgtagaaactccacaccttatgggttgggattatccaaaatgtgacagagccatgcctaacatgcttaggataatggcctctcttgttcttgctcgcaaacataacacttgctgtaacttatcacaccgtttctacaggttagctaacgagtgtgcgcaagtattaagtgagatggtcatgtgtggcggctcactatatgttaaaccaggtggaacatcatccggtgatgctacaactgcttatgctaatagtgtctttaacatttgtcaagctgttacagccaatgtaaatgcacttctttcaactgatggtaataagatagctgacaagtatgtccgcaatctacaacacaggctctatgagtgtctctatagaaatagggatgttgatcatgaattcgtggatgagttttacgcttacctgcgtaaacatttctccatgatgattctttctgatgatgccgttgtgtgctataacagtaactatgcggctcaaggtttagtagctagcattaagaactttaaggcagttctttattatcaaaataatgtgttcatgtctgaggcaaaatgttggactgagactgaccttactaaaggacctcacgaattttgctcacagcatacaatgctagttaaacaaggagatgattacgtgtacctgccttacccagatccatcaagaatattaggcgcaggctgttttgtcgatgatattgtcaaaacagatggtacacttatgattgaaaggttcgtgtcactggctattgatgcttacccacttacaaaacatcctaatcaggagtatgctgatgtctttcacttgtatttacaatacattagaaagttacatgatgagcttactggccacatgttggacatgtattccgtaatgctaactaatgataacacctcacggtactgggaacctgagttttatgaggctatgtacacaccacatacagtcttgcaggctgtaggtgcttgtgtattgtgcaattcacagacttcacttcgttgcggtgcctgtattaggagaccattcctatgttgcaagtgctgctatgaccatgtcatttcaacatcacacaaattagtgttgtctgttaatccctatgtttgcaatgccccaggttgtgatgtcactgatgtgacacaactgtatctaggaggtatgagctattattgcaagtcacataagcctcccattagttttccattatgtgctaatggtcaggtttttggtttatacaaaaacacatgtgtaggcagtgacaatgtcactgacttcaatgcgatagcaacatgtgattggactaatgctggcgattacatacttgccaacacttgtactgagagactcaagcttttcgcagcagaaacgctcaaagccactgaggaaacatttaagctgtcatatggtattgccactgtacgcgaagtactctctgacagagaattgcatctttcatgggaggttggaaaacctagaccaccattgaacagaaactatgtctttactggttaccgtgtaactaaaaatagtaaagtacagattggagagtacacctttgaaaaaggtgactatggtgatgctgttgtgtacagaggtactacgacatacaagttgaatgttggtgattactttgtgttgacatctcacactgtaatgccacttagtgcacctactctagtgccacaagagcactatgtgagaattactggcttgtacccaacactcaacatctcagatgagttttctagcaatgttgcaaattatcaaaaggtcggcatgcaaaagtactctacactccaaggaccacctggtactggtaagagtcattttgccatcggacttgctctctattacccatctgctcgcatagtgtatacggcatgctctcatgcagctgttgatgccctatgtgaaaaggcattaaaatatttgcccatagataaatgtagtagaatcatacctgcgcgtgcgcgcgtagagtgttttgataaattcaaagtgaattcaacactagaacagtatgttttctgcactgtaaatgcattgccagaaacaactgctgacattgtagtctttgatgaaatctctatggctactaattatgacttgagtgttgtcaatgctagacttcgtgcaaaacactacgtctatattggcgatcctgctcaattaccagccccccgcacattgctgactaaaggcacactagaaccagaatattttaattcagtgtgcagacttatgaaaacaataggtccagacatgttccttggaacttgtcgccgttgtcctgctgaaattgttgacactgtgagtgctttagtttatgacaataagctaaaagcacacaaggataagtcagctcaatgcttcaaaatgttctacaaaggtgttattacacatgatgtttcatctgcaatcaacagacctcaaataggcgttgtaagagaatttcttacacgcaatcctgcttggagaaaagctgtttttatctcaccttataattcacagaacgctgtagcttcaaaaatcttaggattgcctacgcagactgttgattcatcacagggttctgaatatgactatgtcatattcacacaaactactgaaacagcacactcttgtaatgtcaaccgcttcaatgtggctatcacaagggcaaaaattggcattttgtgcataatgtctgatagagatctttatgacaaactgcaatttacaagtctagaaataccacgtcgcaatgtggctacattacaagcagaaaatgtaactggactttttaaggactgtagtaagatcattactggtcttcatcctacacaggcacctacacacctcagcgttgatataaagttcaagactgaaggattatgtgttgacataccaggcataccaaaggacatgacctaccgtagactcatctctatgatgggtttcaaaatgaattaccaagtcaatggttaccctaatatgtttatcacccgcgaagaagctattcgtcacgttcgtgcgtggattggctttgatgtagagggctgtcatgcaactagagatgctgtgggtactaacctacctctccagctaggattttctacaggtgttaacttagtagctgtaccgactggttatgttgacactgaaaataacacagaattcaccagagttaatgcaaaacctccaccaggtgaccagtttaaacatcttataccactcatgtataaaggcttgccctggaatgtagtgcgtattaagatagtacaaatgctcagtgatacactgaaaggattgtcagacagagtcgtgttcgtcctttgggcgcatggctttgagcttacatcaatgaagtactttgtcaagattggacctgaaagaacgtgttgtctgtgtgacaaacgtgcaacttgcttttctacttcatcagatacttatgcctgctggaatcattctgtgggttttgactatgtctataacccatttatgattgatgttcagcagtggggctttacgggtaaccttcagagtaaccatgaccaacattgccaggtacatggaaatgcacatgtggctagttgtgatgctatcatgactagatgtttagcagtccatgagtgctttgttaagcgcgttgattggtctgttgaataccctattataggagatgaactgagggttaattctgcttgcagaaaagtacaacacatggttgtgaagtctgcattgcttgctgataagtttccagttcttcatgacattggaaatccaaaggctatcaagtgtgtgcctcaggctgaagtagaatggaagttctacgatgctcagccatgtagtgacaaagcttacaaaatagaggaactcttctattcttatgctacacatcacgataaattcactgatggtgtttgtttgttttggaattgtaacgttgatcgttacccagccaatgcaattgtgtgtaggtttgacacaagagtcttgtcaaacttgaacttaccaggctgtgatggtggtagtttgtatgtgaataagcatgcattccacactccagctttcgataaaagtgcatttactaatttaaagcaattgcctttcttttactattctgatagtccttgtgagtctcatggcaaacaagtagtgtcggatattgattatgttccactcaaatctgctacgtgtattacacgatgcaatttaggtggtgctgtttgcagacaccatgcaaatgagtaccgacagtacttggatgcatataatatgatgatttctgctggatttagcctatggatttacaaacaatttgatacttataacctgtggaatacatttaccaggttacagagtttagaaaatgtggcttataatgttgttaataaaggacactttgatggacacgccggcgaagcacctgtttccatcattaataatgctgtttacacaaaggtagatggtattgatgtggagatctttgaaaataagacaacacttcctgttaatgttgcatttgagctttgggctaagcgtaacattaaaccagtgccagagattaagatactcaataatttgggtgttgatatcgctgctaatactgtaatctgggactacaaaagagaagccccagcacatgtatctacaataggtgtctgcacaatgactgacattgccaagaaacctactgagagtgcttgttcttcacttactgtcttgtttgatggtagagtggaaggacaggtagacctttttagaaacgcccgtaatggtgttttaataacagaaggttcagtcaaaggtctaacaccttcaaagggaccagcacaagctagcgtcaatggagtcacattaattggagaatcagtaaaaacacagtttaactactttaagaaagtagacggcattattcaacagttgcctgaaacctactttactcagagcagagacttagaggattttaagcccagatcacaaatggaaactgactttctcgagctcgctatggatgaattcatacagcgatataagctcgagggctatgccttcgaacacatcgtttatggagatttcagtcatggacaacttggcggtcttcatttaatgataggcttagccaagcgctcacaagattcaccacttaaattagaggattttatccctatggacagcacagtgaaaaattacttcataacagatgcgcaaacaggttcatcaaaatgtgtgtgttctgtgattgatcttttacttgatgactttgtcgagataataaagtcacaagatttgtcagtgatttcaaaagtggtcaaggttacaattgactatgctgaaatttcattcatgctttggtgtaaggatggacatgttgaaaccttctacccaaaactacaagcaagtcgagcgtggcaaccaggtgttgcgatgcctaacttgtacaagatgcaaagaatgcttcttgaaaagtgtgaccttcagaattatggtgaaaatgctgttataccaaaaggaataatgatgaatgtcgcaaagtatactcaactgtgtcaatacttaaatacacttactttagctgtaccctacaacatgagagttattcactttggtgctggctctgataaaggagttgcaccaggtacagctgtgctcagacaatggttgccaactggcacactacttgtcgattcagatcttaatgacttcgtctccgacgcatattctactttaattggagactgtgcaacagtacatacggctaataaatgggaccttattattagcgatatgtatgaccctaggaccaaacatgtgacaaaagagaatgactctaaagaagggtttttcacttatctgtgtggatttataaagcaaaaactagccctgggtggttctatagctgtaaagataacagagcattcttggaatgctgacctttacaagcttatgggccatttctcatggtggacagcttttgttacaaatgtaaatgcatcatcatcggaagcatttttaattggggctaactatcttggcaagccgaaggaacaaattgatggctataccatgcatgctaactacattttctggaggaacacaaatcctatccagttgtcttcctattcactctttgacatgagcaaatttcctcttaaattaagaggaactgctgtaatgtctcttaaggagaatcaaatcaatgatatgatttattctcttctggaaaaaggtaggcttatcattagagaaaacaacagagttgtggtttcaagtgatattcttgttaacaactaaacgaacatgtttattttcttattatttcttactctcactagtggtagtgaccttgaccggtgcaccacttttgatgatgttcaagctcctaattacactcaacatacttcatctatgaggggggtttactatcctgatgaaatttttagatcagacactctttatttaactcaggatttatttcttccattttattctaatgttacagggtttcatactattaatcatacgtttggcaaccctgtcataccttttaaggatggtatttattttgctgccacagagaaatcaaatgttgtccgtggttgggtttttggttctaccatgaacaacaagtcacagtcggtgattattattaacaattctactaatgttgttatacgagcatgtaactttgaattgtgtgacaaccctttctttgctgtttctaaacccatgggtacacagacacatactatgatattcgataatgcatttaattgcactttcgagtacatatctgatgccttttcgcttgatgtttcagaaaagtcaggtaattttaaacacttacgagagtttgtgtttaaaaataaagatgggtttctctatgtttataagggctatcaacctatagatgtagttcgtgatctaccttctggttttaacactttgaaacctatttttaagttgcctcttggtattaacattacaaattttagagccattcttacagccttttcacctgctcaagacatttggggcacgtcagctgcagcctattttgttggctatttaaagccaactacatttatgctcaagtatgatgaaaatggtacaatcacagatgctgttgattgttctcaaaatccacttgctgaactcaaatgctctgttaagagctttgagattgacaaaggaatttaccagacctctaatttcagggttgttccctcaggagatgttgtgagattccctaatattacaaacttgtgtccttttggagaggtttttaatgctactaaattcccttctgtctatgcatgggagagaaaaaaaatttctaattgtgttgctgattactctgtgctctacaactcaacatttttttcaacctttaagtgctatggcgtttctgccactaagttgaatgatctttgcttctccaatgtctatgcagattcttttgtagtcaagggagatgatgtaagacaaatagcgccaggacaaactggtgttattgctgattataattataaattgccagatgatttcatgggttgtgtccttgcttggaatactaggaacattgatgctacttcaactggtaattataattataaatataggtatcttagacatggcaagcttaggccctttgagagagacatatctaatgtgcctttctcccctgatggcaaaccttgcaccccacctgctcttaattgttattggccattaaatgattatggtttttacaccactactggcattggctaccaaccttacagagttgtagtactttcttttgaacttttaaatgcaccggccacggtttgtggaccaaaattatccactgaccttattaagaaccagtgtgtcaattttaattttaatggactcactggtactggtgtgttaactccttcttcaaagagatttcaaccatttcaacaatttggccgtgatgtttctgatttcactgattccgttcgagatcctaaaacatctgaaatattagacatttcaccttgcgcttttgggggtgtaagtgtaattacacctggaacaaatgcttcatctgaagttgctgttctatatcaagatgttaactgcactgatgtttctacagcaattcatgcagatcaactcacaccagcttggcgcatatattctactggaaacaatgtattccagactcaagcaggctgtcttataggagctgagcatgtcgacacttcttatgagtgcgacattcctattggagctggcatttgtgctagttaccatacagtttctttattacgtagtactagccaaaaatctattgtggcttatactatgtctttaggtgctgatagttcaattgcttactctaataacaccattgctatacctactaacttttcaattagcattactacagaagtaatgcctgtttctatggctaaaacctccgtagattgtaatatgtacatctgcggagattctactgaatgtgctaatttgcttctccaatatggtagcttttgcacacaactaaatcgtgcactctcaggtattgctgctgaacaggatcgcaacacacgtgaagtgttcgctcaagtcaaacaaatgtacaaaaccccaactttgaaatattttggtggttttaatttttcacaaatattacctgaccctctaaagccaactaagaggtcttttattgaggacttgctctttaataaggtgacactcgctgatgctggcttcatgaagcaatatggcgaatgcctaggtgatattaatgctagagatctcatttgtgcgcagaagttcaatggacttacagtgttgccacctctgctcactgatgatatgattgctgcctacactgctgctctagttagtggtactgccactgctggatggacatttggtgctggcgctgctcttcaaataccttttgctatgcaaatggcatataggttcaatggcattggagttacccaaaatgttctctatgagaaccaaaaacaaatcgccaaccaatttaacaaggcgattagtcaaattcaagaatcacttacaacaacatcaactgcattgggcaagctgcaagacgttgttaaccagaatgctcaagcattaaacacacttgttaaacaacttagctctaattttggtgcaatttcaagtgtgctaaatgatatcctttcgcgacttgataaagtcgaggcggaggtacaaattgacaggttaattacaggcagacttcaaagccttcaaacctatgtaacacaacaactaatcagggctgctgaaatcagggcttctgctaatcttgctgctactaaaatgtctgagtgtgttcttggacaatcaaaaagagttgacttttgtggaaagggctaccaccttatgtccttcccacaagcagccccgcatggtgttgtcttcctacatgtcacgtatgtgccatcccaggagaggaacttcaccacagcgccagcaatttgtcatgaaggcaaagcatacttccctcgtgaaggtgtttttgtgtttaatggcacttcttggtttattacacagaggaacttcttttctccacaaataattactacagacaatacatttgtctcaggaaattgtgatgtcgttattggcatcattaacaacacagtttatgatcctctgcaacctgagcttgactcattcaaagaagagctggacaagtacttcaaaaatcatacatcaccagatgttgatcttggcgacatttcaggcattaacgcttctgtcgtcaacattcaaaaagaaattgaccgcctcaatgaggtcgctaaaaatttaaatgaatcactcattgaccttcaagaattgggaaaatatgagcaatatattaaatggccttggtatgtttggctcggcttcattgctggactaattgccatcgtcatggttacaatcttgctttgttgcatgactagttgttgcagttgcctcaagggtgcatgctcttgtggttcttgctgcaagtttgatgaggatgactctgagccagttctcaagggtgtcaaattacattacacataaacgaacttatggatttgtttatgagattttttactcttggatcaattactgcacagccagtaaaaattgacaatgcttctcctgcaagtactgttcatgctacagcaacgataccgctacaagcctcactccctttcggatggcttgttattggcgttgcatttcttgctgtttttcagagcgctaccaaaataattgcgctcaataaaagatggcagctagccctttataagggcttccagttcatttgcaatttactgctgctatttgttaccatctattcacatcttttgcttgtcgctgcaggtatggaggcgcaatttttgtacctctatgccttgatatattttctacaatgcatcaacgcatgtagaattattatgagatgttggctttgttggaagtgcaaatccaagaacccattactttatgatgccaactactttgtttgctggcacacacataactatgactactgtataccatataacagtgtcacagatacaattgtcgttactgaaggtgacggcatttcaacaccaaaactcaaagaagactaccaaattggtggttattctgaggataggcactcaggtgttaaagactatgtcgttgtacatggctatttcaccgaagtttactaccagcttgagtctacacaaattactacagacactggtattgaaaatgctacattcttcatctttaacaagcttgttaaagacccaccgaatgtgcaaatacacacaatcgacggctcttcaggagttgctaatccagcaatggatccaatttatgatgagccgacgacgactactagcgtgcctttgtaagcacaagaaagtgagtacgaacttatgtactcattcgtttcggaagaaacaggtacgttaatagttaatagcgtacttctttttcttgctttcgtggtattcttgctagtcacactagccatccttactgcgcttcgattgtgtgcgtactgctgcaatattgttaacgtgagtttagtaaaaccaacggtttacgtctactcgcgtgttaaaaatctgaactcttctgaaggagttcctgatcttctggtctaaacgaactaactattattattattctgtttggaactttaacattgcttatcatggcagacaacggtactattaccgttgaggagcttaaacaactcctggaacaatggaacctagtaataggtttcctattcctagcctggattatgttactacaatttgcctattctaatcggaacaggtttttgtacataataaagcttgttttcctctggctcttgtggccagtaacacttgcttgttttgtgcttgctgctgtctacagaattaattgggtgactggcgggattgcgattgcaatggcttgtattgtaggcttgatgtggcttagctacttcgttgcttccttcaggctgtttgctcgtacccgctcaatgtggtcattcaacccagaaacaaacattcttctcaatgtgcctctccgggggacaattgtgaccagaccgctcatggaaagtgaacttgtcattggtgctgtgatcattcgtggtcacttgcgaatggccggacactccctagggcgctgtgacattaaggacctgccaaaagagatcactgtggctacatcacgaacgctttcttattacaaattaggagcgtcgcagcgtgtaggcactgattcaggttttgctgcatacaaccgctaccgtattggaaactataaattaaatacagaccacgccggtagcaacgacaatattgctttgctagtacagtaagtgacaacagatgtttcatcttgttgacttccaggttacaatagcagagatattgattatcattatgaggactttcaggattgctatttggaatcttgacgttataataagttcaatagtgagacaattatttaagcctctaactaagaagaattattcggagttagatgatgaagaacctatggagttagattatccataaaacgaacatgaaaattattctcttcctgacattgattgtatttacatcttgcgagctatatcactatcaggagtgtgttagaggtacgactgtactactaaaagaaccttgcccatcaggaacatacgagggcaattcaccatttcaccctcttgctgacaataaatttgcactaacttgcactagcacacactttgcttttgcttgtgctgacggtactcgacatacctatcagctgcgtgcaagatcagtttcaccaaaacttttcatcagacaagaggaggttcaacaagagctctactcgccactttttctcattgttgctgctctagtatttttaatactttgcttcaccattaagagaaagacagaatgaatgagctcactttaattgacttctatttgtgctttttagcctttctgctattccttgttttaataatgcttattatattttggttttcactcgaaatccaggatctagaagaaccttgtaccaaagtctaaacgaacatgaaacttctcattgttttgacttgtatttctctatgcagttgcatatgcactgtagtacagcgctgtgcatctaataaacctcatgtgcttgaagatccttgtaaggtacaacactaggggtaatacttatagcactgcttggctttgtgctctaggaaaggttttaccttttcatagatggcacactatggttcaaacatgcacacctaatgttactatcaactgtcaagatccagctggtggtgcgcttatagctaggtgttggtaccttcatgaaggtcaccaaactgctgcatttagagacgtacttgttgttttaaataaacgaacaaattaaaatgtctgataatggaccccaatcaaaccaacgtagtgccccccgcattacatttggtggacccacagattcaactgacaataaccagaatggaggacgcaatggggcaaggccaaaacagcgccgaccccaaggtttacccaataatactgcgtcttggttcacagctctcactcagcatggcaaggaggaacttagattccctcgaggccagggcgttccaatcaacaccaatagtggtccagatgaccaaattggctactaccgaagagctacccgacgagttcgtggtggtgacggcaaaatgaaagagctcagccccagatggtacttctattacctaggaactggcccagaagcttcacttccctacggcgctaacaaagaaggcatcgtatgggttgcaactgagggagccttgaatacacccaaagaccacattggcacccgcaatcctaataacaatgctgccaccgtgctacaacttcctcaaggaacaacattgccaaaaggcttctacgcagagggaagcagaggcggcagtcaagcctcttctcgctcctcatcacgtagtcgcggtaattcaagaaattcaactcctggcagcagtaggggaaattctcctgctcgaatggctagcggaggtggtgaaactgccctcgcgctattgctgctagacagattgaaccagcttgagagcaaagtttctggtaaaggccaacaacaacaaggccaaactgtcactaagaaatctgctgctgaggcatctaaaaagcctcgccaaaaacgtactgccacaaaacagtacaacgtcactcaagcatttgggagacgtggtccagaacaaacccaaggaaatttcggggaccaagacctaatcagacaaggaactgattacaaacattggccgcaaattgcacaatttgctccaagtgcctctgcattctttggaatgtcacgcattggcatggaagtcacaccttcgggaacatggctgacttatcatggagccattaaattggatgacaaagatccacaattcaaagacaacgtcatactgctgaacaagcacattgacgcatacaaaacattcccaccaacagagcctaaaaaggacaaaaagaaaaagactgatgaagctcagcctttgccgcagagacaaaagaagcagcccactgtgactcttcttcctgcggctgacatggatgatttctccagacaacttcaaaattccatgagtggagcttctgctgattcaactcaggcataaacactcatgatgaccacacaaggcagatgggctatgtaaacgttttcgcaattccgtttacgatacatagtctactcttgtgcagaatgaattctcgtaactaaacagcacaagtaggtttagttaactttaatctcacatagcaatctttaatcaatgtgtaacattagggaggacttgaaagagccaccacattttcatcgaggccacgcggagtacgatcgagggtacagtgaataatgctagggagagctgcctatatggaagagccctaatgtgtaaaattaattttagtagtgctatccccatgtgattttaatagcttcttaggagaatgacaaaaaaaaaaaaaaaaaaaaaaaa

SEQ ID NO: 17 - DNA, 19 bp, Artificial Sequence
  PCR Primer
gaaggtgaaggtcggagtc

SEQ ID NO: 18 - DNA, 20 bp, Artificial Sequence
  PCR Primer
gaagatggtgatgggatttc

SEQ ID NO: 19 - DNA, 20 bp, Artificial Sequence
  PCR Probe
caagcttcccgttctcagcc

SEQ ID NO: 20 - DNA, 20 bp, Artificial Sequence
  Antisense compound
ggttggcttttcctgggtag

SEQ ID NO: 21 - DNA, 20 bp, Artificial Sequence
  Antisense compound
tggttggcttttcctgggta

SEQ ID NO: 22 - DNA, 20 bp, Artificial Sequence
  Antisense compound
ttggttggcttttcctgggt

SEQ ID NO: 23 - DNA, 20 bp, Artificial Sequence
  Antisense compound
gttggttggcttttcctggg

SEQ ID NO: 24 - DNA, 20 bp, Artificial Sequence
  Antisense compound
ggttggttggcttttcctgg

SEQ ID NO: 25 - DNA, 20 bp, Artificial Sequence
  Antisense compound
aggttggttggcttttcctg

SEQ ID NO: 26 - DNA, 20 bp, Artificial Sequence
  Antisense compound
gaggttggttggcttttcct

SEQ ID NO: 27 - DNA, 20 bp, Artificial Sequence
  Antisense compound
cgaggttggttggcttttcc

SEQ ID NO: 28 - DNA, 20 bp, Artificial Sequence
  Antisense compound
tcgaggttggttggcttttc

SEQ ID NO: 29 - DNA, 20 bp, Artificial Sequence
  Antisense compound
atcgaggttggttggctttt

SEQ ID NO: 30 - DNA, 20 bp, Artificial Sequence
  Antisense compound
gatcgaggttggttggcttt

SEQ ID NO: 31 - DNA, 20 bp, Artificial Sequence
  Antisense compound
agatcgaggttggttggctt

SEQ ID NO: 32 - DNA, 20 bp, Artificial Sequence
  Antisense compound
gagatcgaggttggttggct

SEQ ID NO: 33 - DNA, 20 bp, Artificial Sequence
  Antisense compound
agagatcgaggttggttggc

SEQ ID NO: 34 - DNA, 20 bp, Artificial Sequence
  Antisense compound
aagagatcgaggttggttgg

SEQ ID NO: 35 - DNA, 20 bp, Artificial Sequence
  Antisense compound
caagagatcgaggttggttg

SEQ ID NO: 36 - DNA, 20 bp, Artificial Sequence
  Antisense compound
acaagagatcgaggttggtt

SEQ ID NO: 37 - DNA, 20 bp, Artificial Sequence
  Antisense compound
tacaagagatcgaggttggt

SEQ ID NO: 38 - DNA, 20 bp, Artificial Sequence
  Antisense compound
ctacaagagatcgaggttgg

SEQ ID NO: 39 - DNA, 20 bp, Artificial Sequence
  Antisense compound
tctacaagagatcgaggttg

SEQ ID NO: 40 - DNA, 20 bp, Artificial Sequence
  Antisense compound
atctacaagagatcgaggtt

SEQ ID NO: 41 - DNA, 20 bp, Artificial Sequence
  Antisense compound
gatctacaagagatcgaggt

SEQ ID NO: 42 - DNA, 20 bp, Artificial Sequence
  Antisense compound
agatctacaagagatcgagg

SEQ ID NO: 43 - DNA, 20 bp, Artificial Sequence
  Antisense compound
cagatctacaagagatcgag

SEQ ID NO: 44 - DNA, 20 bp, Artificial Sequence
  Antisense compound
acagatctacaagagatcga

SEQ ID NO: 45 - DNA, 20 bp, Artificial Sequence
  Antisense compound
aacagatctacaagagatcg

SEQ ID NO: 46 - DNA, 20 bp, Artificial Sequence
  Antisense compound
gaacagatctacaagagatc

SEQ ID NO: 47 - DNA, 20 bp, Artificial Sequence
  Antisense compound
agaacagatctacaagagat

SEQ ID NO: 48 - DNA, 20 bp, Artificial Sequence
  Antisense compound
gagaacagatctacaagaga

SEQ ID NO: 49 - DNA, 20 bp, Artificial Sequence
  Antisense compound
agagaacagatctacaagag

SEQ ID NO: 50 - DNA, 20 bp, Artificial Sequence
  Antisense compound
tagagaacagatctacaaga

SEQ ID NO: 51 - DNA, 20 bp, Artificial Sequence
  Antisense compound
ttagagaacagatctacaag

SEQ ID NO: 52 - DNA, 20 bp, Artificial Sequence
  Antisense compound
tttagagaacagatctacaa

SEQ ID NO: 53 - DNA, 20 bp, Artificial Sequence
  Antisense compound
gtttagagaacagatctaca

SEQ ID NO: 54 - DNA, 20 bp, Artificial Sequence
  Antisense compound
cgtttagagaacagatctac

SEQ ID NO: 55 - DNA, 20 bp, Artificial Sequence
  Antisense compound
tcgtttagagaacagatcta

SEQ ID NO: 56 - DNA, 20 bp, Artificial Sequence
  Antisense compound
ttcgtttagagaacagatct

SEQ ID NO: 57 - DNA, 20 bp, Artificial Sequence
  Antisense compound
gttcgtttagagaacagatc

SEQ ID NO: 58 - DNA, 20 bp, Artificial Sequence
  Antisense compound
agttcgtttagagaacagat

SEQ ID NO: 59 - DNA, 20 bp, Artificial Sequence
  Antisense compound
aagttcgtttagagaacaga

SEQ ID NO: 60 - DNA, 20 bp, Artificial Sequence
  Antisense compound
aaagttcgtttagagaacag

SEQ ID NO: 61 - DNA, 20 bp, Artificial Sequence
  Antisense compound
taaagttcgtttagagaaca

SEQ ID NO: 62 - DNA, 20 bp, Artificial Sequence
  Antisense compound
ttaaagttcgtttagagaac

SEQ ID NO: 63 - DNA, 20 bp, Artificial Sequence
  Antisense compound
tttaaagttcgtttagagaa

SEQ ID NO: 64 - DNA, 20 bp, Artificial Sequence
  Antisense compound
ttttaaagttcgtttagaga

SEQ ID NO: 65 - DNA, 20 bp, Artificial Sequence
  Antisense compound
attttaaagttcgtttagag

SEQ ID NO: 66 - DNA, 20 bp, Artificial Sequence
  Antisense compound
gattttaaagttcgtttaga

SEQ ID NO: 67 - DNA, 20 bp, Artificial Sequence
  Antisense compound
agattttaaagttcgtttag

SEQ ID NO: 68 - DNA, 20 bp, Artificial Sequence
  Antisense compound
cagattttaaagttcgttta

SEQ ID NO: 69 - DNA, 20 bp, Artificial Sequence
  Antisense compound
acagattttaaagttcgttt

SEQ ID NO: 70 - DNA, 20 bp, Artificial Sequence
  Antisense compound
cacagattttaaagttcgtt

SEQ ID NO: 71 - DNA, 20 bp, Artificial Sequence
  Antisense compound
acacagattttaaagttcgt

SEQ ID NO: 72 - DNA, 20 bp, Artificial Sequence
  Antisense compound
tacacagattttaaagttcg

SEQ ID NO: 73 - DNA, 20 bp, Artificial Sequence
  Antisense compound
ctacacagattttaaagttc

SEQ ID NO: 74 - DNA, 20 bp, Artificial Sequence
  Antisense compound
gctacacagattttaaagtt

SEQ ID NO: 75 - DNA, 20 bp, Artificial Sequence
  Antisense compound
agctacacagattttaaagt

SEQ ID NO: 76 - DNA, 20 bp, Artificial Sequence
  Antisense compound
cagctacacagattttaaag

SEQ ID NO: 77 - DNA, 20 bp, Artificial Sequence
  Antisense compound
acagctacacagattttaaa

SEQ ID NO: 78 - DNA, 20 bp, Artificial Sequence
  Antisense compound
gacagctacacagattttaa

SEQ ID NO: 79 - DNA, 20 bp, Artificial Sequence
  Antisense compound
cgacagctacacagatttta

SEQ ID NO: 80 - DNA, 20 bp, Artificial Sequence
  Antisense compound
gcgacagctacacagatttt

SEQ ID NO: 81 - DNA, 20 bp, Artificial Sequence
  Antisense compound
agcgacagctacacagattt

SEQ ID NO: 82 - DNA, 20 bp, Artificial Sequence
  Antisense compound
gagcgacagctacacagatt

SEQ ID NO: 83 - DNA, 20 bp, Artificial Sequence
  Antisense compound
cgagcgacagctacacagat

SEQ ID NO: 84 - DNA, 20 bp, Artificial Sequence
  Antisense compound
ccgagcgacagctacacaga

SEQ ID NO: 85 - DNA, 20 bp, Artificial Sequence
  Antisense compound
gccgagcgacagctacacag

SEQ ID NO: 86 - DNA, 20 bp, Artificial Sequence
  Antisense compound
agccgagcgacagctacaca

SEQ ID NO: 87 - DNA, 20 bp, Artificial Sequence
  Antisense compound
cagccgagcgacagctacac

SEQ ID NO: 88 - DNA, 20 bp, Artificial Sequence
  Antisense compound
gcagccgagcgacagctaca

SEQ ID NO: 89 - DNA, 20 bp, Artificial Sequence
  Antisense compound
tgcagccgagcgacagctac

SEQ ID NO: 90 - DNA, 20 bp, Artificial Sequence
  Antisense compound
atgcagccgagcgacagcta

SEQ ID NO: 91 - DNA, 20 bp, Artificial Sequence
  Antisense compound
catgcagccgagcgacagct

SEQ ID NO: 92 - DNA, 20 bp, Artificial Sequence
  Antisense compound
gcatgcagccgagcgacagc

SEQ ID NO: 93 - DNA, 20 bp, Artificial Sequence
  Antisense compound
ggcatgcagccgagcgacag

SEQ ID NO: 94 - DNA, 20 bp, Artificial Sequence
  Antisense compound
aggcatgcagccgagcgaca

SEQ ID NO: 95 - DNA, 20 bp, Artificial Sequence
  Antisense compound
taggcatgcagccgagcgac

SEQ ID NO: 96 - DNA, 20 bp, Artificial Sequence
  Antisense compound
ctaggcatgcagccgagcga

SEQ ID NO: 97 - DNA, 20 bp, Artificial Sequence
  Antisense compound
actaggcatgcagccgagcg

SEQ ID NO: 98 - DNA, 20 bp, Artificial Sequence
  Antisense compound
cactaggcatgcagccgagc

SEQ ID NO: 99 - DNA, 20 bp, Artificial Sequence
  Antisense compound
gcactaggcatgcagccgag

SEQ ID NO: 100 - DNA, 20 bp, Artificial Sequence
  Antisense compound
tgcactaggcatgcagccga

SEQ ID NO: 101 - DNA, 20 bp, Artificial Sequence
  Antisense compound
gtgcactaggcatgcagccg

SEQ ID NO: 102 - DNA, 20 bp, Artificial Sequence
  Antisense compound
ggtgcactaggcatgcagcc

SEQ ID NO: 103 - DNA, 20 bp, Artificial Sequence
  Antisense compound
aggtgcactaggcatgcagc

SEQ ID NO: 104 - DNA, 20 bp, Artificial Sequence
  Antisense compound
taggtgcactaggcatgcag

SEQ ID NO: 105 - DNA, 20 bp, Artificial Sequence
  Antisense compound
gtaggtgcactaggcatgca

SEQ ID NO: 106 - DNA, 20 bp, Artificial Sequence
  Antisense compound
cgtaggtgcactaggcatgc

SEQ ID NO: 107 - DNA, 20 bp, Artificial Sequence
  Antisense compound
gcgtaggtgcactaggcatg

SEQ ID NO: 108 - DNA, 20 bp, Artificial Sequence
  Antisense compound
tgcgtaggtgcactaggcat

SEQ ID NO: 109 - DNA, 20 bp, Artificial Sequence
  Antisense compound
ctgcgtaggtgcactaggca

SEQ ID NO: 110 - DNA, 20 bp, Artificial Sequence
  Antisense compound
actgcgtaggtgcactaggc

SEQ ID NO: 111 - DNA, 20 bp, Artificial Sequence
  Antisense compound
tactgcgtaggtgcactagg

SEQ ID NO: 112 - DNA, 20 bp, Artificial Sequence
  Antisense compound
atactgcgtaggtgcactag

SEQ ID NO: 113 - DNA, 20 bp, Artificial Sequence
  Antisense compound
tatactgcgtaggtgcacta

SEQ ID NO: 114 - DNA, 20 bp, Artificial Sequence
  Antisense compound
ttatactgcgtaggtgcact

SEQ ID NO: 115 - DNA, 20 bp, Artificial Sequence
  Antisense compound
tttatactgcgtaggtgcac

SEQ ID NO: 116 - DNA, 20 bp, Artificial Sequence
  Antisense compound
gtttatactgcgtaggtgca

SEQ ID NO: 117 - DNA, 20 bp, Artificial Sequence
  Antisense compound
tgtttatactgcgtaggtgc

SEQ ID NO: 118 - DNA, 20 bp, Artificial Sequence
  Antisense compound
ttgtttatactgcgtaggtg

SEQ ID NO: 119 - DNA, 20 bp, Artificial Sequence
  Antisense compound
attgtttatactgcgtaggt

SEQ ID NO: 120 - DNA, 20 bp, Artificial Sequence
  Antisense compound
tattgtttatactgcgtagg

SEQ ID NO: 121 - DNA, 20 bp, Artificial Sequence
  Antisense compound
ttattgtttatactgcgtag

SEQ ID NO: 122 - DNA, 20 bp, Artificial Sequence
  Antisense compound
attattgtttatactgcgta

SEQ ID NO: 123 - DNA, 20 bp, Artificial Sequence
  Antisense compound
tattattgtttatactgcgt

SEQ ID NO: 124 - DNA, 20 bp, Artificial Sequence
  Antisense compound
ttattattgtttatactgcg

SEQ ID NO: 125 - DNA, 20 bp, Artificial Sequence
  Antisense compound
tttattattgtttatactgc

SEQ ID NO: 126 - DNA, 20 bp, Artificial Sequence
  Antisense compound
atttattattgtttatactg

SEQ ID NO: 127 - DNA, 20 bp, Artificial Sequence
  Antisense compound
aatttattattgtttatact

SEQ ID NO: 128 - DNA, 20 bp, Artificial Sequence
  Antisense compound
aaatttattattgtttatac

SEQ ID NO: 129 - DNA, 20 bp, Artificial Sequence
  Antisense compound
aaaatttattattgtttata

SEQ ID NO: 130 - DNA, 20 bp, Artificial Sequence
  Antisense compound
taaaatttattattgtttat

SEQ ID NO: 131 - DNA, 20 bp, Artificial Sequence
  Antisense compound
gtaaaatttattattgttta

SEQ ID NO: 132 - DNA, 20 bp, Artificial Sequence
  Antisense compound
agtaaaatttattattgttt

SEQ ID NO: 133 - DNA, 20 bp, Artificial Sequence
  Antisense compound
cagtaaaatttattattgtt

SEQ ID NO: 134 - DNA, 20 bp, Artificial Sequence
  Antisense compound
acagtaaaatttattattgt

SEQ ID NO: 135 - DNA, 20 bp, Artificial Sequence
  Antisense compound
gacagtaaaatttattattg

SEQ ID NO: 136 - DNA, 20 bp, Artificial Sequence
  Antisense compound
cgacagtaaaatttattatt

SEQ ID NO: 137 - DNA, 20 bp, Artificial Sequence
  Antisense compound
acgacagtaaaatttattat

SEQ ID NO: 138 - DNA, 20 bp, Artificial Sequence
  Antisense compound
aacgacagtaaaatttatta

SEQ ID NO: 139 - DNA, 20 bp, Artificial Sequence
  Antisense compound
caacgacagtaaaatttatt

SEQ ID NO: 140 - DNA, 20 bp, Artificial Sequence
  Antisense compound
tcaacgacagtaaaatttat

SEQ ID NO: 141 - DNA, 20 bp, Artificial Sequence
  Antisense compound
gtcaacgacagtaaaattta

SEQ ID NO: 142 - DNA, 20 bp, Artificial Sequence
  Antisense compound
tgtcaacgacagtaaaattt

SEQ ID NO: 143 - DNA, 20 bp, Artificial Sequence
  Antisense compound
ttgtcaacgacagtaaaatt

SEQ ID NO: 144 - DNA, 20 bp, Artificial Sequence
  Antisense compound
cttgtcaacgacagtaaaat

SEQ ID NO: 145 - DNA, 20 bp, Artificial Sequence
  Antisense compound
tcttgtcaacgacagtaaaa

SEQ ID NO: 146 - DNA, 20 bp, Artificial Sequence
  Antisense compound
ttcttgtcaacgacagtaaa

SEQ ID NO: 147 - DNA, 20 bp, Artificial Sequence
  Antisense compound
tttcttgtcaacgacagtaa

SEQ ID NO: 148 - DNA, 20 bp, Artificial Sequence
  Antisense compound
gtttcttgtcaacgacagta

SEQ ID NO: 149 - DNA, 20 bp, Artificial Sequence
  Antisense compound
cgtttcttgtcaacgacagt

SEQ ID NO: 150 - DNA, 20 bp, Artificial Sequence
  Antisense compound
tcgtttcttgtcaacgacag

SEQ ID NO: 151 - DNA, 20 bp, Artificial Sequence
  Antisense compound
ctcgtttcttgtcaacgaca

SEQ ID NO: 152 - DNA, 20 bp, Artificial Sequence
  Antisense compound
actcgtttcttgtcaacgac

SEQ ID NO: 153 - DNA, 20 bp, Artificial Sequence
  Antisense compound
tactcgtttcttgtcaacga

SEQ ID NO: 154 - DNA, 20 bp, Artificial Sequence
  Antisense compound
ttactcgtttcttgtcaacg

SEQ ID NO: 155 - DNA, 20 bp, Artificial Sequence
  Antisense compound
gttactcgtttcttgtcaac

SEQ ID NO: 156 - DNA, 20 bp, Artificial Sequence
  Antisense compound
agttactcgtttcttgtcaa

SEQ ID NO: 157 - DNA, 20 bp, Artificial Sequence
  Antisense compound
gagttactcgtttcttgtca

SEQ ID NO: 158 - DNA, 20 bp, Artificial Sequence
  Antisense compound
cgagttactcgtttcttgtc

SEQ ID NO: 159 - DNA, 20 bp, Artificial Sequence
  Antisense compound
acgagttactcgtttcttgt

SEQ ID NO: 160 - DNA, 20 bp, Artificial Sequence
  Antisense compound
gacgagttactcgtttcttg

SEQ ID NO: 161 - DNA, 20 bp, Artificial Sequence
  Antisense compound
ggacgagttactcgtttctt

SEQ ID NO: 162 - DNA, 20 bp, Artificial Sequence
  Antisense compound
gggacgagttactcgtttct

SEQ ID NO: 163 - DNA, 20 bp, Artificial Sequence
  Antisense compound
agggacgagttactcgtttc

SEQ ID NO: 164 - DNA, 20 bp, Artificial Sequence
  Antisense compound
gagggacgagttactcgttt

SEQ ID NO: 165 - DNA, 20 bp, Artificial Sequence
  Antisense compound
agagggacgagttactcgtt

SEQ ID NO: 166 - DNA, 20 bp, Artificial Sequence
  Antisense compound
aagagggacgagttactcgt

SEQ ID NO: 167 - DNA, 20 bp, Artificial Sequence
  Antisense compound
gaagagggacgagttactcg

SEQ ID NO: 168 - DNA, 20 bp, Artificial Sequence
  Antisense compound
agaagagggacgagttactc

SEQ ID NO: 169 - DNA, 20 bp, Artificial Sequence
  Antisense compound
cagaagagggacgagttact

SEQ ID NO: 170 - DNA, 20 bp, Artificial Sequence
  Antisense compound
gcagaagagggacgagttac

SEQ ID NO: 171 - DNA, 20 bp, Artificial Sequence
  Antisense compound
tgcagaagagggacgagtta

SEQ ID NO: 172 - DNA, 20 bp, Artificial Sequence
  Antisense compound
ctgcagaagagggacgagtt

SEQ ID NO: 173 - DNA, 20 bp, Artificial Sequence
  Antisense compound
tctgcagaagagggacgagt

SEQ ID NO: 174 - DNA, 20 bp, Artificial Sequence
  Antisense compound
gtctgcagaagagggacgag

SEQ ID NO: 175 - DNA, 20 bp, Artificial Sequence
  Antisense compound
agtctgcagaagagggacga

SEQ ID NO: 176 - DNA, 20 bp, Artificial Sequence
  Antisense compound
cagtctgcagaagagggacg

SEQ ID NO: 177 - DNA, 20 bp, Artificial Sequence
  Antisense compound
gcagtctgcagaagagggac

SEQ ID NO: 178 - DNA, 20 bp, Artificial Sequence
  Antisense compound
agcagtctgcagaagaggga

SEQ ID NO: 179 - DNA, 20 bp, Artificial Sequence
  Antisense compound
aagcagtctgcagaagaggg

SEQ ID NO: 180 - DNA, 20 bp, Artificial Sequence
  Antisense compound
taagcagtctgcagaagagg

SEQ ID NO: 181 - DNA, 20 bp, Artificial Sequence
  Antisense compound
gtaagcagtctgcagaagag

SEQ ID NO: 182 - DNA, 20 bp, Artificial Sequence
  Antisense compound
cgtaagcagtctgcagaaga

SEQ ID NO: 183 - DNA, 20 bp, Artificial Sequence
  Antisense compound
ccgtaagcagtctgcagaag

SEQ ID NO: 184 - DNA, 20 bp, Artificial Sequence
  Antisense compound
accgtaagcagtctgcagaa

SEQ ID NO: 185 - DNA, 20 bp, Artificial Sequence
  Antisense compound
aaccgtaagcagtctgcaga

SEQ ID NO: 186 - DNA, 20 bp, Artificial Sequence
  Antisense compound
aaaccgtaagcagtctgcag

SEQ ID NO: 187 - DNA, 20 bp, Artificial Sequence
  Antisense compound
gaaaccgtaagcagtctgca

SEQ ID NO: 188 - DNA, 20 bp, Artificial Sequence
  Antisense compound
cgaaaccgtaagcagtctgc

SEQ ID NO: 189 - DNA, 20 bp, Artificial Sequence
  Antisense compound
acgaaaccgtaagcagtctg

SEQ ID NO: 190 - DNA, 20 bp, Artificial Sequence
  Antisense compound
gacgaaaccgtaagcagtct

SEQ ID NO: 191 - DNA, 20 bp, Artificial Sequence
  Antisense compound
ggacgaaaccgtaagcagtc

SEQ ID NO: 192 - DNA, 20 bp, Artificial Sequence
  Antisense compound
cggacgaaaccgtaagcagt

SEQ ID NO: 193 - DNA, 20 bp, Artificial Sequence
  Antisense compound
acggacgaaaccgtaagcag

SEQ ID NO: 194 - DNA, 20 bp, Artificial Sequence
  Antisense compound
cacggacgaaaccgtaagca

SEQ ID NO: 195 - DNA, 20 bp, Artificial Sequence
  Antisense compound
acacggacgaaaccgtaagc

SEQ ID NO: 196 - DNA, 20 bp, Artificial Sequence
  Antisense compound
aacacggacgaaaccgtaag

SEQ ID NO: 197 - DNA, 20 bp, Artificial Sequence
  Antisense compound
caacacggacgaaaccgtaa

SEQ ID NO: 198 - DNA, 20 bp, Artificial Sequence
  Antisense compound
gcaacacggacgaaaccgta

SEQ ID NO: 199 - DNA, 20 bp, Artificial Sequence
  Antisense compound
tgcaacacggacgaaaccgt

SEQ ID NO: 200 - DNA, 20 bp, Artificial Sequence
  Antisense compound
ctgcaacacggacgaaaccg

SEQ ID NO: 201 - DNA, 20 bp, Artificial Sequence
  Antisense compound
actgcaacacggacgaaacc

SEQ ID NO: 202 - DNA, 20 bp, Artificial Sequence
  Antisense compound
gactgcaacacggacgaaac

SEQ ID NO: 203 - DNA, 20 bp, Artificial Sequence
  Antisense compound
cgactgcaacacggacgaaa

SEQ ID NO: 204 - DNA, 20 bp, Artificial Sequence
  Antisense compound
tcgactgcaacacggacgaa

SEQ ID NO: 205 - DNA, 20 bp, Artificial Sequence
  Antisense compound
atcgactgcaacacggacga

SEQ ID NO: 206 - DNA, 20 bp, Artificial Sequence
  Antisense compound
gatcgactgcaacacggacg

SEQ ID NO: 207 - DNA, 20 bp, Artificial Sequence
  Antisense compound
tgatcgactgcaacacggac

SEQ ID NO: 208 - DNA, 20 bp, Artificial Sequence
  Antisense compound
atgatcgactgcaacacgga

SEQ ID NO: 209 - DNA, 20 bp, Artificial Sequence
  Antisense compound
gatgatcgactgcaacacgg

SEQ ID NO: 210 - DNA, 20 bp, Artificial Sequence
  Antisense compound
tgatgatcgactgcaacacg

SEQ ID NO: 211 - DNA, 20 bp, Artificial Sequence
  Antisense compound
ctgatgatcgactgcaacac

SEQ ID NO: 212 - DNA, 20 bp, Artificial Sequence
  Antisense compound
gctgatgatcgactgcaaca

SEQ ID NO: 213 - DNA, 20 bp, Artificial Sequence
  Antisense compound
tgctgatgatcgactgcaac

SEQ ID NO: 214 - DNA, 20 bp, Artificial Sequence
  Antisense compound
atgctgatgatcgactgcaa

SEQ ID NO: 215 - DNA, 20 bp, Artificial Sequence
  Antisense compound
tatgctgatgatcgactgca

SEQ ID NO: 216 - DNA, 20 bp, Artificial Sequence
  Antisense compound
gtatgctgatgatcgactgc

SEQ ID NO: 217 - DNA, 20 bp, Artificial Sequence
  Antisense compound
ggtatgctgatgatcgactg

SEQ ID NO: 218 - DNA, 20 bp, Artificial Sequence
  Antisense compound
aggtatgctgatgatcgact

SEQ ID NO: 219 - DNA, 20 bp, Artificial Sequence
  Antisense compound
taggtatgctgatgatcgac

SEQ ID NO: 220 - DNA, 20 bp, Artificial Sequence
  Antisense compound
ctaggtatgctgatgatcga

SEQ ID NO: 221 - DNA, 20 bp, Artificial Sequence
  Antisense compound
cctaggtatgctgatgatcg

SEQ ID NO: 222 - DNA, 20 bp, Artificial Sequence
  Antisense compound
acctaggtatgctgatgatc

SEQ ID NO: 223 - DNA, 20 bp, Artificial Sequence
  Antisense compound
aacctaggtatgctgatgat

SEQ ID NO: 224 - DNA, 20 bp, Artificial Sequence
  Antisense compound
aaacctaggtatgctgatga

SEQ ID NO: 225 - DNA, 20 bp, Artificial Sequence
  Antisense compound
gaaacctaggtatgctgatg

SEQ ID NO: 226 - DNA, 20 bp, Artificial Sequence
  Antisense compound
cgaaacctaggtatgctgat

SEQ ID NO: 227 - DNA, 20 bp, Artificial Sequence
  Antisense compound
acgaaacctaggtatgctga

SEQ ID NO: 228 - DNA, 20 bp, Artificial Sequence
  Antisense compound
gacgaaacctaggtatgctg

SEQ ID NO: 229 - DNA, 20 bp, Artificial Sequence
  Antisense compound
ggacgaaacctaggtatgct

SEQ ID NO: 230 - DNA, 20 bp, Artificial Sequence
  Antisense compound
cggacgaaacctaggtatgc

SEQ ID NO: 231 - DNA, 20 bp, Artificial Sequence
  Antisense compound
ccggacgaaacctaggtatg

SEQ ID NO: 232 - DNA, 20 bp, Artificial Sequence
  Antisense compound
cccggacgaaacctaggtat

SEQ ID NO: 233 - DNA, 20 bp, Artificial Sequence
  Antisense compound
acccggacgaaacctaggta

SEQ ID NO: 234 - DNA, 20 bp, Artificial Sequence
  Antisense compound
cacccggacgaaacctaggt

SEQ ID NO: 235 - DNA, 20 bp, Artificial Sequence
  Antisense compound
acacccggacgaaacctagg

SEQ ID NO: 236 - DNA, 20 bp, Artificial Sequence
  Antisense compound
cacacccggacgaaacctag

SEQ ID NO: 237 - DNA, 20 bp, Artificial Sequence
  Antisense compound
tcacacccggacgaaaccta

SEQ ID NO: 238 - DNA, 20 bp, Artificial Sequence
  Antisense compound
gtcacacccggacgaaacct

SEQ ID NO: 239 - DNA, 20 bp, Artificial Sequence
  Antisense compound
ggtcacacccggacgaaacc

SEQ ID NO: 240 - DNA, 20 bp, Artificial Sequence
  Antisense compound
cggtcacacccggacgaaac

SEQ ID NO: 241 - DNA, 20 bp, Artificial Sequence
  Antisense compound
tcggtcacacccggacgaaa

SEQ ID NO: 242 - DNA, 20 bp, Artificial Sequence
  Antisense compound
ttcggtcacacccggacgaa

SEQ ID NO: 243 - DNA, 20 bp, Artificial Sequence
  Antisense compound
tttcggtcacacccggacga

SEQ ID NO: 244 - DNA, 20 bp, Artificial Sequence
  Antisense compound
ctttcggtcacacccggacg

SEQ ID NO: 245 - DNA, 20 bp, Artificial Sequence
  Antisense compound
cctttcggtcacacccggac

SEQ ID NO: 246 - DNA, 20 bp, Artificial Sequence
  Antisense compound
acctttcggtcacacccgga

SEQ ID NO: 247 - DNA, 20 bp, Artificial Sequence
  Antisense compound
tacctttcggtcacacccgg

SEQ ID NO: 248 - DNA, 20 bp, Artificial Sequence
  Antisense compound
ttacctttcggtcacacccg

SEQ ID NO: 249 - DNA, 20 bp, Artificial Sequence
  Antisense compound
cttacctttcggtcacaccc

SEQ ID NO: 250 - DNA, 20 bp, Artificial Sequence
  Antisense compound
tcttacctttcggtcacacc

SEQ ID NO: 251 - DNA, 20 bp, Artificial Sequence
  Antisense compound
atcttacctttcggtcacac

SEQ ID NO: 252 - DNA, 20 bp, Artificial Sequence
  Antisense compound
catcttacctttcggtcaca

SEQ ID NO: 253 - DNA, 20 bp, Artificial Sequence
  Antisense compound
ccatcttacctttcggtcac

SEQ ID NO: 254 - DNA, 20 bp, Artificial Sequence
  Antisense compound
tccatcttacctttcggtca

SEQ ID NO: 255 - DNA, 20 bp, Artificial Sequence
  Antisense compound
ctccatcttacctttcggtc

SEQ ID NO: 256 - DNA, 20 bp, Artificial Sequence
  Antisense compound
tctccatcttacctttcggt

SEQ ID NO: 257 - DNA, 20 bp, Artificial Sequence
  Antisense compound
ctctccatcttacctttcgg

SEQ ID NO: 258 - DNA, 20 bp, Artificial Sequence
  Antisense compound
gctctccatcttacctttcg

SEQ ID NO: 259 - DNA, 20 bp, Artificial Sequence
  Antisense compound
ggctctccatcttacctttc

SEQ ID NO: 260 - DNA, 20 bp, Artificial Sequence
  Antisense compound
aggctctccatcttaccttt

SEQ ID NO: 261 - DNA, 20 bp, Artificial Sequence
  Antisense compound
aaggctctccatcttacctt

SEQ ID NO: 262 - DNA, 20 bp, Artificial Sequence
  Antisense compound
caaggctctccatcttacct

SEQ ID NO: 263 - DNA, 20 bp, Artificial Sequence
  Antisense compound
acaaggctctccatcttacc

SEQ ID NO: 264 - DNA, 20 bp, Artificial Sequence
  Antisense compound
aacaaggctctccatcttac

SEQ ID NO: 265 - DNA, 20 bp, Artificial Sequence
  Antisense compound
gaacaaggctctccatctta

SEQ ID NO: 266 - DNA, 20 bp, Artificial Sequence
  Antisense compound
agaacaaggctctccatctt

SEQ ID NO: 267 - DNA, 20 bp, Artificial Sequence
  Antisense compound
aagaacaaggctctccatct

SEQ ID NO: 268 - DNA, 20 bp, Artificial Sequence
  Antisense compound
caagaacaaggctctccatc

SEQ ID NO: 269 - DNA, 20 bp, Artificial Sequence
  Antisense compound
ccaagaacaaggctctccat

SEQ ID NO: 270 - DNA, 20 bp, Artificial Sequence
  Antisense compound
accaagaacaaggctctcca

SEQ ID NO: 271 - DNA, 20 bp, Artificial Sequence
  Antisense compound
caccaagaacaaggctctcc

SEQ ID NO: 272 - DNA, 20 bp, Artificial Sequence
  Antisense compound
acaccaagaacaaggctctc

SEQ ID NO: 273 - DNA, 20 bp, Artificial Sequence
  Antisense compound
gacaccaagaacaaggctct

SEQ ID NO: 274 - DNA, 20 bp, Artificial Sequence
  Antisense compound
tgacaccaagaacaaggctc

SEQ ID NO: 275 - DNA, 20 bp, Artificial Sequence
  Antisense compound
ttgacaccaagaacaaggct

SEQ ID NO: 276 - DNA, 20 bp, Artificial Sequence
  Antisense compound
gttgacaccaagaacaaggc

SEQ ID NO: 277 - DNA, 20 bp, Artificial Sequence
  Antisense compound
cgttgacaccaagaacaagg

SEQ ID NO: 278 - DNA, 20 bp, Artificial Sequence
  Antisense compound
tcgttgacaccaagaacaag

SEQ ID NO: 279 - DNA, 20 bp, Artificial Sequence
  Antisense compound
ctcgttgacaccaagaacaa

SEQ ID NO: 280 - DNA, 20 bp, Artificial Sequence
  Antisense compound
tctcgttgacaccaagaaca

SEQ ID NO: 281 - DNA, 20 bp, Artificial Sequence
  Antisense compound
ttctcgttgacaccaagaac

SEQ ID NO: 282 - DNA, 20 bp, Artificial Sequence
  Antisense compound
tttctcgttgacaccaagaa

SEQ ID NO: 283 - DNA, 20 bp, Artificial Sequence
  Antisense compound
ttttctcgttgacaccaaga

SEQ ID NO: 284 - DNA, 20 bp, Artificial Sequence
  Antisense compound
gttttctcgttgacaccaag

SEQ ID NO: 285 - DNA, 20 bp, Artificial Sequence
  Antisense compound
tgttttctcgttgacaccaa

SEQ ID NO: 286 - DNA, 20 bp, Artificial Sequence
  Antisense compound
gtgttttctcgttgacacca

SEQ ID NO: 287 - DNA, 20 bp, Artificial Sequence
  Antisense compound
tgtgttttctcgttgacacc

SEQ ID NO: 288 - DNA, 20 bp, Artificial Sequence
  Antisense compound
gtgtgttttctcgttgacac

SEQ ID NO: 289 - DNA, 20 bp, Artificial Sequence
  Antisense compound
cgtgtgttttctcgttgaca

SEQ ID NO: 290 - DNA, 20 bp, Artificial Sequence
  Antisense compound
acgtgtgttttctcgttgac

SEQ ID NO: 291 - DNA, 20 bp, Artificial Sequence
  Antisense compound
gacgtgtgttttctcgttga

SEQ ID NO: 292 - DNA, 20 bp, Artificial Sequence
  Antisense compound
ggacgtgtgttttctcgttg

SEQ ID NO: 293 - DNA, 20 bp, Artificial Sequence
  Antisense compound
tggacgtgtgttttctcgtt

SEQ ID NO: 294 - DNA, 20 bp, Artificial Sequence
  Antisense compound
ttggacgtgtgttttctcgt

SEQ ID NO: 295 - DNA, 20 bp, Artificial Sequence
  Antisense compound
gttggacgtgtgttttctcg

SEQ ID NO: 296 - DNA, 20 bp, Artificial Sequence
  Antisense compound
agttggacgtgtgttttctc

SEQ ID NO: 297 - DNA, 20 bp, Artificial Sequence
  Antisense compound
gagttggacgtgtgttttct

SEQ ID NO: 298 - DNA, 20 bp, Artificial Sequence
  Antisense compound
tgagttggacgtgtgttttc

SEQ ID NO: 299 - DNA, 20 bp, Artificial Sequence
  Antisense compound
ctgagttggacgtgtgtttt

SEQ ID NO: 300 - DNA, 20 bp, Artificial Sequence
  Antisense compound
actgagttggacgtgtgttt

SEQ ID NO: 301 - DNA, 20 bp, Artificial Sequence
  Antisense compound
aactgagttggacgtgtgtt

SEQ ID NO: 302 - DNA, 20 bp, Artificial Sequence
  Antisense compound
aaactgagttggacgtgtgt

SEQ ID NO: 303 - DNA, 20 bp, Artificial Sequence
  Antisense compound
caaactgagttggacgtgtg

SEQ ID NO: 304 - DNA, 20 bp, Artificial Sequence
  Antisense compound
gcaaactgagttggacgtgt

SEQ ID NO: 305 - DNA, 20 bp, Artificial Sequence
  Antisense compound
ggcaaactgagttggacgtg

SEQ ID NO: 306 - DNA, 20 bp, Artificial Sequence
  Antisense compound
aggcaaactgagttggacgt

SEQ ID NO: 307 - DNA, 20 bp, Artificial Sequence
  Antisense compound
caggcaaactgagttggacg

SEQ ID NO: 308 - DNA, 20 bp, Artificial Sequence
  Antisense compound
acaggcaaactgagttggac

SEQ ID NO: 309 - DNA, 20 bp, Artificial Sequence
  Antisense compound
gacaggcaaactgagttgga

SEQ ID NO: 310 - DNA, 20 bp, Artificial Sequence
  Antisense compound
ggacaggcaaactgagttgg

SEQ ID NO: 311 - DNA, 20 bp, Artificial Sequence
  Antisense compound
aggacaggcaaactgagttg

SEQ ID NO: 312 - DNA, 20 bp, Artificial Sequence
  Antisense compound
aaggacaggcaaactgagtt

SEQ ID NO: 313 - DNA, 20 bp, Artificial Sequence
  Antisense compound
gaaggacaggcaaactgagt

SEQ ID NO: 314 - DNA, 20 bp, Artificial Sequence
  Antisense compound
tgaaggacaggcaaactgag

SEQ ID NO: 315 - DNA, 20 bp, Artificial Sequence
  Antisense compound
ctgaaggacaggcaaactga

SEQ ID NO: 316 - DNA, 20 bp, Artificial Sequence
  Antisense compound
cctgaaggacaggcaaactg

SEQ ID NO: 317 - DNA, 20 bp, Artificial Sequence
  Antisense compound
acctgaaggacaggcaaact

SEQ ID NO: 318 - DNA, 20 bp, Artificial Sequence
  Antisense compound
aacctgaaggacaggcaaac

SEQ ID NO: 319 - DNA, 20 bp, Artificial Sequence
  Antisense compound
taacctgaaggacaggcaaa

SEQ ID NO: 320 - DNA, 20 bp, Artificial Sequence
  Antisense compound
ctaacctgaaggacaggcaa

SEQ ID NO: 321 - DNA, 20 bp, Artificial Sequence
  Antisense compound
tctaacctgaaggacaggca

SEQ ID NO: 322 - DNA, 20 bp, Artificial Sequence
  Antisense compound
ctctaacctgaaggacaggc

SEQ ID NO: 323 - DNA, 20 bp, Artificial Sequence
  Antisense compound
tctctaacctgaaggacagg

SEQ ID NO: 324 - DNA, 20 bp, Artificial Sequence
  Antisense compound
gtctctaacctgaaggacag

SEQ ID NO: 325 - DNA, 20 bp, Artificial Sequence
  Antisense compound
cgtctctaacctgaaggaca

SEQ ID NO: 326 - DNA, 20 bp, Artificial Sequence
  Antisense compound
acgtctctaacctgaaggac

SEQ ID NO: 327 - DNA, 20 bp, Artificial Sequence
  Antisense compound
cacgtctctaacctgaagga

SEQ ID NO: 328 - DNA, 20 bp, Artificial Sequence
  Antisense compound
gcacgtctctaacctgaagg

SEQ ID NO: 329 - DNA, 20 bp, Artificial Sequence
  Antisense compound
agcacgtctctaacctgaag

SEQ ID NO: 330 - DNA, 20 bp, Artificial Sequence
  Antisense compound
tagcacgtctctaacctgaa

SEQ ID NO: 331 - DNA, 20 bp, Artificial Sequence
  Antisense compound
ctagcacgtctctaacctga

SEQ ID NO: 332 - DNA, 20 bp, Artificial Sequence
  Antisense compound
actagcacgtctctaacctg

SEQ ID NO: 333 - DNA, 20 bp, Artificial Sequence
  Antisense compound
cactagcacgtctctaacct

SEQ ID NO: 334 - DNA, 20 bp, Artificial Sequence
  Antisense compound
gcactagcacgtctctaacc

SEQ ID NO: 335 - DNA, 20 bp, Artificial Sequence
  Antisense compound
cgcactagcacgtctctaac

SEQ ID NO: 336 - DNA, 20 bp, Artificial Sequence
  Antisense compound
acgcactagcacgtctctaa

SEQ ID NO: 337 - DNA, 20 bp, Artificial Sequence
  Antisense compound
cacgcactagcacgtctcta

SEQ ID NO: 338 - DNA, 20 bp, Artificial Sequence
  Antisense compound
ccacgcactagcacgtctct

SEQ ID NO: 339 - DNA, 20 bp, Artificial Sequence
  Antisense compound
gccacgcactagcacgtctc

SEQ ID NO: 340 - DNA, 20 bp, Artificial Sequence
  Antisense compound
agccacgcactagcacgtct

SEQ ID NO: 341 - DNA, 20 bp, Artificial Sequence
  Antisense compound
aagccacgcactagcacgtc

SEQ ID NO: 342 - DNA, 20 bp, Artificial Sequence
  Antisense compound
gaagccacgcactagcacgt

SEQ ID NO: 343 - DNA, 20 bp, Artificial Sequence
  Antisense compound
cgaagccacgcactagcacg

SEQ ID NO: 344 - DNA, 20 bp, Artificial Sequence
  Antisense compound
ccgaagccacgcactagcac

SEQ ID NO: 345 - DNA, 20 bp, Artificial Sequence
  Antisense compound
cccgaagccacgcactagca

SEQ ID NO: 346 - DNA, 20 bp, Artificial Sequence
  Antisense compound
ccccgaagccacgcactagc

SEQ ID NO: 347 - DNA, 20 bp, Artificial Sequence
  Antisense compound
tccccgaagccacgcactag

SEQ ID NO: 348 - DNA, 20 bp, Artificial Sequence
  Antisense compound
gtccccgaagccacgcacta

SEQ ID NO: 349 - DNA, 20 bp, Artificial Sequence
  Antisense compound
agtccccgaagccacgcact

SEQ ID NO: 350 - DNA, 20 bp, Artificial Sequence
  Antisense compound
gagtccccgaagccacgcac

SEQ ID NO: 351 - DNA, 20 bp, Artificial Sequence
  Antisense compound
agagtccccgaagccacgca

SEQ ID NO: 352 - DNA, 20 bp, Artificial Sequence
  Antisense compound
cagagtccccgaagccacgc

SEQ ID NO: 353 - DNA, 20 bp, Artificial Sequence
  Antisense compound
acagagtccccgaagccacg

SEQ ID NO: 354 - DNA, 20 bp, Artificial Sequence
  Antisense compound
cacagagtccccgaagccac

SEQ ID NO: 355 - DNA, 20 bp, Artificial Sequence
  Antisense compound
ccacagagtccccgaagcca

SEQ ID NO: 356 - DNA, 20 bp, Artificial Sequence
  Antisense compound
tccacagagtccccgaagcc

SEQ ID NO: 357 - DNA, 20 bp, Artificial Sequence
  Antisense compound
ttccacagagtccccgaagc

SEQ ID NO: 358 - DNA, 20 bp, Artificial Sequence
  Antisense compound
cttccacagagtccccgaag

SEQ ID NO: 359 - DNA, 20 bp, Artificial Sequence
  Antisense compound
tcttccacagagtccccgaa

SEQ ID NO: 360 - DNA, 20 bp, Artificial Sequence
  Antisense compound
ctcttccacagagtccccga

SEQ ID NO: 361 - DNA, 20 bp, Artificial Sequence
  Antisense compound
cctcttccacagagtccccg

SEQ ID NO: 362 - DNA, 20 bp, Artificial Sequence
  Antisense compound
gcctcttccacagagtcccc

SEQ ID NO: 363 - DNA, 20 bp, Artificial Sequence
  Antisense compound
ggcctcttccacagagtccc

SEQ ID NO: 364 - DNA, 20 bp, Artificial Sequence
  Antisense compound
gggcctcttccacagagtcc

SEQ ID NO: 365 - DNA, 20 bp, Artificial Sequence
  Antisense compound
agggcctcttccacagagtc

SEQ ID NO: 366 - DNA, 20 bp, Artificial Sequence
  Antisense compound
tagggcctcttccacagagt

SEQ ID NO: 367 - DNA, 20 bp, Artificial Sequence
  Antisense compound
atagggcctcttccacagag

SEQ ID NO: 368 - DNA, 20 bp, Artificial Sequence
  Antisense compound
gatagggcctcttccacaga

SEQ ID NO: 369 - DNA, 20 bp, Artificial Sequence
  Antisense compound
cgatagggcctcttccacag

SEQ ID NO: 370 - DNA, 20 bp, Artificial Sequence
  Antisense compound
ccgatagggcctcttccaca

SEQ ID NO: 371 - DNA, 20 bp, Artificial Sequence
  Antisense compound
tccgatagggcctcttccac

SEQ ID NO: 372 - DNA, 20 bp, Artificial Sequence
  Antisense compound
ctccgatagggcctcttcca

SEQ ID NO: 373 - DNA, 20 bp, Artificial Sequence
  Antisense compound
cctccgatagggcctcttcc

SEQ ID NO: 374 - DNA, 20 bp, Artificial Sequence
  Antisense compound
gcctccgatagggcctcttc

SEQ ID NO: 375 - DNA, 20 bp, Artificial Sequence
  Antisense compound
tgcctccgatagggcctctt

SEQ ID NO: 376 - DNA, 20 bp, Artificial Sequence
  Antisense compound
gtgcctccgatagggcctct

SEQ ID NO: 377 - DNA, 20 bp, Artificial Sequence
  Antisense compound
cgtgcctccgatagggcctc

SEQ ID NO: 378 - DNA, 20 bp, Artificial Sequence
  Antisense compound
acgtgcctccgatagggcct

SEQ ID NO: 379 - DNA, 20 bp, Artificial Sequence
  Antisense compound
cacgtgcctccgatagggcc

SEQ ID NO: 380 - DNA, 20 bp, Artificial Sequence
  Antisense compound
tcacgtgcctccgatagggc

SEQ ID NO: 381 - DNA, 20 bp, Artificial Sequence
  Antisense compound
ttcacgtgcctccgataggg

SEQ ID NO: 382 - DNA, 20 bp, Artificial Sequence
  Antisense compound
gttcacgtgcctccgatagg

SEQ ID NO: 383 - DNA, 20 bp, Artificial Sequence
  Antisense compound
tgttcacgtgcctccgatag

SEQ ID NO: 384 - DNA, 20 bp, Artificial Sequence
  Antisense compound
gtgttcacgtgcctccgata

SEQ ID NO: 385 - DNA, 20 bp, Artificial Sequence
  Antisense compound
ggtgttcacgtgcctccgat

SEQ ID NO: 386 - DNA, 20 bp, Artificial Sequence
  Antisense compound
aggtgttcacgtgcctccga

SEQ ID NO: 387 - DNA, 20 bp, Artificial Sequence
  Antisense compound
gaggtgttcacgtgcctccg

SEQ ID NO: 388 - DNA, 20 bp, Artificial Sequence
  Antisense compound
tgaggtgttcacgtgcctcc

SEQ ID NO: 389 - DNA, 20 bp, Artificial Sequence
  Antisense compound
ttgaggtgttcacgtgcctc

SEQ ID NO: 390 - DNA, 20 bp, Artificial Sequence
  Antisense compound
tttgaggtgttcacgtgcct

SEQ ID NO: 391 - DNA, 20 bp, Artificial Sequence
  Antisense compound
ttttgaggtgttcacgtgcc

SEQ ID NO: 392 - DNA, 20 bp, Artificial Sequence
  Antisense compound
tttttgaggtgttcacgtgc

SEQ ID NO: 393 - DNA, 20 bp, Artificial Sequence
  Antisense compound
atttttgaggtgttcacgtg

SEQ ID NO: 394 - DNA, 20 bp, Artificial Sequence
  Antisense compound
catttttgaggtgttcacgt

SEQ ID NO: 395 - DNA, 20 bp, Artificial Sequence
  Antisense compound
ccatttttgaggtgttcacg

SEQ ID NO: 396 - DNA, 20 bp, Artificial Sequence
  Antisense compound
gccatttttgaggtgttcac

SEQ ID NO: 397 - DNA, 20 bp, Artificial Sequence
  Antisense compound
tgccatttttgaggtgttca

SEQ ID NO: 398 - DNA, 20 bp, Artificial Sequence
  Antisense compound
gtgccatttttgaggtgttc

SEQ ID NO: 399 - DNA, 20 bp, Artificial Sequence
  Antisense compound
agtgccatttttgaggtgtt

SEQ ID NO: 400 - DNA, 20 bp, Artificial Sequence
  Antisense compound
aagtgccatttttgaggtgt

SEQ ID NO: 401 - DNA, 20 bp, Artificial Sequence
  Antisense compound
caagtgccatttttgaggtg

SEQ ID NO: 402 - DNA, 20 bp, Artificial Sequence
  Antisense compound
acaagtgccatttttgaggt

SEQ ID NO: 403 - DNA, 20 bp, Artificial Sequence
  Antisense compound
cacaagtgccatttttgagg

SEQ ID NO: 404 - DNA, 20 bp, Artificial Sequence
  Antisense compound
ccacaagtgccatttttgag

SEQ ID NO: 405 - DNA, 20 bp, Artificial Sequence
  Antisense compound
accacaagtgccatttttga

SEQ ID NO: 406 - DNA, 20 bp, Artificial Sequence
  Antisense compound
gaccacaagtgccatttttg

SEQ ID NO: 407 - DNA, 20 bp, Artificial Sequence
  Antisense compound
agaccacaagtgccattttt

SEQ ID NO: 408 - DNA, 20 bp, Artificial Sequence
  Antisense compound
tagaccacaagtgccatttt

SEQ ID NO: 409 - DNA, 20 bp, Artificial Sequence
  Antisense compound
ctagaccacaagtgccattt

SEQ ID NO: 410 - DNA, 20 bp, Artificial Sequence
  Antisense compound
actagaccacaagtgccatt

SEQ ID NO: 411 - DNA, 20 bp, Artificial Sequence
  Antisense compound
tactagaccacaagtgccat

SEQ ID NO: 412 - DNA, 20 bp, Artificial Sequence
  Antisense compound
ctactagaccacaagtgcca

SEQ ID NO: 413 - DNA, 20 bp, Artificial Sequence
  Antisense compound
tctactagaccacaagtgcc

SEQ ID NO: 414 - DNA, 20 bp, Artificial Sequence
  Antisense compound
ctctactagaccacaagtgc

SEQ ID NO: 415 - DNA, 20 bp, Artificial Sequence
  Antisense compound
gctctactagaccacaagtg

SEQ ID NO: 416 - DNA, 20 bp, Artificial Sequence
  Antisense compound
agctctactagaccacaagt

SEQ ID NO: 417 - DNA, 20 bp, Artificial Sequence
  Antisense compound
cagctctactagaccacaag

SEQ ID NO: 418 - DNA, 20 bp, Artificial Sequence
  Antisense compound
ccagctctactagaccacaa

SEQ ID NO: 419 - DNA, 20 bp, Artificial Sequence
  Antisense compound
tccagctctactagaccaca

SEQ ID NO: 420 - DNA, 20 bp, Artificial Sequence
  Antisense compound
ttccagctctactagaccac

SEQ ID NO: 421 - DNA, 20 bp, Artificial Sequence
  Antisense compound
tttccagctctactagacca

SEQ ID NO: 422 - DNA, 20 bp, Artificial Sequence
  Antisense compound
ttttccagctctactagacc

SEQ ID NO: 423 - DNA, 20 bp, Artificial Sequence
  Antisense compound
tttttccagctctactagac

SEQ ID NO: 424 - DNA, 20 bp, Artificial Sequence
  Antisense compound
ctttttccagctctactaga

SEQ ID NO: 425 - DNA, 20 bp, Artificial Sequence
  Antisense compound
cctttttccagctctactag

SEQ ID NO: 426 - DNA, 20 bp, Artificial Sequence
  Antisense compound
gcctttttccagctctacta

SEQ ID NO: 427 - DNA, 20 bp, Artificial Sequence
  Antisense compound
cgcctttttccagctctact

SEQ ID NO: 428 - DNA, 20 bp, Artificial Sequence
  Antisense compound
acgcctttttccagctctac

SEQ ID NO: 429 - DNA, 20 bp, Artificial Sequence
  Antisense compound
tacgcctttttccagctcta

SEQ ID NO: 430 - DNA, 20 bp, Artificial Sequence
  Antisense compound
gtacgcctttttccagctct

SEQ ID NO: 431 - DNA, 20 bp, Artificial Sequence
  Antisense compound
agtacgcctttttccagctc

SEQ ID NO: 432 - DNA, 20 bp, Artificial Sequence
  Antisense compound
cagtacgcctttttccagct

SEQ ID NO: 433 - DNA, 20 bp, Artificial Sequence
  Antisense compound
gcagtacgcctttttccagc

SEQ ID NO: 434 - DNA, 20 bp, Artificial Sequence
  Antisense compound
ggcagtacgcctttttccag

SEQ ID NO: 435 - DNA, 20 bp, Artificial Sequence
  Antisense compound
gggcagtacgcctttttcca

SEQ ID NO: 436 - DNA, 20 bp, Artificial Sequence
  Antisense compound
ggggcagtacgcctttttcc

SEQ ID NO: 437 - DNA, 20 bp, Artificial Sequence
  Antisense compound
tggggcagtacgcctttttc

SEQ ID NO: 438 - DNA, 20 bp, Artificial Sequence
  Antisense compound
ctggggcagtacgccttttt

SEQ ID NO: 439 - DNA, 20 bp, Artificial Sequence
  Antisense compound
gctggggcagtacgcctttt

SEQ ID NO: 440 - DNA, 20 bp, Artificial Sequence
  Antisense compound
agctggggcagtacgccttt

SEQ ID NO: 441 - DNA, 20 bp, Artificial Sequence
  Antisense compound
aagctggggcagtacgcctt

SEQ ID NO: 442 - DNA, 20 bp, Artificial Sequence
  Antisense compound
caagctggggcagtacgcct

SEQ ID NO: 443 - DNA, 20 bp, Artificial Sequence
  Antisense compound
tcaagctggggcagtacgcc

SEQ ID NO: 444 - DNA, 20 bp, Artificial Sequence
  Antisense compound
ttcaagctggggcagtacgc

SEQ ID NO: 445 - DNA, 20 bp, Artificial Sequence
  Antisense compound
gttcaagctggggcagtacg

SEQ ID NO: 446 - DNA, 20 bp, Artificial Sequence
  Antisense compound
tgttcaagctggggcagtac

SEQ ID NO: 447 - DNA, 20 bp, Artificial Sequence
  Antisense compound
ctgttcaagctggggcagta

SEQ ID NO: 448 - DNA, 20 bp, Artificial Sequence
  Antisense compound
gctgttcaagctggggcagt

SEQ ID NO: 449 - DNA, 20 bp, Artificial Sequence
  Antisense compound
ggctgttcaagctggggcag

SEQ ID NO: 450 - DNA, 20 bp, Artificial Sequence
  Antisense compound
gggctgttcaagctggggca

SEQ ID NO: 451 - DNA, 20 bp, Artificial Sequence
  Antisense compound
agggctgttcaagctggggc

SEQ ID NO: 452 - DNA, 20 bp, Artificial Sequence
  Antisense compound
tagggctgttcaagctgggg

SEQ ID NO: 453 - DNA, 20 bp, Artificial Sequence
  Antisense compound
atagggctgttcaagctggg

SEQ ID NO: 454 - DNA, 20 bp, Artificial Sequence
  Antisense compound
catagggctgttcaagctgg

SEQ ID NO: 455 - DNA, 20 bp, Artificial Sequence
  Antisense compound
acatagggctgttcaagctg

SEQ ID NO: 456 - DNA, 20 bp, Artificial Sequence
  Antisense compound
cacatagggctgttcaagct

SEQ ID NO: 457 - DNA, 20 bp, Artificial Sequence
  Antisense compound
acacatagggctgttcaagc

SEQ ID NO: 458 - DNA, 20 bp, Artificial Sequence
  Antisense compound
aacacatagggctgttcaag

SEQ ID NO: 459 - DNA, 20 bp, Artificial Sequence
  Antisense compound
gaacacatagggctgttcaa

SEQ ID NO: 460 - DNA, 20 bp, Artificial Sequence
  Antisense compound
tgaacacatagggctgttca

SEQ ID NO: 461 - DNA, 20 bp, Artificial Sequence
  Antisense compound
atgaacacatagggctgttc

SEQ ID NO: 462 - DNA, 20 bp, Artificial Sequence
  Antisense compound
aatgaacacatagggctgtt

SEQ ID NO: 463 - DNA, 20 bp, Artificial Sequence
  Antisense compound
taatgaacacatagggctgt

SEQ ID NO: 464 - DNA, 20 bp, Artificial Sequence
  Antisense compound
ttaatgaacacatagggctg

SEQ ID NO: 465 - DNA, 20 bp, Artificial Sequence
  Antisense compound
tttaatgaacacatagggct

SEQ ID NO: 466 - DNA, 20 bp, Artificial Sequence
  Antisense compound
gtttaatgaacacatagggc

SEQ ID NO: 467 - DNA, 20 bp, Artificial Sequence
  Antisense compound
cgtttaatgaacacataggg

SEQ ID NO: 468 - DNA, 20 bp, Artificial Sequence
  Antisense compound
acgtttaatgaacacatagg

SEQ ID NO: 469 - DNA, 20 bp, Artificial Sequence
  Antisense compound
aacgtttaatgaacacatag

SEQ ID NO: 470 - DNA, 20 bp, Artificial Sequence
  Antisense compound
gaacgtttaatgaacacata

SEQ ID NO: 471 - DNA, 20 bp, Artificial Sequence
  Antisense compound
agaacgtttaatgaacacat

SEQ ID NO: 472 - DNA, 20 bp, Artificial Sequence
  Antisense compound
cagaacgtttaatgaacaca

SEQ ID NO: 473 - DNA, 20 bp, Artificial Sequence
  Antisense compound
tcagaacgtttaatgaacac

SEQ ID NO: 474 - DNA, 20 bp, Artificial Sequence
  Antisense compound
atcagaacgtttaatgaaca

SEQ ID NO: 475 - DNA, 20 bp, Artificial Sequence
  Antisense compound
catcagaacgtttaatgaac

SEQ ID NO: 476 - DNA, 20 bp, Artificial Sequence
  Antisense compound
gcatcagaacgtttaatgaa

SEQ ID NO: 477 - DNA, 20 bp, Artificial Sequence
  Antisense compound
ggcatcagaacgtttaatga

SEQ ID NO: 478 - DNA, 20 bp, Artificial Sequence
  Antisense compound
aggcatcagaacgtttaatg

SEQ ID NO: 479 - DNA, 20 bp, Artificial Sequence
  Antisense compound
aaggcatcagaacgtttaat

SEQ ID NO: 480 - DNA, 20 bp, Artificial Sequence
  Antisense compound
taaggcatcagaacgtttaa

SEQ ID NO: 481 - DNA, 20 bp, Artificial Sequence
  Antisense compound
ttaaggcatcagaacgttta

SEQ ID NO: 482 - DNA, 20 bp, Artificial Sequence
  Antisense compound
cttaaggcatcagaacgttt

SEQ ID NO: 483 - DNA, 20 bp, Artificial Sequence
  Antisense compound
gcttaaggcatcagaacgtt

SEQ ID NO: 484 - DNA, 20 bp, Artificial Sequence
  Antisense compound
tgcttaaggcatcagaacgt

SEQ ID NO: 485 - DNA, 20 bp, Artificial Sequence
  Antisense compound
gtgcttaaggcatcagaacg

SEQ ID NO: 486 - DNA, 20 bp, Artificial Sequence
  Antisense compound
ggtgcttaaggcatcagaac

SEQ ID NO: 487 - DNA, 20 bp, Artificial Sequence
  Antisense compound
tggtgcttaaggcatcagaa

SEQ ID NO: 488 - DNA, 20 bp, Artificial Sequence
  Antisense compound
ttggtgcttaaggcatcaga

SEQ ID NO: 489 - DNA, 20 bp, Artificial Sequence
  Antisense compound
attggtgcttaaggcatcag

SEQ ID NO: 490 - DNA, 20 bp, Artificial Sequence
  Antisense compound
gattggtgcttaaggcatca

SEQ ID NO: 491 - DNA, 20 bp, Artificial Sequence
  Antisense compound
tgattggtgcttaaggcatc

SEQ ID NO: 492 - DNA, 20 bp, Artificial Sequence
  Antisense compound
gtgattggtgcttaaggcat

SEQ ID NO: 493 - DNA, 20 bp, Artificial Sequence
  Antisense compound
cgtgattggtgcttaaggca

SEQ ID NO: 494 - DNA, 20 bp, Artificial Sequence
  Antisense compound
ccgtgattggtgcttaaggc

SEQ ID NO: 495 - DNA, 20 bp, Artificial Sequence
  Antisense compound
gccgtgattggtgcttaagg

SEQ ID NO: 496 - DNA, 20 bp, Artificial Sequence
  Antisense compound
ggccgtgattggtgcttaag

SEQ ID NO: 497 - DNA, 20 bp, Artificial Sequence
  Antisense compound
tggccgtgattggtgcttaa

SEQ ID NO: 498 - DNA, 20 bp, Artificial Sequence
  Antisense compound
gtggccgtgattggtgctta

SEQ ID NO: 499 - DNA, 20 bp, Artificial Sequence
  Antisense compound
tgtggccgtgattggtgctt

SEQ ID NO: 500 - DNA, 20 bp, Artificial Sequence
  Antisense compound
ttgtggccgtgattggtgct

SEQ ID NO: 501 - DNA, 20 bp, Artificial Sequence
  Antisense compound
cttgtggccgtgattggtgc

SEQ ID NO: 502 - DNA, 20 bp, Artificial Sequence
  Antisense compound
ccttgtggccgtgattggtg

SEQ ID NO: 503 - DNA, 20 bp, Artificial Sequence
  Antisense compound
accttgtggccgtgattggt

SEQ ID NO: 504 - DNA, 20 bp, Artificial Sequence
  Antisense compound
gaccttgtggccgtgattgg

SEQ ID NO: 505 - DNA, 20 bp, Artificial Sequence
  Antisense compound
cgaccttgtggccgtgattg

SEQ ID NO: 506 - DNA, 20 bp, Artificial Sequence
  Antisense compound
acgaccttgtggccgtgatt

SEQ ID NO: 507 - DNA, 20 bp, Artificial Sequence
  Antisense compound
aacgaccttgtggccgtgat

SEQ ID NO: 508 - DNA, 20 bp, Artificial Sequence
  Antisense compound
caacgaccttgtggccgtga

SEQ ID NO: 509 - DNA, 20 bp, Artificial Sequence
  Antisense compound
tcaacgaccttgtggccgtg

SEQ ID NO: 510 - DNA, 20 bp, Artificial Sequence
  Antisense compound
ctcaacgaccttgtggccgt

SEQ ID NO: 511 - DNA, 20 bp, Artificial Sequence
  Antisense compound
gctcaacgaccttgtggccg

SEQ ID NO: 512 - DNA, 20 bp, Artificial Sequence
  Antisense compound
agctcaacgaccttgtggcc

SEQ ID NO: 513 - DNA, 20 bp, Artificial Sequence
  Antisense compound
cagctcaacgaccttgtggc

SEQ ID NO: 514 - DNA, 20 bp, Artificial Sequence
  Antisense compound
ccagctcaacgaccttgtgg

SEQ ID NO: 515 - DNA, 20 bp, Artificial Sequence
  Antisense compound
accagctcaacgaccttgtg

SEQ ID NO: 516 - DNA, 20 bp, Artificial Sequence
  Antisense compound
aaccagctcaacgaccttgt

SEQ ID NO: 517 - DNA, 20 bp, Artificial Sequence
  Antisense compound
caaccagctcaacgaccttg

SEQ ID NO: 518 - DNA, 20 bp, Artificial Sequence
  Antisense compound
gcaaccagctcaacgacctt

SEQ ID NO: 519 - DNA, 20 bp, Artificial Sequence
  Antisense compound
tgcaaccagctcaacgacct

SEQ ID NO: 520 - DNA, 20 bp, Artificial Sequence
  Antisense compound
ctgcaaccagctcaacgacc

SEQ ID NO: 521 - DNA, 20 bp, Artificial Sequence
  Antisense compound
tctgcaaccagctcaacgac

SEQ ID NO: 522 - DNA, 20 bp, Artificial Sequence
  Antisense compound
ttctgcaaccagctcaacga

SEQ ID NO: 523 - DNA, 20 bp, Artificial Sequence
  Antisense compound
tttctgcaaccagctcaacg

SEQ ID NO: 524 - DNA, 20 bp, Artificial Sequence
  Antisense compound
atttctgcaaccagctcaac

SEQ ID NO: 525 - DNA, 20 bp, Artificial Sequence
  Antisense compound
catttctgcaaccagctcaa

SEQ ID NO: 526 - DNA, 20 bp, Artificial Sequence
  Antisense compound
ccatttctgcaaccagctca

SEQ ID NO: 527 - DNA, 20 bp, Artificial Sequence
  Antisense compound
tccatttctgcaaccagctc

SEQ ID NO: 528 - DNA, 20 bp, Artificial Sequence
  Antisense compound
gtccatttctgcaaccagct

SEQ ID NO: 529 - DNA, 20 bp, Artificial Sequence
  Antisense compound
cgtccatttctgcaaccagc

SEQ ID NO: 530 - DNA, 20 bp, Artificial Sequence
  Antisense compound
ccgtccatttctgcaaccag

SEQ ID NO: 531 - DNA, 20 bp, Artificial Sequence
  Antisense compound
gccgtccatttctgcaacca

SEQ ID NO: 532 - DNA, 20 bp, Artificial Sequence
  Antisense compound
tgccgtccatttctgcaacc

SEQ ID NO: 533 - DNA, 20 bp, Artificial Sequence
  Antisense compound
atgccgtccatttctgcaac

SEQ ID NO: 534 - DNA, 20 bp, Artificial Sequence
  Antisense compound
aatgccgtccatttctgcaa

SEQ ID NO: 535 - DNA, 20 bp, Artificial Sequence
  Antisense compound
gaatgccgtccatttctgca

SEQ ID NO: 536 - DNA, 20 bp, Artificial Sequence
  Antisense compound
tgaatgccgtccatttctgc

SEQ ID NO: 537 - DNA, 20 bp, Artificial Sequence
  Antisense compound
ctgaatgccgtccatttctg

SEQ ID NO: 538 - DNA, 20 bp, Artificial Sequence
  Antisense compound
actgaatgccgtccatttct

SEQ ID NO: 539 - DNA, 20 bp, Artificial Sequence
  Antisense compound
tactgaatgccgtccatttc

SEQ ID NO: 540 - DNA, 20 bp, Artificial Sequence
  Antisense compound
gtactgaatgccgtccattt

SEQ ID NO: 541 - DNA, 20 bp, Artificial Sequence
  Antisense compound
cgtactgaatgccgtccatt

SEQ ID NO: 542 - DNA, 20 bp, Artificial Sequence
  Antisense compound
ccgtactgaatgccgtccat

SEQ ID NO: 543 - DNA, 20 bp, Artificial Sequence
  Antisense compound
accgtactgaatgccgtcca

SEQ ID NO: 544 - DNA, 20 bp, Artificial Sequence
  Antisense compound
gaccgtactgaatgccgtcc

SEQ ID NO: 545 - DNA, 20 bp, Artificial Sequence
  Antisense compound
cgaccgtactgaatgccgtc

SEQ ID NO: 546 - DNA, 20 bp, Artificial Sequence
  Antisense compound
acgaccgtactgaatgccgt

SEQ ID NO: 547 - DNA, 20 bp, Artificial Sequence
  Antisense compound
tacgaccgtactgaatgccg

SEQ ID NO: 548 - DNA, 20 bp, Artificial Sequence
  Antisense compound
ctacgaccgtactgaatgcc

SEQ ID NO: 549 - DNA, 20 bp, Artificial Sequence
  Antisense compound
gctacgaccgtactgaatgc

SEQ ID NO: 550 - DNA, 20 bp, Artificial Sequence
  Antisense compound
cgctacgaccgtactgaatg

SEQ ID NO: 551 - DNA, 20 bp, Artificial Sequence
  Antisense compound
ccgctacgaccgtactgaat

SEQ ID NO: 552 - DNA, 20 bp, Artificial Sequence
  Antisense compound
accgctacgaccgtactgaa

SEQ ID NO: 553 - DNA, 20 bp, Artificial Sequence
  Antisense compound
taccgctacgaccgtactga

SEQ ID NO: 554 - DNA, 20 bp, Artificial Sequence
  Antisense compound
ataccgctacgaccgtactg

SEQ ID NO: 555 - DNA, 20 bp, Artificial Sequence
  Antisense compound
tataccgctacgaccgtact

SEQ ID NO: 556 - DNA, 20 bp, Artificial Sequence
  Antisense compound
ttataccgctacgaccgtac

SEQ ID NO: 557 - DNA, 20 bp, Artificial Sequence
  Antisense compound
gttataccgctacgaccgta

SEQ ID NO: 558 - DNA, 20 bp, Artificial Sequence
  Antisense compound
tgttataccgctacgaccgt

SEQ ID NO: 559 - DNA, 20 bp, Artificial Sequence
  Antisense compound
gtgttataccgctacgaccg

SEQ ID NO: 560 - DNA, 20 bp, Artificial Sequence
  Antisense compound
agtgttataccgctacgacc

SEQ ID NO: 561 - DNA, 20 bp, Artificial Sequence
  Antisense compound
cagtgttataccgctacgac

SEQ ID NO: 562 - DNA, 20 bp, Artificial Sequence
  Antisense compound
ccagtgttataccgctacga

SEQ ID NO: 563 - DNA, 20 bp, Artificial Sequence
  Antisense compound
cccagtgttataccgctacg

SEQ ID NO: 564 - DNA, 20 bp, Artificial Sequence
  Antisense compound
tcccagtgttataccgctac

SEQ ID NO: 565 - DNA, 20 bp, Artificial Sequence
  Antisense compound
ctcccagtgttataccgcta

SEQ ID NO: 566 - DNA, 20 bp, Artificial Sequence
  Antisense compound
actcccagtgttataccgct

SEQ ID NO: 567 - DNA, 20 bp, Artificial Sequence
  Antisense compound
tactcccagtgttataccgc

SEQ ID NO: 568 - DNA, 20 bp, Artificial Sequence
  Antisense compound
gtactcccagtgttataccg

SEQ ID NO: 569 - DNA, 20 bp, Artificial Sequence
  Antisense compound
agtactcccagtgttatacc

SEQ ID NO: 570 - DNA, 20 bp, Artificial Sequence
  Antisense compound
gagtactcccagtgttatac

SEQ ID NO: 571 - DNA, 20 bp, Artificial Sequence
  Antisense compound
cgagtactcccagtgttata

SEQ ID NO: 572 - DNA, 20 bp, Artificial Sequence
  Antisense compound
acgagtactcccagtgttat

SEQ ID NO: 573 - DNA, 20 bp, Artificial Sequence
  Antisense compound
cacgagtactcccagtgtta

SEQ ID NO: 574 - DNA, 20 bp, Artificial Sequence
  Antisense compound
gcacgagtactcccagtgtt

SEQ ID NO: 575 - DNA, 20 bp, Artificial Sequence
  Antisense compound
ggcacgagtactcccagtgt

SEQ ID NO: 576 - DNA, 20 bp, Artificial Sequence
  Antisense compound
tggcacgagtactcccagtg

SEQ ID NO: 577 - DNA, 20 bp, Artificial Sequence
  Antisense compound
gtggcacgagtactcccagt

SEQ ID NO: 578 - DNA, 20 bp, Artificial Sequence
  Antisense compound
tgtggcacgagtactcccag

SEQ ID NO: 579 - DNA, 20 bp, Artificial Sequence
  Antisense compound
atgtggcacgagtactccca

SEQ ID NO: 580 - DNA, 20 bp, Artificial Sequence
  Antisense compound
catgtggcacgagtactccc

SEQ ID NO: 581 - DNA, 20 bp, Artificial Sequence
  Antisense compound
acatgtggcacgagtactcc

SEQ ID NO: 582 - DNA, 20 bp, Artificial Sequence
  Antisense compound
cacatgtggcacgagtactc

SEQ ID NO: 583 - DNA, 20 bp, Artificial Sequence
  Antisense compound
ccacatgtggcacgagtact

SEQ ID NO: 584 - DNA, 20 bp, Artificial Sequence
  Antisense compound
cccacatgtggcacgagtac

SEQ ID NO: 585 - DNA, 20 bp, Artificial Sequence
  Antisense compound
gcccacatgtggcacgagta

SEQ ID NO: 586 - DNA, 20 bp, Artificial Sequence
  Antisense compound
cgcccacatgtggcacgagt

SEQ ID NO: 587 - DNA, 20 bp, Artificial Sequence
  Antisense compound
tcgcccacatgtggcacgag

SEQ ID NO: 588 - DNA, 20 bp, Artificial Sequence
  Antisense compound
ttcgcccacatgtggcacga

SEQ ID NO: 589 - DNA, 20 bp, Artificial Sequence
  Antisense compound
tttcgcccacatgtggcacg

SEQ ID NO: 590 - DNA, 20 bp, Artificial Sequence
  Antisense compound
gtttcgcccacatgtggcac

SEQ ID NO: 591 - DNA, 20 bp, Artificial Sequence
  Antisense compound
ggtttcgcccacatgtggca

SEQ ID NO: 592 - DNA, 20 bp, Artificial Sequence
  Antisense compound
gggtttcgcccacatgtggc

SEQ ID NO: 593 - DNA, 20 bp, Artificial Sequence
  Antisense compound
ggggtttcgcccacatgtgg

SEQ ID NO: 594 - DNA, 20 bp, Artificial Sequence
  Antisense compound
tggggtttcgcccacatgtg

SEQ ID NO: 595 - DNA, 20 bp, Artificial Sequence
  Antisense compound
ttggggtttcgcccacatgt

SEQ ID NO: 596 - DNA, 20 bp, Artificial Sequence
  Antisense compound
attggggtttcgcccacatg

SEQ ID NO: 597 - DNA, 20 bp, Artificial Sequence
  Antisense compound
aattggggtttcgcccacat

SEQ ID NO: 598 - DNA, 20 bp, Artificial Sequence
  Antisense compound
caattggggtttcgcccaca

SEQ ID NO: 599 - DNA, 20 bp, Artificial Sequence
  Antisense compound
gcaattggggtttcgcccac

SEQ ID NO: 600 - DNA, 20 bp, Artificial Sequence
  Antisense compound
tgcaattggggtttcgccca

SEQ ID NO: 601 - DNA, 20 bp, Artificial Sequence
  Antisense compound
atgcaattggggtttcgccc

SEQ ID NO: 602 - DNA, 20 bp, Artificial Sequence
  Antisense compound
tatgcaattggggtttcgcc

SEQ ID NO: 603 - DNA, 20 bp, Artificial Sequence
  Antisense compound
gtatgcaattggggtttcgc

SEQ ID NO: 604 - DNA, 20 bp, Artificial Sequence
  Antisense compound
ggtatgcaattggggtttcg

SEQ ID NO: 605 - DNA, 20 bp, Artificial Sequence
  Antisense compound
cggtatgcaattggggtttc

SEQ ID NO: 606 - DNA, 20 bp, Artificial Sequence
  Antisense compound
gcggtatgcaattggggttt

SEQ ID NO: 607 - DNA, 20 bp, Artificial Sequence
  Antisense compound
tgcggtatgcaattggggtt

SEQ ID NO: 608 - DNA, 20 bp, Artificial Sequence
  Antisense compound
ttgcggtatgcaattggggt

SEQ ID NO: 609 - DNA, 20 bp, Artificial Sequence
  Antisense compound
attgcggtatgcaattgggg

SEQ ID NO: 610 - DNA, 20 bp, Artificial Sequence
  Antisense compound
cattgcggtatgcaattggg

SEQ ID NO: 611 - DNA, 20 bp, Artificial Sequence
  Antisense compound
acattgcggtatgcaattgg

SEQ ID NO: 612 - DNA, 20 bp, Artificial Sequence
  Antisense compound
aacattgcggtatgcaattg

SEQ ID NO: 613 - DNA, 20 bp, Artificial Sequence
  Antisense compound
gaacattgcggtatgcaatt

SEQ ID NO: 614 - DNA, 20 bp, Artificial Sequence
  Antisense compound
agaacattgcggtatgcaat

SEQ ID NO: 615 - DNA, 20 bp, Artificial Sequence
  Antisense compound
aagaacattgcggtatgcaa

SEQ ID NO: 616 - DNA, 20 bp, Artificial Sequence
  Antisense compound
gaagaacattgcggtatgca

SEQ ID NO: 617 - DNA, 20 bp, Artificial Sequence
  Antisense compound
agaagaacattgcggtatgc

SEQ ID NO: 618 - DNA, 20 bp, Artificial Sequence
  Antisense compound
aagaagaacattgcggtatg

SEQ ID NO: 619 - DNA, 20 bp, Artificial Sequence
  Antisense compound
gaagaagaacattgcggtat

SEQ ID NO: 620 - DNA, 20 bp, Artificial Sequence
  Antisense compound
cgaagaagaacattgcggta

SEQ ID NO: 621 - DNA, 20 bp, Artificial Sequence
  Antisense compound
acgaagaagaacattgcggt

SEQ ID NO: 622 - DNA, 20 bp, Artificial Sequence
  Antisense compound
tacgaagaagaacattgcgg

SEQ ID NO: 623 - DNA, 20 bp, Artificial Sequence
  Antisense compound
ttacgaagaagaacattgcg

SEQ ID NO: 624 - DNA, 20 bp, Artificial Sequence
  Antisense compound
cttacgaagaagaacattgc

SEQ ID NO: 625 - DNA, 20 bp, Artificial Sequence
  Antisense compound
tcttacgaagaagaacattg

SEQ ID NO: 626 - DNA, 20 bp, Artificial Sequence
  Antisense compound
ttcttacgaagaagaacatt

SEQ ID NO: 627 - DNA, 20 bp, Artificial Sequence
  Antisense compound
gttcttacgaagaagaacat

SEQ ID NO: 628 - DNA, 20 bp, Artificial Sequence
  Antisense compound
cgttcttacgaagaagaaca

SEQ ID NO: 629 - DNA, 20 bp, Artificial Sequence
  Antisense compound
ccgttcttacgaagaagaac

SEQ ID NO: 630 - DNA, 20 bp, Artificial Sequence
  Antisense compound
accgttcttacgaagaagaa

SEQ ID NO: 631 - DNA, 20 bp, Artificial Sequence
  Antisense compound
taccgttcttacgaagaaga

SEQ ID NO: 632 - DNA, 20 bp, Artificial Sequence
  Antisense compound
ttaccgttcttacgaagaag

SEQ ID NO: 633 - DNA, 20 bp, Artificial Sequence
  Antisense compound
attaccgttcttacgaagaa

SEQ ID NO: 634 - DNA, 20 bp, Artificial Sequence
  Antisense compound
tattaccgttcttacgaaga

SEQ ID NO: 635 - DNA, 20 bp, Artificial Sequence
  Antisense compound
ttattaccgttcttacgaag

SEQ ID NO: 636 - DNA, 20 bp, Artificial Sequence
  Antisense compound
cttattaccgttcttacgaa

SEQ ID NO: 637 - DNA, 20 bp, Artificial Sequence
  Antisense compound
ccttattaccgttcttacga

SEQ ID NO: 638 - DNA, 20 bp, Artificial Sequence
  Antisense compound
cccttattaccgttcttacg

SEQ ID NO: 639 - DNA, 20 bp, Artificial Sequence
  Antisense compound
tcccttattaccgttcttac

SEQ ID NO: 640 - DNA, 20 bp, Artificial Sequence
  Antisense compound
ctcccttattaccgttctta

SEQ ID NO: 641 - DNA, 20 bp, Artificial Sequence
  Antisense compound
gctcccttattaccgttctt

SEQ ID NO: 642 - DNA, 20 bp, Artificial Sequence
  Antisense compound
ggctcccttattaccgttct

SEQ ID NO: 643 - DNA, 20 bp, Artificial Sequence
  Antisense compound
cggctcccttattaccgttc

SEQ ID NO: 644 - DNA, 20 bp, Artificial Sequence
  Antisense compound
ccggctcccttattaccgtt

SEQ ID NO: 645 - DNA, 20 bp, Artificial Sequence
  Antisense compound
accggctcccttattaccgt

SEQ ID NO: 646 - DNA, 20 bp, Artificial Sequence
  Antisense compound
caccggctcccttattaccg

SEQ ID NO: 647 - DNA, 20 bp, Artificial Sequence
  Antisense compound
ccaccggctcccttattacc

SEQ ID NO: 648 - DNA, 20 bp, Artificial Sequence
  Antisense compound
accaccggctcccttattac

SEQ ID NO: 649 - DNA, 20 bp, Artificial Sequence
  Antisense compound
gaccaccggctcccttatta

SEQ ID NO: 650 - DNA, 20 bp, Artificial Sequence
  Antisense compound
tgaccaccggctcccttatt

SEQ ID NO: 651 - DNA, 20 bp, Artificial Sequence
  Antisense compound
atgaccaccggctcccttat

SEQ ID NO: 652 - DNA, 20 bp, Artificial Sequence
  Antisense compound
tatgaccaccggctccctta

SEQ ID NO: 653 - DNA, 20 bp, Artificial Sequence
  Antisense compound
ctatgaccaccggctccctt

SEQ ID NO: 654 - DNA, 20 bp, Artificial Sequence
  Antisense compound
gctatgaccaccggctccct

SEQ ID NO: 655 - DNA, 20 bp, Artificial Sequence
  Antisense compound
agctatgaccaccggctccc

SEQ ID NO: 656 - DNA, 20 bp, Artificial Sequence
  Antisense compound
tagctatgaccaccggctcc

SEQ ID NO: 657 - DNA, 20 bp, Artificial Sequence
  Antisense compound
atagctatgaccaccggctc

SEQ ID NO: 658 - DNA, 20 bp, Artificial Sequence
  Antisense compound
catagctatgaccaccggct

SEQ ID NO: 659 - DNA, 20 bp, Artificial Sequence
  Antisense compound
ccatagctatgaccaccggc

SEQ ID NO: 660 - DNA, 20 bp, Artificial Sequence
  Antisense compound
gccatagctatgaccaccgg

SEQ ID NO: 661 - DNA, 20 bp, Artificial Sequence
  Antisense compound
tgccatagctatgaccaccg

SEQ ID NO: 662 - DNA, 20 bp, Artificial Sequence
  Antisense compound
atgccatagctatgaccacc

SEQ ID NO: 663 - DNA, 20 bp, Artificial Sequence
  Antisense compound
gatgccatagctatgaccac

SEQ ID NO: 664 - DNA, 20 bp, Artificial Sequence
  Antisense compound
cgatgccatagctatgacca

SEQ ID NO: 665 - DNA, 20 bp, Artificial Sequence
  Antisense compound
tcgatgccatagctatgacc

SEQ ID NO: 666 - DNA, 20 bp, Artificial Sequence
  Antisense compound
atcgatgccatagctatgac

SEQ ID NO: 667 - DNA, 20 bp, Artificial Sequence
  Antisense compound
gatcgatgccatagctatga

SEQ ID NO: 668 - DNA, 20 bp, Artificial Sequence
  Antisense compound
agatcgatgccatagctatg

SEQ ID NO: 669 - DNA, 20 bp, Artificial Sequence
  Antisense compound
tagatcgatgccatagctat

SEQ ID NO: 670 - DNA, 20 bp, Artificial Sequence
  Antisense compound
ttagatcgatgccatagcta

SEQ ID NO: 671 - DNA, 20 bp, Artificial Sequence
  Antisense compound
tttagatcgatgccatagct

SEQ ID NO: 672 - DNA, 20 bp, Artificial Sequence
  Antisense compound
ctttagatcgatgccatagc

SEQ ID NO: 673 - DNA, 20 bp, Artificial Sequence
  Antisense compound
actttagatcgatgccatag

SEQ ID NO: 674 - DNA, 20 bp, Artificial Sequence
  Antisense compound
gactttagatcgatgccata

SEQ ID NO: 675 - DNA, 20 bp, Artificial Sequence
  Antisense compound
agactttagatcgatgccat

SEQ ID NO: 676 - DNA, 20 bp, Artificial Sequence
  Antisense compound
aagactttagatcgatgcca

SEQ ID NO: 677 - DNA, 20 bp, Artificial Sequence
  Antisense compound
taagactttagatcgatgcc

SEQ ID NO: 678 - DNA, 20 bp, Artificial Sequence
  Antisense compound
ataagactttagatcgatgc

SEQ ID NO: 679 - DNA, 20 bp, Artificial Sequence
  Antisense compound
cataagactttagatcgatg

SEQ ID NO: 680 - DNA, 20 bp, Artificial Sequence
  Antisense compound
tcataagactttagatcgat

SEQ ID NO: 681 - DNA, 20 bp, Artificial Sequence
  Antisense compound
gtcataagactttagatcga

SEQ ID NO: 682 - DNA, 20 bp, Artificial Sequence
  Antisense compound
agtcataagactttagatcg

SEQ ID NO: 683 - DNA, 20 bp, Artificial Sequence
  Antisense compound
aagtcataagactttagatc

SEQ ID NO: 684 - DNA, 20 bp, Artificial Sequence
  Antisense compound
taagtcataagactttagat

SEQ ID NO: 685 - DNA, 20 bp, Artificial Sequence
  Antisense compound
ctaagtcataagactttaga

SEQ ID NO: 686 - DNA, 20 bp, Artificial Sequence
  Antisense compound
cctaagtcataagactttag

SEQ ID NO: 687 - DNA, 20 bp, Artificial Sequence
  Antisense compound
acctaagtcataagacttta

SEQ ID NO: 688 - DNA, 20 bp, Artificial Sequence
  Antisense compound
cacctaagtcataagacttt

SEQ ID NO: 689 - DNA, 20 bp, Artificial Sequence
  Antisense compound
tcacctaagtcataagactt

SEQ ID NO: 690 - DNA, 20 bp, Artificial Sequence
  Antisense compound
gtcacctaagtcataagact

SEQ ID NO: 691 - DNA, 20 bp, Artificial Sequence
  Antisense compound
cgtcacctaagtcataagac

SEQ ID NO: 692 - DNA, 20 bp, Artificial Sequence
  Antisense compound
tcgtcacctaagtcataaga

SEQ ID NO: 693 - DNA, 20 bp, Artificial Sequence
  Antisense compound
ctcgtcacctaagtcataag

SEQ ID NO: 694 - DNA, 20 bp, Artificial Sequence
  Antisense compound
gctcgtcacctaagtcataa

SEQ ID NO: 695 - DNA, 20 bp, Artificial Sequence
  Antisense compound
agctcgtcacctaagtcata

SEQ ID NO: 696 - DNA, 20 bp, Artificial Sequence
  Antisense compound
aagctcgtcacctaagtcat

SEQ ID NO: 697 - DNA, 20 bp, Artificial Sequence
  Antisense compound
caagctcgtcacctaagtca

SEQ ID NO: 698 - DNA, 20 bp, Artificial Sequence
  Antisense compound
ccaagctcgtcacctaagtc

SEQ ID NO: 699 - DNA, 20 bp, Artificial Sequence
  Antisense compound
gccaagctcgtcacctaagt

SEQ ID NO: 700 - DNA, 20 bp, Artificial Sequence
  Antisense compound
tgccaagctcgtcacctaag

SEQ ID NO: 701 - DNA, 20 bp, Artificial Sequence
  Antisense compound
gtgccaagctcgtcacctaa

SEQ ID NO: 702 - DNA, 20 bp, Artificial Sequence
  Antisense compound
agtgccaagctcgtcaccta

SEQ ID NO: 703 - DNA, 20 bp, Artificial Sequence
  Antisense compound
cagtgccaagctcgtcacct

SEQ ID NO: 704 - DNA, 20 bp, Artificial Sequence
  Antisense compound
tcagtgccaagctcgtcacc

SEQ ID NO: 705 - DNA, 20 bp, Artificial Sequence
  Antisense compound
atcagtgccaagctcgtcac

SEQ ID NO: 706 - DNA, 20 bp, Artificial Sequence
  Antisense compound
gatcagtgccaagctcgtca

SEQ ID NO: 707 - DNA, 20 bp, Artificial Sequence
  Antisense compound
ggatcagtgccaagctcgtc

SEQ ID NO: 708 - DNA, 20 bp, Artificial Sequence
  Antisense compound
gggatcagtgccaagctcgt

SEQ ID NO: 709 - DNA, 20 bp, Artificial Sequence
  Antisense compound
tgggatcagtgccaagctcg

SEQ ID NO: 710 - DNA, 20 bp, Artificial Sequence
  Antisense compound
atgggatcagtgccaagctc

SEQ ID NO: 711 - DNA, 20 bp, Artificial Sequence
  Antisense compound
aatgggatcagtgccaagct

SEQ ID NO: 712 - DNA, 20 bp, Artificial Sequence
  Antisense compound
caatgggatcagtgccaagc

SEQ ID NO: 713 - DNA, 20 bp, Artificial Sequence
  Antisense compound
tcaatgggatcagtgccaag

SEQ ID NO: 714 - DNA, 20 bp, Artificial Sequence
  Antisense compound
ttcaatgggatcagtgccaa

SEQ ID NO: 715 - DNA, 20 bp, Artificial Sequence
  Antisense compound
cttcaatgggatcagtgcca

SEQ ID NO: 716 - DNA, 20 bp, Artificial Sequence
  Antisense compound
tcttcaatgggatcagtgcc

SEQ ID NO: 717 - DNA, 20 bp, Artificial Sequence
  Antisense compound
atcttcaatgggatcagtgc

SEQ ID NO: 718 - DNA, 20 bp, Artificial Sequence
  Antisense compound
aatcttcaatgggatcagtg

SEQ ID NO: 719 - DNA, 20 bp, Artificial Sequence
  Antisense compound
taatcttcaatgggatcagt

SEQ ID NO: 720 - DNA, 20 bp, Artificial Sequence
  Antisense compound
ataatcttcaatgggatcag

SEQ ID NO: 721 - DNA, 20 bp, Artificial Sequence
  Antisense compound
cataatcttcaatgggatca

SEQ ID NO: 722 - DNA, 20 bp, Artificial Sequence
  Antisense compound
tcataatcttcaatgggatc

SEQ ID NO: 723 - DNA, 20 bp, Artificial Sequence
  Antisense compound
ttcataatcttcaatgggat

SEQ ID NO: 724 - DNA, 20 bp, Artificial Sequence
  Antisense compound
gttcataatcttcaatggga

SEQ ID NO: 725 - DNA, 20 bp, Artificial Sequence
  Antisense compound
tgttcataatcttcaatggg

SEQ ID NO: 726 - DNA, 20 bp, Artificial Sequence
  Antisense compound
ttgttcataatcttcaatgg

SEQ ID NO: 727 - DNA, 20 bp, Artificial Sequence
  Antisense compound
tttgttcataatcttcaatg

SEQ ID NO: 728 - DNA, 20 bp, Artificial Sequence
  Antisense compound
ttttgttcataatcttcaat

SEQ ID NO: 729 - DNA, 20 bp, Artificial Sequence
  Antisense compound
gttttgttcataatcttcaa

SEQ ID NO: 730 - DNA, 20 bp, Artificial Sequence
  Antisense compound
agttttgttcataatcttca

SEQ ID NO: 731 - DNA, 20 bp, Artificial Sequence
  Antisense compound
cagttttgttcataatcttc

SEQ ID NO: 732 - DNA, 20 bp, Artificial Sequence
  Antisense compound
ccagttttgttcataatctt

SEQ ID NO: 733 - DNA, 20 bp, Artificial Sequence
  Antisense compound
tccagttttgttcataatct

SEQ ID NO: 734 - DNA, 20 bp, Artificial Sequence
  Antisense compound
ttccagttttgttcataatc

SEQ ID NO: 735 - DNA, 20 bp, Artificial Sequence
  Antisense compound
gttccagttttgttcataat

SEQ ID NO: 736 - DNA, 20 bp, Artificial Sequence
  Antisense compound
tgttccagttttgttcataa

SEQ ID NO: 737 - DNA, 20 bp, Artificial Sequence
  Antisense compound
gtgttccagttttgttcata

SEQ ID NO: 738 - DNA, 20 bp, Artificial Sequence
  Antisense compound
agtgttccagttttgttcat

SEQ ID NO: 739 - DNA, 20 bp, Artificial Sequence
  Antisense compound
tagtgttccagttttgttca

SEQ ID NO: 740 - DNA, 20 bp, Artificial Sequence
  Antisense compound
ttagtgttccagttttgttc

SEQ ID NO: 741 - DNA, 20 bp, Artificial Sequence
  Antisense compound
cttagtgttccagttttgtt

SEQ ID NO: 742 - DNA, 20 bp, Artificial Sequence
  Antisense compound
gcttagtgttccagttttgt

SEQ ID NO: 743 - DNA, 20 bp, Artificial Sequence
  Antisense compound
tgcttagtgttccagttttg

SEQ ID NO: 744 - DNA, 20 bp, Artificial Sequence
  Antisense compound
atgcttagtgttccagtttt

SEQ ID NO: 745 - DNA, 20 bp, Artificial Sequence
  Antisense compound
catgcttagtgttccagttt

SEQ ID NO: 746 - DNA, 20 bp, Artificial Sequence
  Antisense compound
ccatgcttagtgttccagtt

SEQ ID NO: 747 - DNA, 20 bp, Artificial Sequence
  Antisense compound
gccatgcttagtgttccagt

SEQ ID NO: 748 - DNA, 20 bp, Artificial Sequence
  Antisense compound
tgccatgcttagtgttccag

SEQ ID NO: 749 - DNA, 20 bp, Artificial Sequence
  Antisense compound
ctgccatgcttagtgttcca

SEQ ID NO: 750 - DNA, 20 bp, Artificial Sequence
  Antisense compound
actgccatgcttagtgttcc

SEQ ID NO: 751 - DNA, 20 bp, Artificial Sequence
  Antisense compound
cactgccatgcttagtgttc

SEQ ID NO: 752 - DNA, 20 bp, Artificial Sequence
  Antisense compound
ccactgccatgcttagtgtt

SEQ ID NO: 753 - DNA, 20 bp, Artificial Sequence
  Antisense compound
accactgccatgcttagtgt

SEQ ID NO: 754 - DNA, 20 bp, Artificial Sequence
  Antisense compound
caccactgccatgcttagtg

SEQ ID NO: 755 - DNA, 20 bp, Artificial Sequence
  Antisense compound
gcaccactgccatgcttagt

SEQ ID NO: 756 - DNA, 20 bp, Artificial Sequence
  Antisense compound
tgcaccactgccatgcttag

SEQ ID NO: 757 - DNA, 20 bp, Artificial Sequence
  Antisense compound
gtgcaccactgccatgctta

SEQ ID NO: 758 - DNA, 20 bp, Artificial Sequence
  Antisense compound
agtgcaccactgccatgctt

SEQ ID NO: 759 - DNA, 20 bp, Artificial Sequence
  Antisense compound
gagtgcaccactgccatgct

SEQ ID NO: 760 - DNA, 20 bp, Artificial Sequence
  Antisense compound
ggagtgcaccactgccatgc

SEQ ID NO: 761 - DNA, 20 bp, Artificial Sequence
  Antisense compound
cggagtgcaccactgccatg

SEQ ID NO: 762 - DNA, 20 bp, Artificial Sequence
  Antisense compound
acggagtgcaccactgccat

SEQ ID NO: 763 - DNA, 20 bp, Artificial Sequence
  Antisense compound
cacggagtgcaccactgcca

SEQ ID NO: 764 - DNA, 20 bp, Artificial Sequence
  Antisense compound
tcacggagtgcaccactgcc

SEQ ID NO: 765 - DNA, 20 bp, Artificial Sequence
  Antisense compound
ttcacggagtgcaccactgc

SEQ ID NO: 766 - DNA, 20 bp, Artificial Sequence
  Antisense compound
gttcacggagtgcaccactg

SEQ ID NO: 767 - DNA, 20 bp, Artificial Sequence
  Antisense compound
agttcacggagtgcaccact

SEQ ID NO: 768 - DNA, 20 bp, Artificial Sequence
  Antisense compound
gagttcacggagtgcaccac

SEQ ID NO: 769 - DNA, 20 bp, Artificial Sequence
  Antisense compound
tgagttcacggagtgcacca

SEQ ID NO: 770 - DNA, 20 bp, Artificial Sequence
  Antisense compound
gtgagttcacggagtgcacc

SEQ ID NO: 771 - DNA, 20 bp, Artificial Sequence
  Antisense compound
agtgagttcacggagtgcac

SEQ ID NO: 772 - DNA, 20 bp, Artificial Sequence
  Antisense compound
gagtgagttcacggagtgca

SEQ ID NO: 773 - DNA, 20 bp, Artificial Sequence
  Antisense compound
cgagtgagttcacggagtgc

SEQ ID NO: 774 - DNA, 20 bp, Artificial Sequence
  Antisense compound
acgagtgagttcacggagtg

SEQ ID NO: 775 - DNA, 20 bp, Artificial Sequence
  Antisense compound
cacgagtgagttcacggagt

SEQ ID NO: 776 - DNA, 20 bp, Artificial Sequence
  Antisense compound
tcacgagtgagttcacggag

SEQ ID NO: 777 - DNA, 20 bp, Artificial Sequence
  Antisense compound
ctcacgagtgagttcacgga

SEQ ID NO: 778 - DNA, 20 bp, Artificial Sequence
  Antisense compound
gctcacgagtgagttcacgg

SEQ ID NO: 779 - DNA, 20 bp, Artificial Sequence
  Antisense compound
agctcacgagtgagttcacg

SEQ ID NO: 780 - DNA, 20 bp, Artificial Sequence
  Antisense compound
gagctcacgagtgagttcac

SEQ ID NO: 781 - DNA, 20 bp, Artificial Sequence
  Antisense compound
tgagctcacgagtgagttca

SEQ ID NO: 782 - DNA, 20 bp, Artificial Sequence
  Antisense compound
ttgagctcacgagtgagttc

SEQ ID NO: 783 - DNA, 20 bp, Artificial Sequence
  Antisense compound
attgagctcacgagtgagtt

SEQ ID NO: 784 - DNA, 20 bp, Artificial Sequence
  Antisense compound
cattgagctcacgagtgagt

SEQ ID NO: 785 - DNA, 20 bp, Artificial Sequence
  Antisense compound
ccattgagctcacgagtgag

SEQ ID NO: 786 - DNA, 20 bp, Artificial Sequence
  Antisense compound
tccattgagctcacgagtga

SEQ ID NO: 787 - DNA, 20 bp, Artificial Sequence
  Antisense compound
ctccattgagctcacgagtg

SEQ ID NO: 788 - DNA, 20 bp, Artificial Sequence
  Antisense compound
cctccattgagctcacgagt

SEQ ID NO: 789 - DNA, 20 bp, Artificial Sequence
  Antisense compound
acctccattgagctcacgag

SEQ ID NO: 790 - DNA, 20 bp, Artificial Sequence
  Antisense compound
cacctccattgagctcacga

SEQ ID NO: 791 - DNA, 20 bp, Artificial Sequence
  Antisense compound
gcacctccattgagctcacg

SEQ ID NO: 792 - DNA, 20 bp, Artificial Sequence
  Antisense compound
tgcacctccattgagctcac

SEQ ID NO: 793 - DNA, 20 bp, Artificial Sequence
  Antisense compound
ctgcacctccattgagctca

SEQ ID NO: 794 - DNA, 20 bp, Artificial Sequence
  Antisense compound
actgcacctccattgagctc

SEQ ID NO: 795 - DNA, 20 bp, Artificial Sequence
  Antisense compound
gactgcacctccattgagct

SEQ ID NO: 796 - DNA, 20 bp, Artificial Sequence
  Antisense compound
tgactgcacctccattgagc

SEQ ID NO: 797 - DNA, 20 bp, Artificial Sequence
  Antisense compound
gtgactgcacctccattgag

SEQ ID NO: 798 - DNA, 20 bp, Artificial Sequence
  Antisense compound
agtgactgcacctccattga

SEQ ID NO: 799 - DNA, 20 bp, Artificial Sequence
  Antisense compound
gagtgactgcacctccattg

SEQ ID NO: 800 - DNA, 20 bp, Artificial Sequence
  Antisense compound
cgagtgactgcacctccatt

SEQ ID NO: 801 - DNA, 20 bp, Artificial Sequence
  Antisense compound
gcgagtgactgcacctccat

SEQ ID NO: 802 - DNA, 20 bp, Artificial Sequence
  Antisense compound
agcgagtgactgcacctcca

SEQ ID NO: 803 - DNA, 20 bp, Artificial Sequence
  Antisense compound
tagcgagtgactgcacctcc

SEQ ID NO: 804 - DNA, 20 bp, Artificial Sequence
  Antisense compound
atagcgagtgactgcacctc

SEQ ID NO: 805 - DNA, 20 bp, Artificial Sequence
  Antisense compound
catagcgagtgactgcacct

SEQ ID NO: 806 - DNA, 20 bp, Artificial Sequence
  Antisense compound
acatagcgagtgactgcacc

SEQ ID NO: 807 - DNA, 20 bp, Artificial Sequence
  Antisense compound
gacatagcgagtgactgcac

SEQ ID NO: 808 - DNA, 20 bp, Artificial Sequence
  Antisense compound
cgacatagcgagtgactgca

SEQ ID NO: 809 - DNA, 20 bp, Artificial Sequence
  Antisense compound
tcgacatagcgagtgactgc

SEQ ID NO: 810 - DNA, 20 bp, Artificial Sequence
  Antisense compound
gtcgacatagcgagtgactg

SEQ ID NO: 811 - DNA, 20 bp, Artificial Sequence
  Antisense compound
tgtcgacatagcgagtgact

SEQ ID NO: 812 - DNA, 20 bp, Artificial Sequence
  Antisense compound
ttgtcgacatagcgagtgac

SEQ ID NO: 813 - DNA, 20 bp, Artificial Sequence
  Antisense compound
gttgtcgacatagcgagtga

SEQ ID NO: 814 - DNA, 20 bp, Artificial Sequence
  Antisense compound
tgttgtcgacatagcgagtg

SEQ ID NO: 815 - DNA, 20 bp, Artificial Sequence
  Antisense compound
ttgttgtcgacatagcgagt

SEQ ID NO: 816 - DNA, 20 bp, Artificial Sequence
  Antisense compound
attgttgtcgacatagcgag

SEQ ID NO: 817 - DNA, 20 bp, Artificial Sequence
  Antisense compound
aattgttgtcgacatagcga

SEQ ID NO: 818 - DNA, 20 bp, Artificial Sequence
  Antisense compound
aaattgttgtcgacatagcg

SEQ ID NO: 819 - DNA, 20 bp, Artificial Sequence
  Antisense compound
gaaattgttgtcgacatagc

SEQ ID NO: 820 - DNA, 20 bp, Artificial Sequence
  Antisense compound
agaaattgttgtcgacatag

SEQ ID NO: 821 - DNA, 20 bp, Artificial Sequence
  Antisense compound
cagaaattgttgtcgacata

SEQ ID NO: 822 - DNA, 20 bp, Artificial Sequence
  Antisense compound
acagaaattgttgtcgacat

SEQ ID NO: 823 - DNA, 20 bp, Artificial Sequence
  Antisense compound
cacagaaattgttgtcgaca

SEQ ID NO: 824 - DNA, 20 bp, Artificial Sequence
  Antisense compound
ccacagaaattgttgtcgac

SEQ ID NO: 825 - DNA, 20 bp, Artificial Sequence
  Antisense compound
gccacagaaattgttgtcga

SEQ ID NO: 826 - DNA, 20 bp, Artificial Sequence
  Antisense compound
ggccacagaaattgttgtcg

SEQ ID NO: 827 - DNA, 20 bp, Artificial Sequence
  Antisense compound
gggccacagaaattgttgtc

SEQ ID NO: 828 - DNA, 20 bp, Artificial Sequence
  Antisense compound
tgggccacagaaattgttgt

SEQ ID NO: 829 - DNA, 20 bp, Artificial Sequence
  Antisense compound
ctgggccacagaaattgttg

SEQ ID NO: 830 - DNA, 20 bp, Artificial Sequence
  Antisense compound
tctgggccacagaaattgtt

SEQ ID NO: 831 - DNA, 20 bp, Artificial Sequence
  Antisense compound
atctgggccacagaaattgt

SEQ ID NO: 832 - DNA, 20 bp, Artificial Sequence
  Antisense compound
catctgggccacagaaattg

SEQ ID NO: 833 - DNA, 20 bp, Artificial Sequence
  Antisense compound
ccatctgggccacagaaatt

SEQ ID NO: 834 - DNA, 20 bp, Artificial Sequence
  Antisense compound
cccatctgggccacagaaat

SEQ ID NO: 835 - DNA, 20 bp, Artificial Sequence
  Antisense compound
acccatctgggccacagaaa

SEQ ID NO: 836 - DNA, 20 bp, Artificial Sequence
  Antisense compound
tacccatctgggccacagaa

SEQ ID NO: 837 - DNA, 20 bp, Artificial Sequence
  Antisense compound
gtacccatctgggccacaga

SEQ ID NO: 838 - DNA, 20 bp, Artificial Sequence
  Antisense compound
ggtacccatctgggccacag

SEQ ID NO: 839 - DNA, 20 bp, Artificial Sequence
  Antisense compound
gggtacccatctgggccaca

SEQ ID NO: 840 - DNA, 20 bp, Artificial Sequence
  Antisense compound
agggtacccatctgggccac

SEQ ID NO: 841 - DNA, 20 bp, Artificial Sequence
  Antisense compound
gagggtacccatctgggcca

SEQ ID NO: 842 - DNA, 20 bp, Artificial Sequence
  Antisense compound
agagggtacccatctgggcc

SEQ ID NO: 843 - DNA, 20 bp, Artificial Sequence
  Antisense compound
aagagggtacccatctgggc

SEQ ID NO: 844 - DNA, 20 bp, Artificial Sequence
  Antisense compound
caagagggtacccatctggg

SEQ ID NO: 845 - DNA, 20 bp, Artificial Sequence
  Antisense compound
tcaagagggtacccatctgg

SEQ ID NO: 846 - DNA, 20 bp, Artificial Sequence
  Antisense compound
atcaagagggtacccatctg

SEQ ID NO: 847 - DNA, 20 bp, Artificial Sequence
  Antisense compound
aatcaagagggtacccatct

SEQ ID NO: 848 - DNA, 20 bp, Artificial Sequence
  Antisense compound
caatcaagagggtacccatc

SEQ ID NO: 849 - DNA, 20 bp, Artificial Sequence
  Antisense compound
gcaatcaagagggtacccat

SEQ ID NO: 850 - DNA, 20 bp, Artificial Sequence
  Antisense compound
tgcaatcaagagggtaccca

SEQ ID NO: 851 - DNA, 20 bp, Artificial Sequence
  Antisense compound
atgcaatcaagagggtaccc

SEQ ID NO: 852 - DNA, 20 bp, Artificial Sequence
  Antisense compound
gatgcaatcaagagggtacc

SEQ ID NO: 853 - DNA, 20 bp, Artificial Sequence
  Antisense compound
tgatgcaatcaagagggtac

SEQ ID NO: 854 - DNA, 20 bp, Artificial Sequence
  Antisense compound
ttgatgcaatcaagagggta

SEQ ID NO: 855 - DNA, 20 bp, Artificial Sequence
  Antisense compound
tttgatgcaatcaagagggt

SEQ ID NO: 856 - DNA, 20 bp, Artificial Sequence
  Antisense compound
ctttgatgcaatcaagaggg

SEQ ID NO: 857 - DNA, 20 bp, Artificial Sequence
  Antisense compound
tctttgatgcaatcaagagg

SEQ ID NO: 858 - DNA, 20 bp, Artificial Sequence
  Antisense compound
atctttgatgcaatcaagag

SEQ ID NO: 859 - DNA, 20 bp, Artificial Sequence
  Antisense compound
aatctttgatgcaatcaaga

SEQ ID NO: 860 - DNA, 20 bp, Artificial Sequence
  Antisense compound
aaatctttgatgcaatcaag

SEQ ID NO: 861 - DNA, 20 bp, Artificial Sequence
  Antisense compound
aaaatctttgatgcaatcaa

SEQ ID NO: 862 - DNA, 20 bp, Artificial Sequence
  Antisense compound
gaaaatctttgatgcaatca

SEQ ID NO: 863 - DNA, 20 bp, Artificial Sequence
  Antisense compound
agaaaatctttgatgcaatc

SEQ ID NO: 864 - DNA, 20 bp, Artificial Sequence
  Antisense compound
gagaaaatctttgatgcaat

SEQ ID NO: 865 - DNA, 20 bp, Artificial Sequence
  Antisense compound
cgagaaaatctttgatgcaa

SEQ ID NO: 866 - DNA, 20 bp, Artificial Sequence
  Antisense compound
gcgagaaaatctttgatgca

SEQ ID NO: 867 - DNA, 20 bp, Artificial Sequence
  Antisense compound
tgcgagaaaatctttgatgc

SEQ ID NO: 868 - DNA, 20 bp, Artificial Sequence
  Antisense compound
gtgcgagaaaatctttgatg

SEQ ID NO: 869 - DNA, 20 bp, Artificial Sequence
  Antisense compound
cgtgcgagaaaatctttgat

SEQ ID NO: 870 - DNA, 20 bp, Artificial Sequence
  Antisense compound
gcgtgcgagaaaatctttga

SEQ ID NO: 871 - DNA, 20 bp, Artificial Sequence
  Antisense compound
cgcgtgcgagaaaatctttg

SEQ ID NO: 872 - DNA, 20 bp, Artificial Sequence
  Antisense compound
gcgcgtgcgagaaaatcttt

SEQ ID NO: 873 - DNA, 20 bp, Artificial Sequence
  Antisense compound
cgcgcgtgcgagaaaatctt

SEQ ID NO: 874 - DNA, 20 bp, Artificial Sequence
  Antisense compound
ccgcgcgtgcgagaaaatct

SEQ ID NO: 875 - DNA, 20 bp, Artificial Sequence
  Antisense compound
cccgcgcgtgcgagaaaatc

SEQ ID NO: 876 - DNA, 20 bp, Artificial Sequence
  Antisense compound
gcccgcgcgtgcgagaaaat

SEQ ID NO: 877 - DNA, 20 bp, Artificial Sequence
  Antisense compound
tgcccgcgcgtgcgagaaaa

SEQ ID NO: 878 - DNA, 20 bp, Artificial Sequence
  Antisense compound
ttgcccgcgcgtgcgagaaa

SEQ ID NO: 879 - DNA, 20 bp, Artificial Sequence
  Antisense compound
cttgcccgcgcgtgcgagaa

SEQ ID NO: 880 - DNA, 20 bp, Artificial Sequence
  Antisense compound
acttgcccgcgcgtgcgaga

SEQ ID NO: 881 - DNA, 20 bp, Artificial Sequence
  Antisense compound
gacttgcccgcgcgtgcgag

SEQ ID NO: 882 - DNA, 20 bp, Artificial Sequence
  Antisense compound
tgacttgcccgcgcgtgcga

SEQ ID NO: 883 - DNA, 20 bp, Artificial Sequence
  Antisense compound
ttgacttgcccgcgcgtgcg

SEQ ID NO: 884 - DNA, 20 bp, Artificial Sequence
  Antisense compound
attgacttgcccgcgcgtgc

SEQ ID NO: 885 - DNA, 20 bp, Artificial Sequence
  Antisense compound
cattgacttgcccgcgcgtg

SEQ ID NO: 886 - DNA, 20 bp, Artificial Sequence
  Antisense compound
acattgacttgcccgcgcgt

SEQ ID NO: 887 - DNA, 20 bp, Artificial Sequence
  Antisense compound
cacattgacttgcccgcgcg

SEQ ID NO: 888 - DNA, 20 bp, Artificial Sequence
  Antisense compound
gcacattgacttgcccgcgc

SEQ ID NO: 889 - DNA, 20 bp, Artificial Sequence
  Antisense compound
tgcacattgacttgcccgcg

SEQ ID NO: 890 - DNA, 20 bp, Artificial Sequence
  Antisense compound
gtgcacattgacttgcccgc

SEQ ID NO: 891 - DNA, 20 bp, Artificial Sequence
  Antisense compound
agtgcacattgacttgcccg

SEQ ID NO: 892 - DNA, 20 bp, Artificial Sequence
  Antisense compound
gagtgcacattgacttgccc

SEQ ID NO: 893 - DNA, 20 bp, Artificial Sequence
  Antisense compound
agagtgcacattgacttgcc

SEQ ID NO: 894 - DNA, 20 bp, Artificial Sequence
  Antisense compound
aagagtgcacattgacttgc

SEQ ID NO: 895 - DNA, 20 bp, Artificial Sequence
  Antisense compound
aaagagtgcacattgacttg

SEQ ID NO: 896 - DNA, 20 bp, Artificial Sequence
  Antisense compound
gaaagagtgcacattgactt

SEQ ID NO: 897 - DNA, 20 bp, Artificial Sequence
  Antisense compound
ggaaagagtgcacattgact

SEQ ID NO: 898 - DNA, 20 bp, Artificial Sequence
  Antisense compound
cggaaagagtgcacattgac

SEQ ID NO: 899 - DNA, 20 bp, Artificial Sequence
  Antisense compound
tcggaaagagtgcacattga

SEQ ID NO: 900 - DNA, 20 bp, Artificial Sequence
  Antisense compound
ttcggaaagagtgcacattg

SEQ ID NO: 901 - DNA, 20 bp, Artificial Sequence
  Antisense compound
gttcggaaagagtgcacatt

SEQ ID NO: 902 - DNA, 20 bp, Artificial Sequence
  Antisense compound
tgttcggaaagagtgcacat

SEQ ID NO: 903 - DNA, 20 bp, Artificial Sequence
  Antisense compound
ttgttcggaaagagtgcaca

SEQ ID NO: 904 - DNA, 20 bp, Artificial Sequence
  Antisense compound
gttgttcggaaagagtgcac

SEQ ID NO: 905 - DNA, 20 bp, Artificial Sequence
  Antisense compound
agttgttcggaaagagtgca

SEQ ID NO: 906 - DNA, 20 bp, Artificial Sequence
  Antisense compound
aagttgttcggaaagagtgc

SEQ ID NO: 907 - DNA, 20 bp, Artificial Sequence
  Antisense compound
caagttgttcggaaagagtg

SEQ ID NO: 908 - DNA, 20 bp, Artificial Sequence
  Antisense compound
tcaagttgttcggaaagagt

SEQ ID NO: 909 - DNA, 20 bp, Artificial Sequence
  Antisense compound
atcaagttgttcggaaagag

SEQ ID NO: 910 - DNA, 20 bp, Artificial Sequence
  Antisense compound
aatcaagttgttcggaaaga

SEQ ID NO: 911 - DNA, 20 bp, Artificial Sequence
  Antisense compound
taatcaagttgttcggaaag

SEQ ID NO: 912 - DNA, 20 bp, Artificial Sequence
  Antisense compound
gtaatcaagttgttcggaaa

SEQ ID NO: 913 - DNA, 20 bp, Artificial Sequence
  Antisense compound
tgtaatcaagttgttcggaa

SEQ ID NO: 914 - DNA, 20 bp, Artificial Sequence
  Antisense compound
atgtaatcaagttgttcgga

SEQ ID NO: 915 - DNA, 20 bp, Artificial Sequence
  Antisense compound
gatgtaatcaagttgttcgg

SEQ ID NO: 916 - DNA, 20 bp, Artificial Sequence
  Antisense compound
cgatgtaatcaagttgttcg

SEQ ID NO: 917 - DNA, 20 bp, Artificial Sequence
  Antisense compound
tcgatgtaatcaagttgttc

SEQ ID NO: 918 - DNA, 20 bp, Artificial Sequence
  Antisense compound
ctcgatgtaatcaagttgtt

SEQ ID NO: 919 - DNA, 20 bp, Artificial Sequence
  Antisense compound
actcgatgtaatcaagttgt

SEQ ID NO: 920 - DNA, 20 bp, Artificial Sequence
  Antisense compound
gactcgatgtaatcaagttg

SEQ ID NO: 921 - DNA, 20 bp, Artificial Sequence
  Antisense compound
cgactcgatgtaatcaagtt

SEQ ID NO: 922 - DNA, 20 bp, Artificial Sequence
  Antisense compound
tcgactcgatgtaatcaagt

SEQ ID NO: 923 - DNA, 20 bp, Artificial Sequence
  Antisense compound
ttcgactcgatgtaatcaag

SEQ ID NO: 924 - DNA, 20 bp, Artificial Sequence
  Antisense compound
cttcgactcgatgtaatcaa

SEQ ID NO: 925 - DNA, 20 bp, Artificial Sequence
  Antisense compound
tcttcgactcgatgtaatca

SEQ ID NO: 926 - DNA, 20 bp, Artificial Sequence
  Antisense compound
ctcttcgactcgatgtaatc

SEQ ID NO: 927 - DNA, 20 bp, Artificial Sequence
  Antisense compound
tctcttcgactcgatgtaat

SEQ ID NO: 928 - DNA, 20 bp, Artificial Sequence
  Antisense compound
ctctcttcgactcgatgtaa

SEQ ID NO: 929 - DNA, 20 bp, Artificial Sequence
  Antisense compound
cctctcttcgactcgatgta

SEQ ID NO: 930 - DNA, 20 bp, Artificial Sequence
  Antisense compound
acctctcttcgactcgatgt

SEQ ID NO: 931 - DNA, 20 bp, Artificial Sequence
  Antisense compound
cacctctcttcgactcgatg

SEQ ID NO: 932 - DNA, 20 bp, Artificial Sequence
  Antisense compound
acacctctcttcgactcgat

SEQ ID NO: 933 - DNA, 20 bp, Artificial Sequence
  Antisense compound
gacacctctcttcgactcga

SEQ ID NO: 934 - DNA, 20 bp, Artificial Sequence
  Antisense compound
agacacctctcttcgactcg

SEQ ID NO: 935 - DNA, 20 bp, Artificial Sequence
  Antisense compound
tagacacctctcttcgactc

SEQ ID NO: 936 - DNA, 20 bp, Artificial Sequence
  Antisense compound
gtagacacctctcttcgact

SEQ ID NO: 937 - DNA, 20 bp, Artificial Sequence
  Antisense compound
agtagacacctctcttcgac

SEQ ID NO: 938 - DNA, 20 bp, Artificial Sequence
  Antisense compound
cagtagacacctctcttcga

SEQ ID NO: 939 - DNA, 20 bp, Artificial Sequence
  Antisense compound
gcagtagacacctctcttcg

SEQ ID NO: 940 - DNA, 20 bp, Artificial Sequence
  Antisense compound
agcagtagacacctctcttc

SEQ ID NO: 941 - DNA, 20 bp, Artificial Sequence
  Antisense compound
cagcagtagacacctctctt

SEQ ID NO: 942 - DNA, 20 bp, Artificial Sequence
  Antisense compound
gcagcagtagacacctctct

SEQ ID NO: 943 - DNA, 20 bp, Artificial Sequence
  Antisense compound
ggcagcagtagacacctctc

SEQ ID NO: 944 - DNA, 20 bp, Artificial Sequence
  Antisense compound
cggcagcagtagacacctct

SEQ ID NO: 945 - DNA, 20 bp, Artificial Sequence
  Antisense compound
acggcagcagtagacacctc

SEQ ID NO: 946 - DNA, 20 bp, Artificial Sequence
  Antisense compound
cacggcagcagtagacacct

SEQ ID NO: 947 - DNA, 20 bp, Artificial Sequence
  Antisense compound
tcacggcagcagtagacacc

SEQ ID NO: 948 - DNA, 20 bp, Artificial Sequence
  Antisense compound
gtcacggcagcagtagacac

SEQ ID NO: 949 - DNA, 20 bp, Artificial Sequence
  Antisense compound
ggtcacggcagcagtagaca

SEQ ID NO: 950 - DNA, 20 bp, Artificial Sequence
  Antisense compound
tggtcacggcagcagtagac

SEQ ID NO: 951 - DNA, 20 bp, Artificial Sequence
  Antisense compound
atggtcacggcagcagtaga

SEQ ID NO: 952 - DNA, 20 bp, Artificial Sequence
  Antisense compound
catggtcacggcagcagtag

SEQ ID NO: 953 - DNA, 20 bp, Artificial Sequence
  Antisense compound
tcatggtcacggcagcagta

SEQ ID NO: 954 - DNA, 20 bp, Artificial Sequence
  Antisense compound
ctcatggtcacggcagcagt

SEQ ID NO: 955 - DNA, 20 bp, Artificial Sequence
  Antisense compound
gctcatggtcacggcagcag

SEQ ID NO: 956 - DNA, 20 bp, Artificial Sequence
  Antisense compound
tgctcatggtcacggcagca

SEQ ID NO: 957 - DNA, 20 bp, Artificial Sequence
  Antisense compound
atgctcatggtcacggcagc

SEQ ID NO: 958 - DNA, 20 bp, Artificial Sequence
  Antisense compound
catgctcatggtcacggcag

SEQ ID NO: 959 - DNA, 20 bp, Artificial Sequence
  Antisense compound
tcatgctcatggtcacggca

SEQ ID NO: 960 - DNA, 20 bp, Artificial Sequence
  Antisense compound
ttcatgctcatggtcacggc

SEQ ID NO: 961 - DNA, 20 bp, Artificial Sequence
  Antisense compound
tttcatgctcatggtcacgg

SEQ ID NO: 962 - DNA, 20 bp, Artificial Sequence
  Antisense compound
atttcatgctcatggtcacg

SEQ ID NO: 963 - DNA, 20 bp, Artificial Sequence
  Antisense compound
aatttcatgctcatggtcac

SEQ ID NO: 964 - DNA, 20 bp, Artificial Sequence
  Antisense compound
caatttcatgctcatggtca

SEQ ID NO: 965 - DNA, 20 bp, Artificial Sequence
  Antisense compound
gcaatttcatgctcatggtc

SEQ ID NO: 966 - DNA, 20 bp, Artificial Sequence
  Antisense compound
ggcaatttcatgctcatggt

SEQ ID NO: 967 - DNA, 20 bp, Artificial Sequence
  Antisense compound
aggcaatttcatgctcatgg

SEQ ID NO: 968 - DNA, 20 bp, Artificial Sequence
  Antisense compound
caggcaatttcatgctcatg

SEQ ID NO: 969 - DNA, 20 bp, Artificial Sequence
  Antisense compound
ccaggcaatttcatgctcat

SEQ ID NO: 970 - DNA, 20 bp, Artificial Sequence
  Antisense compound
accaggcaatttcatgctca

SEQ ID NO: 971 - DNA, 20 bp, Artificial Sequence
  Antisense compound
aaccaggcaatttcatgctc

SEQ ID NO: 972 - DNA, 20 bp, Artificial Sequence
  Antisense compound
gaaccaggcaatttcatgct

SEQ ID NO: 973 - DNA, 20 bp, Artificial Sequence
  Antisense compound
tgaaccaggcaatttcatgc

SEQ ID NO: 974 - DNA, 20 bp, Artificial Sequence
  Antisense compound
gtgaaccaggcaatttcatg

SEQ ID NO: 975 - DNA, 20 bp, Artificial Sequence
  Antisense compound
agtgaaccaggcaatttcat

SEQ ID NO: 976 - DNA, 20 bp, Artificial Sequence
  Antisense compound
cagtgaaccaggcaatttca

SEQ ID NO: 977 - DNA, 20 bp, Artificial Sequence
  Antisense compound
tcagtgaaccaggcaatttc

SEQ ID NO: 978 - DNA, 20 bp, Artificial Sequence
  Antisense compound
ctcagtgaaccaggcaattt

SEQ ID NO: 979 - DNA, 20 bp, Artificial Sequence
  Antisense compound
gctcagtgaaccaggcaatt

SEQ ID NO: 980 - DNA, 20 bp, Artificial Sequence
  Antisense compound
cgctcagtgaaccaggcaat

SEQ ID NO: 981 - DNA, 20 bp, Artificial Sequence
  Antisense compound
gcgctcagtgaaccaggcaa

SEQ ID NO: 982 - DNA, 20 bp, Artificial Sequence
  Antisense compound
agcgctcagtgaaccaggca

SEQ ID NO: 983 - DNA, 20 bp, Artificial Sequence
  Antisense compound
gagcgctcagtgaaccaggc

SEQ ID NO: 984 - DNA, 20 bp, Artificial Sequence
  Antisense compound
agagcgctcagtgaaccagg

SEQ ID NO: 985 - DNA, 20 bp, Artificial Sequence
  Antisense compound
cagagcgctcagtgaaccag

SEQ ID NO: 986 - DNA, 20 bp, Artificial Sequence
  Antisense compound
tcagagcgctcagtgaacca

SEQ ID NO: 987 - DNA, 20 bp, Artificial Sequence
  Antisense compound
atcagagcgctcagtgaacc

SEQ ID NO: 988 - DNA, 20 bp, Artificial Sequence
  Antisense compound
tatcagagcgctcagtgaac

SEQ ID NO: 989 - DNA, 20 bp, Artificial Sequence
  Antisense compound
ttatcagagcgctcagtgaa

SEQ ID NO: 990 - DNA, 20 bp, Artificial Sequence
  Antisense compound
cttatcagagcgctcagtga

SEQ ID NO: 991 - DNA, 20 bp, Artificial Sequence
  Antisense compound
tcttatcagagcgctcagtg

SEQ ID NO: 992 - DNA, 20 bp, Artificial Sequence
  Antisense compound
ctcttatcagagcgctcagt

SEQ ID NO: 993 - DNA, 20 bp, Artificial Sequence
  Antisense compound
gctcttatcagagcgctcag

SEQ ID NO: 994 - DNA, 20 bp, Artificial Sequence
  Antisense compound
agctcttatcagagcgctca

SEQ ID NO: 995 - DNA, 20 bp, Artificial Sequence
  Antisense compound
tagctcttatcagagcgctc

SEQ ID NO: 996 - DNA, 20 bp, Artificial Sequence
  Antisense compound
gtagctcttatcagagcgct

SEQ ID NO: 997 - DNA, 20 bp, Artificial Sequence
  Antisense compound
cgtagctcttatcagagcgc

SEQ ID NO: 998 - DNA, 20 bp, Artificial Sequence
  Antisense compound
tcgtagctcttatcagagcg

SEQ ID NO: 999 - DNA, 20 bp, Artificial Sequence
  Antisense compound
ctcgtagctcttatcagagc

SEQ ID NO: 1000 - DNA, 20 bp, Artificial Sequence
  Antisense compound
gctcgtagctcttatcagag

SEQ ID NO: 1001 - DNA, 20 bp, Artificial Sequence
  Antisense compound
tgctcgtagctcttatcaga

SEQ ID NO: 1002 - DNA, 20 bp, Artificial Sequence
  Antisense compound
gtgctcgtagctcttatcag

SEQ ID NO: 1003 - DNA, 20 bp, Artificial Sequence
  Antisense compound
ggtgctcgtagctcttatca

SEQ ID NO: 1004 - DNA, 20 bp, Artificial Sequence
  Antisense compound
tggtgctcgtagctcttatc

SEQ ID NO: 1005 - DNA, 20 bp, Artificial Sequence
  Antisense compound
ctggtgctcgtagctcttat

SEQ ID NO: 1006 - DNA, 20 bp, Artificial Sequence
  Antisense compound
tctggtgctcgtagctctta

SEQ ID NO: 1007 - DNA, 20 bp, Artificial Sequence
  Antisense compound
gtctggtgctcgtagctctt

SEQ ID NO: 1008 - DNA, 20 bp, Artificial Sequence
  Antisense compound
tgtctggtgctcgtagctct

SEQ ID NO: 1009 - DNA, 20 bp, Artificial Sequence
  Antisense compound
gtgtctggtgctcgtagctc

SEQ ID NO: 1010 - DNA, 20 bp, Artificial Sequence
  Antisense compound
ggtgtctggtgctcgtagct

SEQ ID NO: 1011 - DNA, 20 bp, Artificial Sequence
  Antisense compound
gggtgtctggtgctcgtagc

SEQ ID NO: 1012 - DNA, 20 bp, Artificial Sequence
  Antisense compound
agggtgtctggtgctcgtag

SEQ ID NO: 1013 - DNA, 20 bp, Artificial Sequence
  Antisense compound
aagggtgtctggtgctcgta

SEQ ID NO: 1014 - DNA, 20 bp, Artificial Sequence
  Antisense compound
gaagggtgtctggtgctcgt

SEQ ID NO: 1015 - DNA, 20 bp, Artificial Sequence
  Antisense compound
cgaagggtgtctggtgctcg

SEQ ID NO: 1016 - DNA, 20 bp, Artificial Sequence
  Antisense compound
tcgaagggtgtctggtgctc

SEQ ID NO: 1017 - DNA, 20 bp, Artificial Sequence
  Antisense compound
ttcgaagggtgtctggtgct

SEQ ID NO: 1018 - DNA, 20 bp, Artificial Sequence
  Antisense compound
tttcgaagggtgtctggtgc

SEQ ID NO: 1019 - DNA, 20 bp, Artificial Sequence
  Antisense compound
atttcgaagggtgtctggtg

SEQ ID NO: 1020 - DNA, 20 bp, Artificial Sequence
  Antisense compound
aatttcgaagggtgtctggt

SEQ ID NO: 1021 - DNA, 20 bp, Artificial Sequence
  Antisense compound
taatttcgaagggtgtctgg

SEQ ID NO: 1022 - DNA, 20 bp, Artificial Sequence
  Antisense compound
ttaatttcgaagggtgtctg

SEQ ID NO: 1023 - DNA, 20 bp, Artificial Sequence
  Antisense compound
cttaatttcgaagggtgtct

SEQ ID NO: 1024 - DNA, 20 bp, Artificial Sequence
  Antisense compound
tcttaatttcgaagggtgtc

SEQ ID NO: 1025 - DNA, 20 bp, Artificial Sequence
  Antisense compound
ctcttaatttcgaagggtgt

SEQ ID NO: 1026 - DNA, 20 bp, Artificial Sequence
  Antisense compound
actcttaatttcgaagggtg

SEQ ID NO: 1027 - DNA, 20 bp, Artificial Sequence
  Antisense compound
cactcttaatttcgaagggt

SEQ ID NO: 1028 - DNA, 20 bp, Artificial Sequence
  Antisense compound
gcactcttaatttcgaaggg

SEQ ID NO: 1029 - DNA, 20 bp, Artificial Sequence
  Antisense compound
ggcactcttaatttcgaagg

SEQ ID NO: 1030 - DNA, 20 bp, Artificial Sequence
  Antisense compound
tggcactcttaatttcgaag

SEQ ID NO: 1031 - DNA, 20 bp, Artificial Sequence
  Antisense compound
ttggcactcttaatttcgaa

SEQ ID NO: 1032 - DNA, 20 bp, Artificial Sequence
  Antisense compound
cttggcactcttaatttcga

SEQ ID NO: 1033 - DNA, 20 bp, Artificial Sequence
  Antisense compound
tcttggcactcttaatttcg

SEQ ID NO: 1034 - DNA, 20 bp, Artificial Sequence
  Antisense compound
ttcttggcactcttaatttc

SEQ ID NO: 1035 - DNA, 20 bp, Artificial Sequence
  Antisense compound
tttcttggcactcttaattt

SEQ ID NO: 1036 - DNA, 20 bp, Artificial Sequence
  Antisense compound
atttcttggcactcttaatt

SEQ ID NO: 1037 - DNA, 20 bp, Artificial Sequence
  Antisense compound
aatttcttggcactcttaat

SEQ ID NO: 1038 - DNA, 20 bp, Artificial Sequence
  Antisense compound
aaatttcttggcactcttaa

SEQ ID NO: 1039 - DNA, 20 bp, Artificial Sequence
  Antisense compound
caaatttcttggcactctta

SEQ ID NO: 1040 - DNA, 20 bp, Artificial Sequence
  Antisense compound
tcaaatttcttggcactctt

SEQ ID NO: 1041 - DNA, 20 bp, Artificial Sequence
  Antisense compound
gtcaaatttcttggcactct

SEQ ID NO: 1042 - DNA, 20 bp, Artificial Sequence
  Antisense compound
tgtcaaatttcttggcactc

SEQ ID NO: 1043 - DNA, 20 bp, Artificial Sequence
  Antisense compound
gtgtcaaatttcttggcact

SEQ ID NO: 1044 - DNA, 20 bp, Artificial Sequence
  Antisense compound
agtgtcaaatttcttggcac

SEQ ID NO: 1045 - DNA, 20 bp, Artificial Sequence
  Antisense compound
aagtgtcaaatttcttggca

SEQ ID NO: 1046 - DNA, 20 bp, Artificial Sequence
  Antisense compound
aaagtgtcaaatttcttggc

SEQ ID NO: 1047 - DNA, 20 bp, Artificial Sequence
  Antisense compound
gaaagtgtcaaatttcttgg

SEQ ID NO: 1048 - DNA, 20 bp, Artificial Sequence
  Antisense compound
tgaaagtgtcaaatttcttg

SEQ ID NO: 1049 - DNA, 20 bp, Artificial Sequence
  Antisense compound
ttgaaagtgtcaaatttctt

SEQ ID NO: 1050 - DNA, 20 bp, Artificial Sequence
  Antisense compound
tttgaaagtgtcaaatttct

SEQ ID NO: 1051 - DNA, 20 bp, Artificial Sequence
  Antisense compound
ctttgaaagtgtcaaatttc

SEQ ID NO: 1052 - DNA, 20 bp, Artificial Sequence
  Antisense compound
cctttgaaagtgtcaaattt

SEQ ID NO: 1053 - DNA, 20 bp, Artificial Sequence
  Antisense compound
ccctttgaaagtgtcaaatt

SEQ ID NO: 1054 - DNA, 20 bp, Artificial Sequence
  Antisense compound
cccctttgaaagtgtcaaat

SEQ ID NO: 1055 - DNA, 20 bp, Artificial Sequence
  Antisense compound
tcccctttgaaagtgtcaaa

SEQ ID NO: 1056 - DNA, 20 bp, Artificial Sequence
  Antisense compound
ttcccctttgaaagtgtcaa

SEQ ID NO: 1057 - DNA, 20 bp, Artificial Sequence
  Antisense compound
attcccctttgaaagtgtca

SEQ ID NO: 1058 - DNA, 20 bp, Artificial Sequence
  Antisense compound
cattcccctttgaaagtgtc

SEQ ID NO: 1059 - DNA, 20 bp, Artificial Sequence
  Antisense compound
gcattcccctttgaaagtgt

SEQ ID NO: 1060 - DNA, 20 bp, Artificial Sequence
  Antisense compound
ggcattcccctttgaaagtg

SEQ ID NO: 1061 - DNA, 20 bp, Artificial Sequence
  Antisense compound
gggcattcccctttgaaagt

SEQ ID NO: 1062 - DNA, 20 bp, Artificial Sequence
  Antisense compound
tgggcattcccctttgaaag

SEQ ID NO: 1063 - DNA, 20 bp, Artificial Sequence
  Antisense compound
ttgggcattcccctttgaaa

SEQ ID NO: 1064 - DNA, 20 bp, Artificial Sequence
  Antisense compound
tttgggcattcccctttgaa

SEQ ID NO: 1065 - DNA, 20 bp, Artificial Sequence
  Antisense compound
ctttgggcattcccctttga

SEQ ID NO: 1066 - DNA, 20 bp, Artificial Sequence
  Antisense compound
actttgggcattcccctttg

SEQ ID NO: 1067 - DNA, 20 bp, Artificial Sequence
  Antisense compound
aactttgggcattccccttt

SEQ ID NO: 1068 - DNA, 20 bp, Artificial Sequence
  Antisense compound
aaactttgggcattcccctt

SEQ ID NO: 1069 - DNA, 20 bp, Artificial Sequence
  Antisense compound
caaactttgggcattcccct

SEQ ID NO: 1070 - DNA, 20 bp, Artificial Sequence
  Antisense compound
acaaactttgggcattcccc

SEQ ID NO: 1071 - DNA, 20 bp, Artificial Sequence
  Antisense compound
cacaaactttgggcattccc

SEQ ID NO: 1072 - DNA, 20 bp, Artificial Sequence
  Antisense compound
acacaaactttgggcattcc

SEQ ID NO: 1073 - DNA, 20 bp, Artificial Sequence
  Antisense compound
aacacaaactttgggcattc

SEQ ID NO: 1074 - DNA, 20 bp, Artificial Sequence
  Antisense compound
aaacacaaactttgggcatt

SEQ ID NO: 1075 - DNA, 20 bp, Artificial Sequence
  Antisense compound
gaaacacaaactttgggcat

SEQ ID NO: 1076 - DNA, 20 bp, Artificial Sequence
  Antisense compound
ggaaacacaaactttgggca

SEQ ID NO: 1077 - DNA, 20 bp, Artificial Sequence
  Antisense compound
aggaaacacaaactttgggc

SEQ ID NO: 1078 - DNA, 20 bp, Artificial Sequence
  Antisense compound
gaggaaacacaaactttggg

SEQ ID NO: 1079 - DNA, 20 bp, Artificial Sequence
  Antisense compound
agaggaaacacaaactttgg

SEQ ID NO: 1080 - DNA, 20 bp, Artificial Sequence
  Antisense compound
aagaggaaacacaaactttg

SEQ ID NO: 1081 - DNA, 20 bp, Artificial Sequence
  Antisense compound
taagaggaaacacaaacttt

SEQ ID NO: 1082 - DNA, 20 bp, Artificial Sequence
  Antisense compound
ttaagaggaaacacaaactt

SEQ ID NO: 1083 - DNA, 20 bp, Artificial Sequence
  Antisense compound
gttaagaggaaacacaaact

SEQ ID NO: 1084 - DNA, 20 bp, Artificial Sequence
  Antisense compound
agttaagaggaaacacaaac

SEQ ID NO: 1085 - DNA, 20 bp, Artificial Sequence
  Antisense compound
gagttaagaggaaacacaaa

SEQ ID NO: 1086 - DNA, 20 bp, Artificial Sequence
  Antisense compound
tgagttaagaggaaacacaa

SEQ ID NO: 1087 - DNA, 20 bp, Artificial Sequence
  Antisense compound
ttgagttaagaggaaacaca

SEQ ID NO: 1088 - DNA, 20 bp, Artificial Sequence
  Antisense compound
tttgagttaagaggaaacac

SEQ ID NO: 1089 - DNA, 20 bp, Artificial Sequence
  Antisense compound
ttttgagttaagaggaaaca

SEQ ID NO: 1090 - DNA, 20 bp, Artificial Sequence
  Antisense compound
cttttgagttaagaggaaac

SEQ ID NO: 1091 - DNA, 20 bp, Artificial Sequence
  Antisense compound
acttttgagttaagaggaaa

SEQ ID NO: 1092 - DNA, 20 bp, Artificial Sequence
  Antisense compound
gacttttgagttaagaggaa

SEQ ID NO: 1093 - DNA, 20 bp, Artificial Sequence
  Antisense compound
tgacttttgagttaagagga

SEQ ID NO: 1094 - DNA, 20 bp, Artificial Sequence
  Antisense compound
ttgacttttgagttaagagg

SEQ ID NO: 1095 - DNA, 20 bp, Artificial Sequence
  Antisense compound
tttgacttttgagttaagag

SEQ ID NO: 1096 - DNA, 20 bp, Artificial Sequence
  Antisense compound
ctttgacttttgagttaaga

SEQ ID NO: 1097 - DNA, 20 bp, Artificial Sequence
  Antisense compound
actttgacttttgagttaag

SEQ ID NO: 1098 - DNA, 20 bp, Artificial Sequence
  Antisense compound
gactttgacttttgagttaa

SEQ ID NO: 1099 - DNA, 20 bp, Artificial Sequence
  Antisense compound
tgactttgacttttgagtta

SEQ ID NO: 1100 - DNA, 20 bp, Artificial Sequence
  Antisense compound
atgactttgacttttgagtt

SEQ ID NO: 1101 - DNA, 20 bp, Artificial Sequence
  Antisense compound
aatgactttgacttttgagt

SEQ ID NO: 1102 - DNA, 20 bp, Artificial Sequence
  Antisense compound
gaatgactttgacttttgag

SEQ ID NO: 1103 - DNA, 20 bp, Artificial Sequence
  Antisense compound
tgaatgactttgacttttga

SEQ ID NO: 1104 - DNA, 20 bp, Artificial Sequence
  Antisense compound
ttgaatgactttgacttttg

SEQ ID NO: 1105 - DNA, 20 bp, Artificial Sequence
  Antisense compound
gttgaatgactttgactttt

SEQ ID NO: 1106 - DNA, 20 bp, Artificial Sequence
  Antisense compound
ggttgaatgactttgacttt

SEQ ID NO: 1107 - DNA, 20 bp, Artificial Sequence
  Antisense compound
tggttgaatgactttgactt

SEQ ID NO: 1108 - DNA, 20 bp, Artificial Sequence
  Antisense compound
gtggttgaatgactttgact

SEQ ID NO: 1109 - DNA, 20 bp, Artificial Sequence
  Antisense compound
cgtggttgaatgactttgac

SEQ ID NO: 1110 - DNA, 20 bp, Artificial Sequence
  Antisense compound
acgtggttgaatgactttga

SEQ ID NO: 1111 - DNA, 20 bp, Artificial Sequence
  Antisense compound
cacgtggttgaatgactttg

SEQ ID NO: 1112 - DNA, 20 bp, Artificial Sequence
  Antisense compound
acacgtggttgaatgacttt

SEQ ID NO: 1113 - DNA, 20 bp, Artificial Sequence
  Antisense compound
aacacgtggttgaatgactt

SEQ ID NO: 1114 - DNA, 20 bp, Artificial Sequence
  Antisense compound
caacacgtggttgaatgact

SEQ ID NO: 1115 - DNA, 20 bp, Artificial Sequence
  Antisense compound
tcaacacgtggttgaatgac

SEQ ID NO: 1116 - DNA, 20 bp, Artificial Sequence
  Antisense compound
ttcaacacgtggttgaatga

SEQ ID NO: 1117 - DNA, 20 bp, Artificial Sequence
  Antisense compound
tttcaacacgtggttgaatg

SEQ ID NO: 1118 - DNA, 20 bp, Artificial Sequence
  Antisense compound
ttttcaacacgtggttgaat

SEQ ID NO: 1119 - DNA, 20 bp, Artificial Sequence
  Antisense compound
cttttcaacacgtggttgaa

SEQ ID NO: 1120 - DNA, 20 bp, Artificial Sequence
  Antisense compound
tcttttcaacacgtggttga

SEQ ID NO: 1121 - DNA, 20 bp, Artificial Sequence
  Antisense compound
ttcttttcaacacgtggttg

SEQ ID NO: 1122 - DNA, 20 bp, Artificial Sequence
  Antisense compound
tttcttttcaacacgtggtt

SEQ ID NO: 1123 - DNA, 20 bp, Artificial Sequence
  Antisense compound
ttttcttttcaacacgtggt

SEQ ID NO: 1124 - DNA, 20 bp, Artificial Sequence
  Antisense compound
tttttcttttcaacacgtgg

SEQ ID NO: 1125 - DNA, 20 bp, Artificial Sequence
  Antisense compound
ctttttcttttcaacacgtg

SEQ ID NO: 1126 - DNA, 20 bp, Artificial Sequence
  Antisense compound
tctttttcttttcaacacgt

SEQ ID NO: 1127 - DNA, 20 bp, Artificial Sequence
  Antisense compound
gtctttttcttttcaacacg

SEQ ID NO: 1128 - DNA, 20 bp, Artificial Sequence
  Antisense compound
agtctttttcttttcaacac

SEQ ID NO: 1129 - DNA, 20 bp, Artificial Sequence
  Antisense compound
cagtctttttcttttcaaca

SEQ ID NO: 1130 - DNA, 20 bp, Artificial Sequence
  Antisense compound
tcagtctttttcttttcaac

SEQ ID NO: 1131 - DNA, 20 bp, Artificial Sequence
  Antisense compound
ctcagtctttttcttttcaa

SEQ ID NO: 1132 - DNA, 20 bp, Artificial Sequence
  Antisense compound
cctcagtctttttcttttca

SEQ ID NO: 1133 - DNA, 20 bp, Artificial Sequence
  Antisense compound
ccctcagtctttttcttttc

SEQ ID NO: 1134 - DNA, 20 bp, Artificial Sequence
  Antisense compound
accctcagtctttttctttt

SEQ ID NO: 1135 - DNA, 20 bp, Artificial Sequence
  Antisense compound
aaccctcagtctttttcttt

SEQ ID NO: 1136 - DNA, 20 bp, Artificial Sequence
  Antisense compound
aaaccctcagtctttttctt

SEQ ID NO: 1137 - DNA, 20 bp, Artificial Sequence
  Antisense compound
gaaaccctcagtctttttct

SEQ ID NO: 1138 - DNA, 20 bp, Artificial Sequence
  Antisense compound
tgaaaccctcagtctttttc

SEQ ID NO: 1139 - DNA, 20 bp, Artificial Sequence
  Antisense compound
atgaaaccctcagtcttttt

SEQ ID NO: 1140 - DNA, 20 bp, Artificial Sequence
  Antisense compound
catgaaaccctcagtctttt

SEQ ID NO: 1141 - DNA, 20 bp, Artificial Sequence
  Antisense compound
ccatgaaaccctcagtcttt

SEQ ID NO: 1142 - DNA, 20 bp, Artificial Sequence
  Antisense compound
cccatgaaaccctcagtctt

SEQ ID NO: 1143 - DNA, 20 bp, Artificial Sequence
  Antisense compound
ccccatgaaaccctcagtct

SEQ ID NO: 1144 - DNA, 20 bp, Artificial Sequence
  Antisense compound
gccccatgaaaccctcagtc

SEQ ID NO: 1145 - DNA, 20 bp, Artificial Sequence
  Antisense compound
cgccccatgaaaccctcagt

SEQ ID NO: 1146 - DNA, 20 bp, Artificial Sequence
  Antisense compound
acgccccatgaaaccctcag

SEQ ID NO: 1147 - DNA, 20 bp, Artificial Sequence
  Antisense compound
tacgccccatgaaaccctca

SEQ ID NO: 1148 - DNA, 20 bp, Artificial Sequence
  Antisense compound
atacgccccatgaaaccctc

SEQ ID NO: 1149 - DNA, 20 bp, Artificial Sequence
  Antisense compound
tatacgccccatgaaaccct

SEQ ID NO: 1150 - DNA, 20 bp, Artificial Sequence
  Antisense compound
gtatacgccccatgaaaccc

SEQ ID NO: 1151 - DNA, 20 bp, Artificial Sequence
  Antisense compound
cgtatacgccccatgaaacc

SEQ ID NO: 1152 - DNA, 20 bp, Artificial Sequence
  Antisense compound
gcgtatacgccccatgaaac

SEQ ID NO: 1153 - DNA, 20 bp, Artificial Sequence
  Antisense compound
agcgtatacgccccatgaaa

SEQ ID NO: 1154 - DNA, 20 bp, Artificial Sequence
  Antisense compound
gagcgtatacgccccatgaa

SEQ ID NO: 1155 - DNA, 20 bp, Artificial Sequence
  Antisense compound
agagcgtatacgccccatga

SEQ ID NO: 1156 - DNA, 20 bp, Artificial Sequence
  Antisense compound
cagagcgtatacgccccatg

SEQ ID NO: 1157 - DNA, 20 bp, Artificial Sequence
  Antisense compound
acagagcgtatacgccccat

SEQ ID NO: 1158 - DNA, 20 bp, Artificial Sequence
  Antisense compound
cacagagcgtatacgcccca

SEQ ID NO: 1159 - DNA, 20 bp, Artificial Sequence
  Antisense compound
acacagagcgtatacgcccc

SEQ ID NO: 1160 - DNA, 20 bp, Artificial Sequence
  Antisense compound
tacacagagcgtatacgccc

SEQ ID NO: 1161 - DNA, 20 bp, Artificial Sequence
  Antisense compound
gtacacagagcgtatacgcc

SEQ ID NO: 1162 - DNA, 20 bp, Artificial Sequence
  Antisense compound
ggtacacagagcgtatacgc

SEQ ID NO: 1163 - DNA, 20 bp, Artificial Sequence
  Antisense compound
gggtacacagagcgtatacg

SEQ ID NO: 1164 - DNA, 20 bp, Artificial Sequence
  Antisense compound
agggtacacagagcgtatac

SEQ ID NO: 1165 - DNA, 20 bp, Artificial Sequence
  Antisense compound
cagggtacacagagcgtata

SEQ ID NO: 1166 - DNA, 20 bp, Artificial Sequence
  Antisense compound
acagggtacacagagcgtat

SEQ ID NO: 1167 - DNA, 20 bp, Artificial Sequence
  Antisense compound
aacagggtacacagagcgta

SEQ ID NO: 1168 - DNA, 20 bp, Artificial Sequence
  Antisense compound
caacagggtacacagagcgt

SEQ ID NO: 1169 - DNA, 20 bp, Artificial Sequence
  Antisense compound
gcaacagggtacacagagcg

SEQ ID NO: 1170 - DNA, 20 bp, Artificial Sequence
  Antisense compound
tgcaacagggtacacagagc

SEQ ID NO: 1171 - DNA, 20 bp, Artificial Sequence
  Antisense compound
atgcaacagggtacacagag

SEQ ID NO: 1172 - DNA, 20 bp, Artificial Sequence
  Antisense compound
gatgcaacagggtacacaga

SEQ ID NO: 1173 - DNA, 20 bp, Artificial Sequence
  Antisense compound
agatgcaacagggtacacag

SEQ ID NO: 1174 - DNA, 20 bp, Artificial Sequence
  Antisense compound
gagatgcaacagggtacaca

SEQ ID NO: 1175 - DNA, 20 bp, Artificial Sequence
  Antisense compound
ggagatgcaacagggtacac

SEQ ID NO: 1176 - DNA, 20 bp, Artificial Sequence
  Antisense compound
tggagatgcaacagggtaca

SEQ ID NO: 1177 - DNA, 20 bp, Artificial Sequence
  Antisense compound
gtggagatgcaacagggtac

SEQ ID NO: 1178 - DNA, 20 bp, Artificial Sequence
  Antisense compound
tgtggagatgcaacagggta

SEQ ID NO: 1179 - DNA, 20 bp, Artificial Sequence
  Antisense compound
ctgtggagatgcaacagggt

SEQ ID NO: 1180 - DNA, 20 bp, Artificial Sequence
  Antisense compound
cctgtggagatgcaacaggg

SEQ ID NO: 1181 - DNA, 20 bp, Artificial Sequence
  Antisense compound
tcctgtggagatgcaacagg

SEQ ID NO: 1182 - DNA, 20 bp, Artificial Sequence
  Antisense compound
ctcctgtggagatgcaacag

SEQ ID NO: 1183 - DNA, 20 bp, Artificial Sequence
  Antisense compound
actcctgtggagatgcaaca

SEQ ID NO: 1184 - DNA, 20 bp, Artificial Sequence
  Antisense compound
cactcctgtggagatgcaac

SEQ ID NO: 1185 - DNA, 20 bp, Artificial Sequence
  Antisense compound
acactcctgtggagatgcaa

SEQ ID NO: 1186 - DNA, 20 bp, Artificial Sequence
  Antisense compound
tacactcctgtggagatgca

SEQ ID NO: 1187 - DNA, 20 bp, Artificial Sequence
  Antisense compound
ttacactcctgtggagatgc

SEQ ID NO: 1188 - DNA, 20 bp, Artificial Sequence
  Antisense compound
gttacactcctgtggagatg

SEQ ID NO: 1189 - DNA, 20 bp, Artificial Sequence
  Antisense compound
tgttacactcctgtggagat

SEQ ID NO: 1190 - DNA, 20 bp, Artificial Sequence
  Antisense compound
ttgttacactcctgtggaga

SEQ ID NO: 1191 - DNA, 20 bp, Artificial Sequence
  Antisense compound
attgttacactcctgtggag

SEQ ID NO: 1192 - DNA, 20 bp, Artificial Sequence
  Antisense compound
tattgttacactcctgtgga

SEQ ID NO: 1193 - DNA, 20 bp, Artificial Sequence
  Antisense compound
atattgttacactcctgtgg

SEQ ID NO: 1194 - DNA, 20 bp, Artificial Sequence
  Antisense compound
catattgttacactcctgtg

SEQ ID NO: 1195 - DNA, 20 bp, Artificial Sequence
  Antisense compound
gcatattgttacactcctgt

SEQ ID NO: 1196 - DNA, 20 bp, Artificial Sequence
  Antisense compound
tgcatattgttacactcctg

SEQ ID NO: 1197 - DNA, 20 bp, Artificial Sequence
  Antisense compound
gtgcatattgttacactcct

SEQ ID NO: 1198 - DNA, 20 bp, Artificial Sequence
  Antisense compound
agtgcatattgttacactcc

SEQ ID NO: 1199 - DNA, 20 bp, Artificial Sequence
  Antisense compound
aagtgcatattgttacactc

SEQ ID NO: 1200 - DNA, 20 bp, Artificial Sequence
  Antisense compound
caagtgcatattgttacact

SEQ ID NO: 1201 - DNA, 20 bp, Artificial Sequence
  Antisense compound
acaagtgcatattgttacac

SEQ ID NO: 1202 - DNA, 20 bp, Artificial Sequence
  Antisense compound
gacaagtgcatattgttaca

SEQ ID NO: 1203 - DNA, 20 bp, Artificial Sequence
  Antisense compound
agacaagtgcatattgttac

SEQ ID NO: 1204 - DNA, 20 bp, Artificial Sequence
  Antisense compound
tagacaagtgcatattgtta

SEQ ID NO: 1205 - DNA, 20 bp, Artificial Sequence
  Antisense compound
gtagacaagtgcatattgtt

SEQ ID NO: 1206 - DNA, 20 bp, Artificial Sequence
  Antisense compound
ggtagacaagtgcatattgt

SEQ ID NO: 1207 - DNA, 20 bp, Artificial Sequence
  Antisense compound
aggtagacaagtgcatattg

SEQ ID NO: 1208 - DNA, 20 bp, Artificial Sequence
  Antisense compound
aaggtagacaagtgcatatt

SEQ ID NO: 1209 - DNA, 20 bp, Artificial Sequence
  Antisense compound
caaggtagacaagtgcatat

SEQ ID NO: 1210 - DNA, 20 bp, Artificial Sequence
  Antisense compound
tcaaggtagacaagtgcata

SEQ ID NO: 1211 - DNA, 20 bp, Artificial Sequence
  Antisense compound
atcaaggtagacaagtgcat

SEQ ID NO: 1212 - DNA, 20 bp, Artificial Sequence
  Antisense compound
catcaaggtagacaagtgca

SEQ ID NO: 1213 - DNA, 20 bp, Artificial Sequence
  Antisense compound
tcatcaaggtagacaagtgc

SEQ ID NO: 1214 - DNA, 20 bp, Artificial Sequence
  Antisense compound
ttcatcaaggtagacaagtg

SEQ ID NO: 1215 - DNA, 20 bp, Artificial Sequence
  Antisense compound
tttcatcaaggtagacaagt

SEQ ID NO: 1216 - DNA, 20 bp, Artificial Sequence
  Antisense compound
atttcatcaaggtagacaag

SEQ ID NO: 1217 - DNA, 20 bp, Artificial Sequence
  Antisense compound
catttcatcaaggtagacaa

SEQ ID NO: 1218 - DNA, 20 bp, Artificial Sequence
  Antisense compound
acatttcatcaaggtagaca

SEQ ID NO: 1219 - DNA, 20 bp, Artificial Sequence
  Antisense compound
tacatttcatcaaggtagac

SEQ ID NO: 1220 - DNA, 20 bp, Artificial Sequence
  Antisense compound
ttacatttcatcaaggtaga

SEQ ID NO: 1221 - DNA, 20 bp, Artificial Sequence
  Antisense compound
attacatttcatcaaggtag

SEQ ID NO: 1222 - DNA, 20 bp, Artificial Sequence
  Antisense compound
gattacatttcatcaaggta

SEQ ID NO: 1223 - DNA, 20 bp, Artificial Sequence
  Antisense compound
tgattacatttcatcaaggt

SEQ ID NO: 1224 - DNA, 20 bp, Artificial Sequence
  Antisense compound
atgattacatttcatcaagg

SEQ ID NO: 1225 - DNA, 20 bp, Artificial Sequence
  Antisense compound
aatgattacatttcatcaag

SEQ ID NO: 1226 - DNA, 20 bp, Artificial Sequence
  Antisense compound
caatgattacatttcatcaa

SEQ ID NO: 1227 - DNA, 20 bp, Artificial Sequence
  Antisense compound
gcaatgattacatttcatca

SEQ ID NO: 1228 - DNA, 20 bp, Artificial Sequence
  Antisense compound
cgcaatgattacatttcatc

SEQ ID NO: 1229 - DNA, 20 bp, Artificial Sequence
  Antisense compound
tcgcaatgattacatttcat

SEQ ID NO: 1230 - DNA, 20 bp, Artificial Sequence
  Antisense compound
atcgcaatgattacatttca

SEQ ID NO: 1231 - DNA, 20 bp, Artificial Sequence
  Antisense compound
catcgcaatgattacatttc

SEQ ID NO: 1232 - DNA, 20 bp, Artificial Sequence
  Antisense compound
tcatcgcaatgattacattt

SEQ ID NO: 1233 - DNA, 20 bp, Artificial Sequence
  Antisense compound
ttcatcgcaatgattacatt

SEQ ID NO: 1234 - DNA, 20 bp, Artificial Sequence
  Antisense compound
cttcatcgcaatgattacat

SEQ ID NO: 1235 - DNA, 20 bp, Artificial Sequence
  Antisense compound
acttcatcgcaatgattaca

SEQ ID NO: 1236 - DNA, 20 bp, Artificial Sequence
  Antisense compound
aacttcatcgcaatgattac

SEQ ID NO: 1237 - DNA, 20 bp, Artificial Sequence
  Antisense compound
aaacttcatcgcaatgatta

SEQ ID NO: 1238 - DNA, 20 bp, Artificial Sequence
  Antisense compound
gaaacttcatcgcaatgatt

SEQ ID NO: 1239 - DNA, 20 bp, Artificial Sequence
  Antisense compound
tgaaacttcatcgcaatgat

SEQ ID NO: 1240 - DNA, 20 bp, Artificial Sequence
  Antisense compound
atgaaacttcatcgcaatga

SEQ ID NO: 1241 - DNA, 20 bp, Artificial Sequence
  Antisense compound
catgaaacttcatcgcaatg

SEQ ID NO: 1242 - DNA, 20 bp, Artificial Sequence
  Antisense compound
ccatgaaacttcatcgcaat

SEQ ID NO: 1243 - DNA, 20 bp, Artificial Sequence
  Antisense compound
gccatgaaacttcatcgcaa

SEQ ID NO: 1244 - DNA, 20 bp, Artificial Sequence
  Antisense compound
tgccatgaaacttcatcgca

SEQ ID NO: 1245 - DNA, 20 bp, Artificial Sequence
  Antisense compound
ctgccatgaaacttcatcgc

SEQ ID NO: 1246 - DNA, 20 bp, Artificial Sequence
  Antisense compound
tctgccatgaaacttcatcg

SEQ ID NO: 1247 - DNA, 20 bp, Artificial Sequence
  Antisense compound
gtctgccatgaaacttcatc

SEQ ID NO: 1248 - DNA, 20 bp, Artificial Sequence
  Antisense compound
cgtctgccatgaaacttcat

SEQ ID NO: 1249 - DNA, 20 bp, Artificial Sequence
  Antisense compound
acgtctgccatgaaacttca

SEQ ID NO: 1250 - DNA, 20 bp, Artificial Sequence
  Antisense compound
cacgtctgccatgaaacttc

SEQ ID NO: 1251 - DNA, 20 bp, Artificial Sequence
  Antisense compound
gcacgtctgccatgaaactt

SEQ ID NO: 1252 - DNA, 20 bp, Artificial Sequence
  Antisense compound
cgcacgtctgccatgaaact

SEQ ID NO: 1253 - DNA, 20 bp, Artificial Sequence
  Antisense compound
tcgcacgtctgccatgaaac

SEQ ID NO: 1254 - DNA, 20 bp, Artificial Sequence
  Antisense compound
gtcgcacgtctgccatgaaa

SEQ ID NO: 1255 - DNA, 20 bp, Artificial Sequence
  Antisense compound
agtcgcacgtctgccatgaa

SEQ ID NO: 1256 - DNA, 20 bp, Artificial Sequence
  Antisense compound
aagtcgcacgtctgccatga

SEQ ID NO: 1257 - DNA, 20 bp, Artificial Sequence
  Antisense compound
aaagtcgcacgtctgccatg

SEQ ID NO: 1258 - DNA, 20 bp, Artificial Sequence
  Antisense compound
gaaagtcgcacgtctgccat

SEQ ID NO: 1259 - DNA, 20 bp, Artificial Sequence
  Antisense compound
agaaagtcgcacgtctgcca

SEQ ID NO: 1260 - DNA, 20 bp, Artificial Sequence
  Antisense compound
cagaaagtcgcacgtctgcc

SEQ ID NO: 1261 - DNA, 20 bp, Artificial Sequence
  Antisense compound
tcagaaagtcgcacgtctgc

SEQ ID NO: 1262 - DNA, 20 bp, Artificial Sequence
  Antisense compound
ttcagaaagtcgcacgtctg

SEQ ID NO: 1263 - DNA, 20 bp, Artificial Sequence
  Antisense compound
tttcagaaagtcgcacgtct

SEQ ID NO: 1264 - DNA, 20 bp, Artificial Sequence
  Antisense compound
ctttcagaaagtcgcacgtc

SEQ ID NO: 1265 - DNA, 20 bp, Artificial Sequence
  Antisense compound
gctttcagaaagtcgcacgt

SEQ ID NO: 1266 - DNA, 20 bp, Artificial Sequence
  Antisense compound
ggctttcagaaagtcgcacg

SEQ ID NO: 1267 - DNA, 20 bp, Artificial Sequence
  Antisense compound
tggctttcagaaagtcgcac

SEQ ID NO: 1268 - DNA, 20 bp, Artificial Sequence
  Antisense compound
gtggctttcagaaagtcgca

SEQ ID NO: 1269 - DNA, 20 bp, Artificial Sequence
  Antisense compound
agtggctttcagaaagtcgc

SEQ ID NO: 1270 - DNA, 20 bp, Artificial Sequence
  Antisense compound
aagtggctttcagaaagtcg

SEQ ID NO: 1271 - DNA, 20 bp, Artificial Sequence
  Antisense compound
caagtggctttcagaaagtc

SEQ ID NO: 1272 - DNA, 20 bp, Artificial Sequence
  Antisense compound
acaagtggctttcagaaagt

SEQ ID NO: 1273 - DNA, 20 bp, Artificial Sequence
  Antisense compound
cacaagtggctttcagaaag

SEQ ID NO: 1274 - DNA, 20 bp, Artificial Sequence
  Antisense compound
tcacaagtggctttcagaaa

SEQ ID NO: 1275 - DNA, 20 bp, Artificial Sequence
  Antisense compound
ttcacaagtggctttcagaa

SEQ ID NO: 1276 - DNA, 20 bp, Artificial Sequence
  Antisense compound
gttcacaagtggctttcaga

SEQ ID NO: 1277 - DNA, 20 bp, Artificial Sequence
  Antisense compound
tgttcacaagtggctttcag

SEQ ID NO: 1278 - DNA, 20 bp, Artificial Sequence
  Antisense compound
atgttcacaagtggctttca

SEQ ID NO: 1279 - DNA, 20 bp, Artificial Sequence
  Antisense compound
aatgttcacaagtggctttc

SEQ ID NO: 1280 - DNA, 20 bp, Artificial Sequence
  Antisense compound
caatgttcacaagtggcttt

SEQ ID NO: 1281 - DNA, 20 bp, Artificial Sequence
  Antisense compound
acaatgttcacaagtggctt

SEQ ID NO: 1282 - DNA, 20 bp, Artificial Sequence
  Antisense compound
cacaatgttcacaagtggct

SEQ ID NO: 1283 - DNA, 20 bp, Artificial Sequence
  Antisense compound
ccacaatgttcacaagtggc

SEQ ID NO: 1284 - DNA, 20 bp, Artificial Sequence
  Antisense compound
gccacaatgttcacaagtgg

SEQ ID NO: 1285 - DNA, 20 bp, Artificial Sequence
  Antisense compound
tgccacaatgttcacaagtg

SEQ ID NO: 1286 - DNA, 20 bp, Artificial Sequence
  Antisense compound
gtgccacaatgttcacaagt

SEQ ID NO: 1287 - DNA, 20 bp, Artificial Sequence
  Antisense compound
agtgccacaatgttcacaag

SEQ ID NO: 1288 - DNA, 20 bp, Artificial Sequence
  Antisense compound
cagtgccacaatgttcacaa

SEQ ID NO: 1289 - DNA, 20 bp, Artificial Sequence
  Antisense compound
tcagtgccacaatgttcaca

SEQ ID NO: 1290 - DNA, 20 bp, Artificial Sequence
  Antisense compound
ttcagtgccacaatgttcac

SEQ ID NO: 1291 - DNA, 20 bp, Artificial Sequence
  Antisense compound
tttcagtgccacaatgttca

SEQ ID NO: 1292 - DNA, 20 bp, Artificial Sequence
  Antisense compound
ttttcagtgccacaatgttc

SEQ ID NO: 1293 - DNA, 20 bp, Artificial Sequence
  Antisense compound
attttcagtgccacaatgtt

SEQ ID NO: 1294 - DNA, 20 bp, Artificial Sequence
  Antisense compound
aattttcagtgccacaatgt

SEQ ID NO: 1295 - DNA, 20 bp, Artificial Sequence
  Antisense compound
aaattttcagtgccacaatg

SEQ ID NO: 1296 - DNA, 20 bp, Artificial Sequence
  Antisense compound
taaattttcagtgccacaat

SEQ ID NO: 1297 - DNA, 20 bp, Artificial Sequence
  Antisense compound
ctaaattttcagtgccacaa

SEQ ID NO: 1298 - DNA, 20 bp, Artificial Sequence
  Antisense compound
actaaattttcagtgccaca

SEQ ID NO: 1299 - DNA, 20 bp, Artificial Sequence
  Antisense compound
aactaaattttcagtgccac

SEQ ID NO: 1300 - DNA, 20 bp, Artificial Sequence
  Antisense compound
taactaaattttcagtgcca

SEQ ID NO: 1301 - DNA, 20 bp, Artificial Sequence
  Antisense compound
ataactaaattttcagtgcc

SEQ ID NO: 1302 - DNA, 20 bp, Artificial Sequence
  Antisense compound
aataactaaattttcagtgc

SEQ ID NO: 1303 - DNA, 20 bp, Artificial Sequence
  Antisense compound
caataactaaattttcagtg

SEQ ID NO: 1304 - DNA, 20 bp, Artificial Sequence
  Antisense compound
tcaataactaaattttcagt

SEQ ID NO: 1305 - DNA, 20 bp, Artificial Sequence
  Antisense compound
ttcaataactaaattttcag

SEQ ID NO: 1306 - DNA, 20 bp, Artificial Sequence
  Antisense compound
cttcaataactaaattttca

SEQ ID NO: 1307 - DNA, 20 bp, Artificial Sequence
  Antisense compound
ccttcaataactaaattttc

SEQ ID NO: 1308 - DNA, 20 bp, Artificial Sequence
  Antisense compound
tccttcaataactaaatttt

SEQ ID NO: 1309 - DNA, 20 bp, Artificial Sequence
  Antisense compound
gtccttcaataactaaattt

SEQ ID NO: 1310 - DNA, 20 bp, Artificial Sequence
  Antisense compound
ggtccttcaataactaaatt

SEQ ID NO: 1311 - DNA, 20 bp, Artificial Sequence
  Antisense compound
aggtccttcaataactaaat

SEQ ID NO: 1312 - DNA, 20 bp, Artificial Sequence
  Antisense compound
taggtccttcaataactaaa

SEQ ID NO: 1313 - DNA, 20 bp, Artificial Sequence
  Antisense compound
gtaggtccttcaataactaa

SEQ ID NO: 1314 - DNA, 20 bp, Artificial Sequence
  Antisense compound
agtaggtccttcaataacta

SEQ ID NO: 1315 - DNA, 20 bp, Artificial Sequence
  Antisense compound
tagtaggtccttcaataact

SEQ ID NO: 1316 - DNA, 20 bp, Artificial Sequence
  Antisense compound
gtagtaggtccttcaataac

SEQ ID NO: 1317 - DNA, 20 bp, Artificial Sequence
  Antisense compound
tgtagtaggtccttcaataa

SEQ ID NO: 1318 - DNA, 20 bp, Artificial Sequence
  Antisense compound
atgtagtaggtccttcaata

SEQ ID NO: 1319 - DNA, 20 bp, Artificial Sequence
  Antisense compound
catgtagtaggtccttcaat

SEQ ID NO: 1320 - DNA, 20 bp, Artificial Sequence
  Antisense compound
acatgtagtaggtccttcaa

SEQ ID NO: 1321 - DNA, 20 bp, Artificial Sequence
  Antisense compound
cacatgtagtaggtccttca

SEQ ID NO: 1322 - DNA, 20 bp, Artificial Sequence
  Antisense compound
ccacatgtagtaggtccttc

SEQ ID NO: 1323 - DNA, 20 bp, Artificial Sequence
  Antisense compound
cccacatgtagtaggtcctt

SEQ ID NO: 1324 - DNA, 20 bp, Artificial Sequence
  Antisense compound
acccacatgtagtaggtcct

SEQ ID NO: 1325 - DNA, 20 bp, Artificial Sequence
  Antisense compound
tacccacatgtagtaggtcc

SEQ ID NO: 1326 - DNA, 20 bp, Artificial Sequence
  Antisense compound
gtacccacatgtagtaggtc

SEQ ID NO: 1327 - DNA, 20 bp, Artificial Sequence
  Antisense compound
ggtacccacatgtagtaggt

SEQ ID NO: 1328 - DNA, 20 bp, Artificial Sequence
  Antisense compound
aggtacccacatgtagtagg

SEQ ID NO: 1329 - DNA, 20 bp, Artificial Sequence
  Antisense compound
taggtacccacatgtagtag

SEQ ID NO: 1330 - DNA, 20 bp, Artificial Sequence
  Antisense compound
gtaggtacccacatgtagta

SEQ ID NO: 1331 - DNA, 20 bp, Artificial Sequence
  Antisense compound
ggtaggtacccacatgtagt

SEQ ID NO: 1332 - DNA, 20 bp, Artificial Sequence
  Antisense compound
aggtaggtacccacatgtag

SEQ ID NO: 1333 - DNA, 20 bp, Artificial Sequence
  Antisense compound
taggtaggtacccacatgta

SEQ ID NO: 1334 - DNA, 20 bp, Artificial Sequence
  Antisense compound
gtaggtaggtacccacatgt

SEQ ID NO: 1335 - DNA, 20 bp, Artificial Sequence
  Antisense compound
agtaggtaggtacccacatg

SEQ ID NO: 1336 - DNA, 20 bp, Artificial Sequence
  Antisense compound
tagtaggtaggtacccacat

SEQ ID NO: 1337 - DNA, 20 bp, Artificial Sequence
  Antisense compound
ttagtaggtaggtacccaca

SEQ ID NO: 1338 - DNA, 20 bp, Artificial Sequence
  Antisense compound
attagtaggtaggtacccac

SEQ ID NO: 1339 - DNA, 20 bp, Artificial Sequence
  Antisense compound
cattagtaggtaggtaccca

SEQ ID NO: 1340 - DNA, 20 bp, Artificial Sequence
  Antisense compound
gcattagtaggtaggtaccc

SEQ ID NO: 1341 - DNA, 20 bp, Artificial Sequence
  Antisense compound
agcattagtaggtaggtacc

SEQ ID NO: 1342 - DNA, 20 bp, Artificial Sequence
  Antisense compound
cagcattagtaggtaggtac

SEQ ID NO: 1343 - DNA, 20 bp, Artificial Sequence
  Antisense compound
acagcattagtaggtaggta

SEQ ID NO: 1344 - DNA, 20 bp, Artificial Sequence
  Antisense compound
tacagcattagtaggtaggt

SEQ ID NO: 1345 - DNA, 20 bp, Artificial Sequence
  Antisense compound
ctacagcattagtaggtagg

SEQ ID NO: 1346 - DNA, 20 bp, Artificial Sequence
  Antisense compound
actacagcattagtaggtag

SEQ ID NO: 1347 - DNA, 20 bp, Artificial Sequence
  Antisense compound
cactacagcattagtaggta

SEQ ID NO: 1348 - DNA, 20 bp, Artificial Sequence
  Antisense compound
tcactacagcattagtaggt

SEQ ID NO: 1349 - DNA, 20 bp, Artificial Sequence
  Antisense compound
ttcactacagcattagtagg

SEQ ID NO: 1350 - DNA, 20 bp, Artificial Sequence
  Antisense compound
tttcactacagcattagtag

SEQ ID NO: 1351 - DNA, 20 bp, Artificial Sequence
  Antisense compound
ttttcactacagcattagta

SEQ ID NO: 1352 - DNA, 20 bp, Artificial Sequence
  Antisense compound
attttcactacagcattagt

SEQ ID NO: 1353 - DNA, 20 bp, Artificial Sequence
  Antisense compound
cattttcactacagcattag

SEQ ID NO: 1354 - DNA, 20 bp, Artificial Sequence
  Antisense compound
gcattttcactacagcatta

SEQ ID NO: 1355 - DNA, 20 bp, Artificial Sequence
  Antisense compound
ggcattttcactacagcatt

SEQ ID NO: 1356 - DNA, 20 bp, Artificial Sequence
  Antisense compound
tggcattttcactacagcat

SEQ ID NO: 1357 - DNA, 20 bp, Artificial Sequence
  Antisense compound
atggcattttcactacagca

SEQ ID NO: 1358 - DNA, 20 bp, Artificial Sequence
  Antisense compound
catggcattttcactacagc

SEQ ID NO: 1359 - DNA, 20 bp, Artificial Sequence
  Antisense compound
acatggcattttcactacag

SEQ ID NO: 1360 - DNA, 20 bp, Artificial Sequence
  Antisense compound
gacatggcattttcactaca

SEQ ID NO: 1361 - DNA, 20 bp, Artificial Sequence
  Antisense compound
ggacatggcattttcactac

SEQ ID NO: 1362 - DNA, 20 bp, Artificial Sequence
  Antisense compound
aggacatggcattttcacta

SEQ ID NO: 1363 - DNA, 20 bp, Artificial Sequence
  Antisense compound
caggacatggcattttcact

SEQ ID NO: 1364 - DNA, 20 bp, Artificial Sequence
  Antisense compound
gcaggacatggcattttcac

SEQ ID NO: 1365 - DNA, 20 bp, Artificial Sequence
  Antisense compound
ggcaggacatggcattttca

SEQ ID NO: 1366 - DNA, 20 bp, Artificial Sequence
  Antisense compound
aggcaggacatggcattttc

SEQ ID NO: 1367 - DNA, 20 bp, Artificial Sequence
  Antisense compound
caggcaggacatggcatttt

SEQ ID NO: 1368 - DNA, 20 bp, Artificial Sequence
  Antisense compound
acaggcaggacatggcattt

SEQ ID NO: 1369 - DNA, 20 bp, Artificial Sequence
  Antisense compound
gacaggcaggacatggcatt

SEQ ID NO: 1370 - DNA, 20 bp, Artificial Sequence
  Antisense compound
tgacaggcaggacatggcat

SEQ ID NO: 1371 - DNA, 20 bp, Artificial Sequence
  Antisense compound
ttgacaggcaggacatggca

SEQ ID NO: 1372 - DNA, 20 bp, Artificial Sequence
  Antisense compound
cttgacaggcaggacatggc

SEQ ID NO: 1373 - DNA, 20 bp, Artificial Sequence
  Antisense compound
tcttgacaggcaggacatgg

SEQ ID NO: 1374 - DNA, 20 bp, Artificial Sequence
  Antisense compound
gtcttgacaggcaggacatg

SEQ ID NO: 1375 - DNA, 20 bp, Artificial Sequence
  Antisense compound
ggtcttgacaggcaggacat

SEQ ID NO: 1376 - DNA, 20 bp, Artificial Sequence
  Antisense compound
gggtcttgacaggcaggaca

SEQ ID NO: 1377 - DNA, 20 bp, Artificial Sequence
  Antisense compound
tgggtcttgacaggcaggac

SEQ ID NO: 1378 - DNA, 20 bp, Artificial Sequence
  Antisense compound
ctgggtcttgacaggcagga

SEQ ID NO: 1379 - DNA, 20 bp, Artificial Sequence
  Antisense compound
tctgggtcttgacaggcagg

SEQ ID NO: 1380 - DNA, 20 bp, Artificial Sequence
  Antisense compound
ctctgggtcttgacaggcag

SEQ ID NO: 1381 - DNA, 20 bp, Artificial Sequence
  Antisense compound
tctctgggtcttgacaggca

SEQ ID NO: 1382 - DNA, 20 bp, Artificial Sequence
  Antisense compound
atctctgggtcttgacaggc

SEQ ID NO: 1383 - DNA, 20 bp, Artificial Sequence
  Antisense compound
aatctctgggtcttgacagg

SEQ ID NO: 1384 - DNA, 20 bp, Artificial Sequence
  Antisense compound
caatctctgggtcttgacag

SEQ ID NO: 1385 - DNA, 20 bp, Artificial Sequence
  Antisense compound
ccaatctctgggtcttgaca

SEQ ID NO: 1386 - DNA, 20 bp, Artificial Sequence
  Antisense compound
tccaatctctgggtcttgac

SEQ ID NO: 1387 - DNA, 20 bp, Artificial Sequence
  Antisense compound
gtccaatctctgggtcttga

SEQ ID NO: 1388 - DNA, 20 bp, Artificial Sequence
  Antisense compound
ggtccaatctctgggtcttg

SEQ ID NO: 1389 - DNA, 20 bp, Artificial Sequence
  Antisense compound
aggtccaatctctgggtctt

SEQ ID NO: 1390 - DNA, 20 bp, Artificial Sequence
  Antisense compound
caggtccaatctctgggtct

SEQ ID NO: 1391 - DNA, 20 bp, Artificial Sequence
  Antisense compound
tcaggtccaatctctgggtc

SEQ ID NO: 1392 - DNA, 20 bp, Artificial Sequence
  Antisense compound
ctcaggtccaatctctgggt

SEQ ID NO: 1393 - DNA, 20 bp, Artificial Sequence
  Antisense compound
gctcaggtccaatctctggg

SEQ ID NO: 1394 - DNA, 20 bp, Artificial Sequence
  Antisense compound
tgctcaggtccaatctctgg

SEQ ID NO: 1395 - DNA, 20 bp, Artificial Sequence
  Antisense compound
atgctcaggtccaatctctg

SEQ ID NO: 1396 - DNA, 20 bp, Artificial Sequence
  Antisense compound
tatgctcaggtccaatctct

SEQ ID NO: 1397 - DNA, 20 bp, Artificial Sequence
  Antisense compound
ctatgctcaggtccaatctc

SEQ ID NO: 1398 - DNA, 20 bp, Artificial Sequence
  Antisense compound
actatgctcaggtccaatct

SEQ ID NO: 1399 - DNA, 20 bp, Artificial Sequence
  Antisense compound
cactatgctcaggtccaatc

SEQ ID NO: 1400 - DNA, 20 bp, Artificial Sequence
  Antisense compound
acactatgctcaggtccaat

SEQ ID NO: 1401 - DNA, 20 bp, Artificial Sequence
  Antisense compound
aacactatgctcaggtccaa

SEQ ID NO: 1402 - DNA, 20 bp, Artificial Sequence
  Antisense compound
caacactatgctcaggtcca

SEQ ID NO: 1403 - DNA, 20 bp, Artificial Sequence
  Antisense compound
gcaacactatgctcaggtcc

SEQ ID NO: 1404 - DNA, 20 bp, Artificial Sequence
  Antisense compound
tgcaacactatgctcaggtc

SEQ ID NO: 1405 - DNA, 20 bp, Artificial Sequence
  Antisense compound
ctgcaacactatgctcaggt

SEQ ID NO: 1406 - DNA, 20 bp, Artificial Sequence
  Antisense compound
tctgcaacactatgctcagg

SEQ ID NO: 1407 - DNA, 20 bp, Artificial Sequence
  Antisense compound
atctgcaacactatgctcag

SEQ ID NO: 1408 - DNA, 20 bp, Artificial Sequence
  Antisense compound
aatctgcaacactatgctca

SEQ ID NO: 1409 - DNA, 20 bp, Artificial Sequence
  Antisense compound
taatctgcaacactatgctc

SEQ ID NO: 1410 - DNA, 20 bp, Artificial Sequence
  Antisense compound
ataatctgcaacactatgct

SEQ ID NO: 1411 - DNA, 20 bp, Artificial Sequence
  Antisense compound
gataatctgcaacactatgc

SEQ ID NO: 1412 - DNA, 20 bp, Artificial Sequence
  Antisense compound
tgataatctgcaacactatg

SEQ ID NO: 1413 - DNA, 20 bp, Artificial Sequence
  Antisense compound
gtgataatctgcaacactat

SEQ ID NO: 1414 - DNA, 20 bp, Artificial Sequence
  Antisense compound
tgtgataatctgcaacacta

SEQ ID NO: 1415 - DNA, 20 bp, Artificial Sequence
  Antisense compound
ttgtgataatctgcaacact

SEQ ID NO: 1416 - DNA, 20 bp, Artificial Sequence
  Antisense compound
gttgtgataatctgcaacac

SEQ ID NO: 1417 - DNA, 20 bp, Artificial Sequence
  Antisense compound
ggttgtgataatctgcaaca

SEQ ID NO: 1418 - DNA, 20 bp, Artificial Sequence
  Antisense compound
tggttgtgataatctgcaac

SEQ ID NO: 1419 - DNA, 20 bp, Artificial Sequence
  Antisense compound
gtggttgtgataatctgcaa

SEQ ID NO: 1420 - DNA, 20 bp, Artificial Sequence
  Antisense compound
agtggttgtgataatctgca

SEQ ID NO: 1421 - DNA, 20 bp, Artificial Sequence
  Antisense compound
gagtggttgtgataatctgc

SEQ ID NO: 1422 - DNA, 20 bp, Artificial Sequence
  Antisense compound
tgagtggttgtgataatctg

SEQ ID NO: 1423 - DNA, 20 bp, Artificial Sequence
  Antisense compound
ttgagtggttgtgataatct

SEQ ID NO: 1424 - DNA, 20 bp, Artificial Sequence
  Antisense compound
tttgagtggttgtgataatc

SEQ ID NO: 1425 - DNA, 20 bp, Artificial Sequence
  Antisense compound
gtttgagtggttgtgataat

SEQ ID NO: 1426 - DNA, 20 bp, Artificial Sequence
  Antisense compound
tgtttgagtggttgtgataa

SEQ ID NO: 1427 - DNA, 20 bp, Artificial Sequence
  Antisense compound
atgtttgagtggttgtgata

SEQ ID NO: 1428 - DNA, 20 bp, Artificial Sequence
  Antisense compound
aatgtttgagtggttgtgat

SEQ ID NO: 1429 - DNA, 20 bp, Artificial Sequence
  Antisense compound
caatgtttgagtggttgtga

SEQ ID NO: 1430 - DNA, 20 bp, Artificial Sequence
  Antisense compound
tcaatgtttgagtggttgtg

SEQ ID NO: 1431 - DNA, 20 bp, Artificial Sequence
  Antisense compound
ttcaatgtttgagtggttgt

SEQ ID NO: 1432 - DNA, 20 bp, Artificial Sequence
  Antisense compound
tttcaatgtttgagtggttg

SEQ ID NO: 1433 - DNA, 20 bp, Artificial Sequence
  Antisense compound
gtttcaatgtttgagtggtt

SEQ ID NO: 1434 - DNA, 20 bp, Artificial Sequence
  Antisense compound
agtttcaatgtttgagtggt

SEQ ID NO: 1435 - DNA, 20 bp, Artificial Sequence
  Antisense compound
gagtttcaatgtttgagtgg

SEQ ID NO: 1436 - DNA, 20 bp, Artificial Sequence
  Antisense compound
cgagtttcaatgtttgagtg

SEQ ID NO: 1437 - DNA, 20 bp, Artificial Sequence
  Antisense compound
tcgagtttcaatgtttgagt

SEQ ID NO: 1438 - DNA, 20 bp, Artificial Sequence
  Antisense compound
gtcgagtttcaatgtttgag

SEQ ID NO: 1439 - DNA, 20 bp, Artificial Sequence
  Antisense compound
agtcgagtttcaatgtttga

SEQ ID NO: 1440 - DNA, 20 bp, Artificial Sequence
  Antisense compound
gagtcgagtttcaatgtttg

SEQ ID NO: 1441 - DNA, 20 bp, Artificial Sequence
  Antisense compound
ggagtcgagtttcaatgttt

SEQ ID NO: 1442 - DNA, 20 bp, Artificial Sequence
  Antisense compound
cggagtcgagtttcaatgtt

SEQ ID NO: 1443 - DNA, 20 bp, Artificial Sequence
  Antisense compound
gcggagtcgagtttcaatgt

SEQ ID NO: 1444 - DNA, 20 bp, Artificial Sequence
  Antisense compound
tgcggagtcgagtttcaatg

SEQ ID NO: 1445 - DNA, 20 bp, Artificial Sequence
  Antisense compound
ttgcggagtcgagtttcaat

SEQ ID NO: 1446 - DNA, 20 bp, Artificial Sequence
  Antisense compound
cttgcggagtcgagtttcaa

SEQ ID NO: 1447 - DNA, 20 bp, Artificial Sequence
  Antisense compound
ccttgcggagtcgagtttca

SEQ ID NO: 1448 - DNA, 20 bp, Artificial Sequence
  Antisense compound
cccttgcggagtcgagtttc

SEQ ID NO: 1449 - DNA, 20 bp, Artificial Sequence
  Antisense compound
tcccttgcggagtcgagttt

SEQ ID NO: 1450 - DNA, 20 bp, Artificial Sequence
  Antisense compound
ctcccttgcggagtcgagtt

SEQ ID NO: 1451 - DNA, 20 bp, Artificial Sequence
  Antisense compound
cctcccttgcggagtcgagt

SEQ ID NO: 1452 - DNA, 20 bp, Artificial Sequence
  Antisense compound
acctcccttgcggagtcgag

SEQ ID NO: 1453 - DNA, 20 bp, Artificial Sequence
  Antisense compound
tacctcccttgcggagtcga

SEQ ID NO: 1454 - DNA, 20 bp, Artificial Sequence
  Antisense compound
ctacctcccttgcggagtcg

SEQ ID NO: 1455 - DNA, 20 bp, Artificial Sequence
  Antisense compound
cctacctcccttgcggagtc

SEQ ID NO: 1456 - DNA, 20 bp, Artificial Sequence
  Antisense compound
tcctacctcccttgcggagt

SEQ ID NO: 1457 - DNA, 20 bp, Artificial Sequence
  Antisense compound
gtcctacctcccttgcggag

SEQ ID NO: 1458 - DNA, 20 bp, Artificial Sequence
  Antisense compound
agtcctacctcccttgcgga

SEQ ID NO: 1459 - DNA, 20 bp, Artificial Sequence
  Antisense compound
tagtcctacctcccttgcgg

SEQ ID NO: 1460 - DNA, 20 bp, Artificial Sequence
  Antisense compound
ctagtcctacctcccttgcg

SEQ ID NO: 1461 - DNA, 20 bp, Artificial Sequence
  Antisense compound
tctagtcctacctcccttgc

SEQ ID NO: 1462 - DNA, 20 bp, Artificial Sequence
  Antisense compound
atctagtcctacctcccttg

SEQ ID NO: 1463 - DNA, 20 bp, Artificial Sequence
  Antisense compound
catctagtcctacctccctt

SEQ ID NO: 1464 - DNA, 20 bp, Artificial Sequence
  Antisense compound
acatctagtcctacctccct

SEQ ID NO: 1465 - DNA, 20 bp, Artificial Sequence
  Antisense compound
aacatctagtcctacctccc

SEQ ID NO: 1466 - DNA, 20 bp, Artificial Sequence
  Antisense compound
aaacatctagtcctacctcc

SEQ ID NO: 1467 - DNA, 20 bp, Artificial Sequence
  Antisense compound
aaaacatctagtcctacctc

SEQ ID NO: 1468 - DNA, 20 bp, Artificial Sequence
  Antisense compound
caaaacatctagtcctacct

SEQ ID NO: 1469 - DNA, 20 bp, Artificial Sequence
  Antisense compound
ccaaaacatctagtcctacc

SEQ ID NO: 1470 - DNA, 20 bp, Artificial Sequence
  Antisense compound
tccaaaacatctagtcctac

SEQ ID NO: 1471 - DNA, 20 bp, Artificial Sequence
  Antisense compound
ctccaaaacatctagtccta

SEQ ID NO: 1472 - DNA, 20 bp, Artificial Sequence
  Antisense compound
cctccaaaacatctagtcct

SEQ ID NO: 1473 - DNA, 20 bp, Artificial Sequence
  Antisense compound
gcctccaaaacatctagtcc

SEQ ID NO: 1474 - DNA, 20 bp, Artificial Sequence
  Antisense compound
agcctccaaaacatctagtc

SEQ ID NO: 1475 - DNA, 20 bp, Artificial Sequence
  Antisense compound
cagcctccaaaacatctagt

SEQ ID NO: 1476 - DNA, 20 bp, Artificial Sequence
  Antisense compound
acagcctccaaaacatctag

SEQ ID NO: 1477 - DNA, 20 bp, Artificial Sequence
  Antisense compound
cacagcctccaaaacatcta

SEQ ID NO: 1478 - DNA, 20 bp, Artificial Sequence
  Antisense compound
acacagcctccaaaacatct

SEQ ID NO: 1479 - DNA, 20 bp, Artificial Sequence
  Antisense compound
cacacagcctccaaaacatc

SEQ ID NO: 1480 - DNA, 20 bp, Artificial Sequence
  Antisense compound
acacacagcctccaaaacat

SEQ ID NO: 1481 - DNA, 20 bp, Artificial Sequence
  Antisense compound
aacacacagcctccaaaaca

SEQ ID NO: 1482 - DNA, 20 bp, Artificial Sequence
  Antisense compound
aaacacacagcctccaaaac

SEQ ID NO: 1483 - DNA, 20 bp, Artificial Sequence
  Antisense compound
caaacacacagcctccaaaa

SEQ ID NO: 1484 - DNA, 20 bp, Artificial Sequence
  Antisense compound
gcaaacacacagcctccaaa

SEQ ID NO: 1485 - DNA, 20 bp, Artificial Sequence
  Antisense compound
ggcaaacacacagcctccaa

SEQ ID NO: 1486 - DNA, 20 bp, Artificial Sequence
  Antisense compound
aggcaaacacacagcctcca

SEQ ID NO: 1487 - DNA, 20 bp, Artificial Sequence
  Antisense compound
taggcaaacacacagcctcc

SEQ ID NO: 1488 - DNA, 20 bp, Artificial Sequence
  Antisense compound
ataggcaaacacacagcctc

SEQ ID NO: 1489 - DNA, 20 bp, Artificial Sequence
  Antisense compound
cataggcaaacacacagcct

SEQ ID NO: 1490 - DNA, 20 bp, Artificial Sequence
  Antisense compound
acataggcaaacacacagcc

SEQ ID NO: 1491 - DNA, 20 bp, Artificial Sequence
  Antisense compound
aacataggcaaacacacagc

SEQ ID NO: 1492 - DNA, 20 bp, Artificial Sequence
  Antisense compound
caacataggcaaacacacag

SEQ ID NO: 1493 - DNA, 20 bp, Artificial Sequence
  Antisense compound
ccaacataggcaaacacaca

SEQ ID NO: 1494 - DNA, 20 bp, Artificial Sequence
  Antisense compound
gccaacataggcaaacacac

SEQ ID NO: 1495 - DNA, 20 bp, Artificial Sequence
  Antisense compound
agccaacataggcaaacaca

SEQ ID NO: 1496 - DNA, 20 bp, Artificial Sequence
  Antisense compound
cagccaacataggcaaacac

SEQ ID NO: 1497 - DNA, 20 bp, Artificial Sequence
  Antisense compound
gcagccaacataggcaaaca

SEQ ID NO: 1498 - DNA, 20 bp, Artificial Sequence
  Antisense compound
agcagccaacataggcaaac

SEQ ID NO: 1499 - DNA, 20 bp, Artificial Sequence
  Antisense compound
tagcagccaacataggcaaa

SEQ ID NO: 1500 - DNA, 20 bp, Artificial Sequence
  Antisense compound
atagcagccaacataggcaa

SEQ ID NO: 1501 - DNA, 20 bp, Artificial Sequence
  Antisense compound
tatagcagccaacataggca

SEQ ID NO: 1502 - DNA, 20 bp, Artificial Sequence
  Antisense compound
ttatagcagccaacataggc

SEQ ID NO: 1503 - DNA, 20 bp, Artificial Sequence
  Antisense compound
attatagcagccaacatagg

SEQ ID NO: 1504 - DNA, 20 bp, Artificial Sequence
  Antisense compound
tattatagcagccaacatag

SEQ ID NO: 1505 - DNA, 20 bp, Artificial Sequence
  Antisense compound
ttattatagcagccaacata

SEQ ID NO: 1506 - DNA, 20 bp, Artificial Sequence
  Antisense compound
cttattatagcagccaacat

SEQ ID NO: 1507 - DNA, 20 bp, Artificial Sequence
  Antisense compound
gcttattatagcagccaaca

SEQ ID NO: 1508 - DNA, 20 bp, Artificial Sequence
  Antisense compound
cgcttattatagcagccaac

SEQ ID NO: 1509 - DNA, 20 bp, Artificial Sequence
  Antisense compound
acgcttattatagcagccaa

SEQ ID NO: 1510 - DNA, 20 bp, Artificial Sequence
  Antisense compound
cacgcttattatagcagcca

SEQ ID NO: 1511 - DNA, 20 bp, Artificial Sequence
  Antisense compound
gcacgcttattatagcagcc

SEQ ID NO: 1512 - DNA, 20 bp, Artificial Sequence
  Antisense compound
ggcacgcttattatagcagc

SEQ ID NO: 1513 - DNA, 20 bp, Artificial Sequence
  Antisense compound
aggcacgcttattatagcag

SEQ ID NO: 1514 - DNA, 20 bp, Artificial Sequence
  Antisense compound
taggcacgcttattatagca

SEQ ID NO: 1515 - DNA, 20 bp, Artificial Sequence
  Antisense compound
gtaggcacgcttattatagc

SEQ ID NO: 1516 - DNA, 20 bp, Artificial Sequence
  Antisense compound
agtaggcacgcttattatag

SEQ ID NO: 1517 - DNA, 20 bp, Artificial Sequence
  Antisense compound
cagtaggcacgcttattata

SEQ ID NO: 1518 - DNA, 20 bp, Artificial Sequence
  Antisense compound
ccagtaggcacgcttattat

SEQ ID NO: 1519 - DNA, 20 bp, Artificial Sequence
  Antisense compound
cccagtaggcacgcttatta

SEQ ID NO: 1520 - DNA, 20 bp, Artificial Sequence
  Antisense compound
acccagtaggcacgcttatt

SEQ ID NO: 1521 - DNA, 20 bp, Artificial Sequence
  Antisense compound
aacccagtaggcacgcttat

SEQ ID NO: 1522 - DNA, 20 bp, Artificial Sequence
  Antisense compound
gaacccagtaggcacgctta

SEQ ID NO: 1523 - DNA, 20 bp, Artificial Sequence
  Antisense compound
ggaacccagtaggcacgctt

SEQ ID NO: 1524 - DNA, 20 bp, Artificial Sequence
  Antisense compound
aggaacccagtaggcacgct

SEQ ID NO: 1525 - DNA, 20 bp, Artificial Sequence
  Antisense compound
gaggaacccagtaggcacgc

SEQ ID NO: 1526 - DNA, 20 bp, Artificial Sequence
  Antisense compound
cgaggaacccagtaggcacg

SEQ ID NO: 1527 - DNA, 20 bp, Artificial Sequence
  Antisense compound
acgaggaacccagtaggcac

SEQ ID NO: 1528 - DNA, 20 bp, Artificial Sequence
  Antisense compound
cacgaggaacccagtaggca

SEQ ID NO: 1529 - DNA, 20 bp, Artificial Sequence
  Antisense compound
gcacgaggaacccagtaggc

SEQ ID NO: 1530 - DNA, 20 bp, Artificial Sequence
  Antisense compound
agcacgaggaacccagtagg

SEQ ID NO: 1531 - DNA, 20 bp, Artificial Sequence
  Antisense compound
tagcacgaggaacccagtag

SEQ ID NO: 1532 - DNA, 20 bp, Artificial Sequence
  Antisense compound
ctagcacgaggaacccagta

SEQ ID NO: 1533 - DNA, 20 bp, Artificial Sequence
  Antisense compound
actagcacgaggaacccagt

SEQ ID NO: 1534 - DNA, 20 bp, Artificial Sequence
  Antisense compound
cactagcacgaggaacccag

SEQ ID NO: 1535 - DNA, 20 bp, Artificial Sequence
  Antisense compound
gcactagcacgaggaaccca

SEQ ID NO: 1536 - DNA, 20 bp, Artificial Sequence
  Antisense compound
agcactagcacgaggaaccc

SEQ ID NO: 1537 - DNA, 20 bp, Artificial Sequence
  Antisense compound
cagcactagcacgaggaacc

SEQ ID NO: 1538 - DNA, 20 bp, Artificial Sequence
  Antisense compound
tcagcactagcacgaggaac

SEQ ID NO: 1539 - DNA, 20 bp, Artificial Sequence
  Antisense compound
atcagcactagcacgaggaa

SEQ ID NO: 1540 - DNA, 20 bp, Artificial Sequence
  Antisense compound
tatcagcactagcacgagga

SEQ ID NO: 1541 - DNA, 20 bp, Artificial Sequence
  Antisense compound
atatcagcactagcacgagg

SEQ ID NO: 1542 - DNA, 20 bp, Artificial Sequence
  Antisense compound
aatatcagcactagcacgag

SEQ ID NO: 1543 - DNA, 20 bp, Artificial Sequence
  Antisense compound
caatatcagcactagcacga

SEQ ID NO: 1544 - DNA, 20 bp, Artificial Sequence
  Antisense compound
ccaatatcagcactagcacg

SEQ ID NO: 1545 - DNA, 20 bp, Artificial Sequence
  Antisense compound
gccaatatcagcactagcac

SEQ ID NO: 1546 - DNA, 20 bp, Artificial Sequence
  Antisense compound
agccaatatcagcactagca

SEQ ID NO: 1547 - DNA, 20 bp, Artificial Sequence
  Antisense compound
gagccaatatcagcactagc

SEQ ID NO: 1548 - DNA, 20 bp, Artificial Sequence
  Antisense compound
tgagccaatatcagcactag

SEQ ID NO: 1549 - DNA, 20 bp, Artificial Sequence
  Antisense compound
ctgagccaatatcagcacta

SEQ ID NO: 1550 - DNA, 20 bp, Artificial Sequence
  Antisense compound
cctgagccaatatcagcact

SEQ ID NO: 1551 - DNA, 20 bp, Artificial Sequence
  Antisense compound
gcctgagccaatatcagcac

SEQ ID NO: 1552 - DNA, 20 bp, Artificial Sequence
  Antisense compound
ggcctgagccaatatcagca

SEQ ID NO: 1553 - DNA, 20 bp, Artificial Sequence
  Antisense compound
tggcctgagccaatatcagc

SEQ ID NO: 1554 - DNA, 20 bp, Artificial Sequence
  Antisense compound
atggcctgagccaatatcag

SEQ ID NO: 1555 - DNA, 20 bp, Artificial Sequence
  Antisense compound
tatggcctgagccaatatca

SEQ ID NO: 1556 - DNA, 20 bp, Artificial Sequence
  Antisense compound
gtatggcctgagccaatatc

SEQ ID NO: 1557 - DNA, 20 bp, Artificial Sequence
  Antisense compound
agtatggcctgagccaatat

SEQ ID NO: 1558 - DNA, 20 bp, Artificial Sequence
  Antisense compound
cagtatggcctgagccaata

SEQ ID NO: 1559 - DNA, 20 bp, Artificial Sequence
  Antisense compound
ccagtatggcctgagccaat

SEQ ID NO: 1560 - DNA, 20 bp, Artificial Sequence
  Antisense compound
gccagtatggcctgagccaa

SEQ ID NO: 1561 - DNA, 20 bp, Artificial Sequence
  Antisense compound
tgccagtatggcctgagcca

SEQ ID NO: 1562 - DNA, 20 bp, Artificial Sequence
  Antisense compound
atgccagtatggcctgagcc

SEQ ID NO: 1563 - DNA, 20 bp, Artificial Sequence
  Antisense compound
aatgccagtatggcctgagc

SEQ ID NO: 1564 - DNA, 20 bp, Artificial Sequence
  Antisense compound
taatgccagtatggcctgag

SEQ ID NO: 1565 - DNA, 20 bp, Artificial Sequence
  Antisense compound
gtaatgccagtatggcctga

SEQ ID NO: 1566 - DNA, 20 bp, Artificial Sequence
  Antisense compound
agtaatgccagtatggcctg

SEQ ID NO: 1567 - DNA, 20 bp, Artificial Sequence
  Antisense compound
cagtaatgccagtatggcct

SEQ ID NO: 1568 - DNA, 20 bp, Artificial Sequence
  Antisense compound
ccagtaatgccagtatggcc

SEQ ID NO: 1569 - DNA, 20 bp, Artificial Sequence
  Antisense compound
accagtaatgccagtatggc

SEQ ID NO: 1570 - DNA, 20 bp, Artificial Sequence
  Antisense compound
caccagtaatgccagtatgg

SEQ ID NO: 1571 - DNA, 20 bp, Artificial Sequence
  Antisense compound
tcaccagtaatgccagtatg

SEQ ID NO: 1572 - DNA, 20 bp, Artificial Sequence
  Antisense compound
gtcaccagtaatgccagtat

SEQ ID NO: 1573 - DNA, 20 bp, Artificial Sequence
  Antisense compound
tgtcaccagtaatgccagta

SEQ ID NO: 1574 - DNA, 20 bp, Artificial Sequence
  Antisense compound
ttgtcaccagtaatgccagt

SEQ ID NO: 1575 - DNA, 20 bp, Artificial Sequence
  Antisense compound
attgtcaccagtaatgccag

SEQ ID NO: 1576 - DNA, 20 bp, Artificial Sequence
  Antisense compound
cattgtcaccagtaatgcca

SEQ ID NO: 1577 - DNA, 20 bp, Artificial Sequence
  Antisense compound
acattgtcaccagtaatgcc

SEQ ID NO: 1578 - DNA, 20 bp, Artificial Sequence
  Antisense compound
cacattgtcaccagtaatgc

SEQ ID NO: 1579 - DNA, 20 bp, Artificial Sequence
  Antisense compound
ccacattgtcaccagtaatg

SEQ ID NO: 1580 - DNA, 20 bp, Artificial Sequence
  Antisense compound
tccacattgtcaccagtaat

SEQ ID NO: 1581 - DNA, 20 bp, Artificial Sequence
  Antisense compound
ctccacattgtcaccagtaa

SEQ ID NO: 1582 - DNA, 20 bp, Artificial Sequence
  Antisense compound
tctccacattgtcaccagta

SEQ ID NO: 1583 - DNA, 20 bp, Artificial Sequence
  Antisense compound
gtctccacattgtcaccagt

SEQ ID NO: 1584 - DNA, 20 bp, Artificial Sequence
  Antisense compound
ggtctccacattgtcaccag

SEQ ID NO: 1585 - DNA, 20 bp, Artificial Sequence
  Antisense compound
aggtctccacattgtcacca

SEQ ID NO: 1586 - DNA, 20 bp, Artificial Sequence
  Antisense compound
aaggtctccacattgtcacc

SEQ ID NO: 1587 - DNA, 20 bp, Artificial Sequence
  Antisense compound
caaggtctccacattgtcac

SEQ ID NO: 1588 - DNA, 20 bp, Artificial Sequence
  Antisense compound
tcaaggtctccacattgtca

SEQ ID NO: 1589 - DNA, 20 bp, Artificial Sequence
  Antisense compound
ttcaaggtctccacattgtc

SEQ ID NO: 1590 - DNA, 20 bp, Artificial Sequence
  Antisense compound
attcaaggtctccacattgt

SEQ ID NO: 1591 - DNA, 20 bp, Artificial Sequence
  Antisense compound
cattcaaggtctccacattg

SEQ ID NO: 1592 - DNA, 20 bp, Artificial Sequence
  Antisense compound
tcattcaaggtctccacatt

SEQ ID NO: 1593 - DNA, 20 bp, Artificial Sequence
  Antisense compound
ctcattcaaggtctccacat

SEQ ID NO: 1594 - DNA, 20 bp, Artificial Sequence
  Antisense compound
cctcattcaaggtctccaca

SEQ ID NO: 1595 - DNA, 20 bp, Artificial Sequence
  Antisense compound
tcctcattcaaggtctccac

SEQ ID NO: 1596 - DNA, 20 bp, Artificial Sequence
  Antisense compound
atcctcattcaaggtctcca

SEQ ID NO: 1597 - DNA, 20 bp, Artificial Sequence
  Antisense compound
gatcctcattcaaggtctcc

SEQ ID NO: 1598 - DNA, 20 bp, Artificial Sequence
  Antisense compound
agatcctcattcaaggtctc

SEQ ID NO: 1599 - DNA, 20 bp, Artificial Sequence
  Antisense compound
gagatcctcattcaaggtct

SEQ ID NO: 1600 - DNA, 20 bp, Artificial Sequence
  Antisense compound
ggagatcctcattcaaggtc

SEQ ID NO: 1601 - DNA, 20 bp, Artificial Sequence
  Antisense compound
aggagatcctcattcaaggt

SEQ ID NO: 1602 - DNA, 20 bp, Artificial Sequence
  Antisense compound
aaggagatcctcattcaagg

SEQ ID NO: 1603 - DNA, 20 bp, Artificial Sequence
  Antisense compound
caaggagatcctcattcaag

SEQ ID NO: 1604 - DNA, 20 bp, Artificial Sequence
  Antisense compound
tcaaggagatcctcattcaa

SEQ ID NO: 1605 - DNA, 20 bp, Artificial Sequence
  Antisense compound
ctcaaggagatcctcattca

SEQ ID NO: 1606 - DNA, 20 bp, Artificial Sequence
  Antisense compound
tctcaaggagatcctcattc

SEQ ID NO: 1607 - DNA, 20 bp, Artificial Sequence
  Antisense compound
atctcaaggagatcctcatt

SEQ ID NO: 1608 - DNA, 20 bp, Artificial Sequence
  Antisense compound
tatctcaaggagatcctcat

SEQ ID NO: 1609 - DNA, 20 bp, Artificial Sequence
  Antisense compound
gtatctcaaggagatcctca

SEQ ID NO: 1610 - DNA, 20 bp, Artificial Sequence
  Antisense compound
agtatctcaaggagatcctc

SEQ ID NO: 1611 - DNA, 20 bp, Artificial Sequence
  Antisense compound
cagtatctcaaggagatcct

SEQ ID NO: 1612 - DNA, 20 bp, Artificial Sequence
  Antisense compound
tcagtatctcaaggagatcc

SEQ ID NO: 1613 - DNA, 20 bp, Artificial Sequence
  Antisense compound
ctcagtatctcaaggagatc

SEQ ID NO: 1614 - DNA, 20 bp, Artificial Sequence
  Antisense compound
actcagtatctcaaggagat

SEQ ID NO: 1615 - DNA, 20 bp, Artificial Sequence
  Antisense compound
gactcagtatctcaaggaga

SEQ ID NO: 1616 - DNA, 20 bp, Artificial Sequence
  Antisense compound
cgactcagtatctcaaggag

SEQ ID NO: 1617 - DNA, 20 bp, Artificial Sequence
  Antisense compound
acgactcagtatctcaagga

SEQ ID NO: 1618 - DNA, 20 bp, Artificial Sequence
  Antisense compound
cacgactcagtatctcaagg

SEQ ID NO: 1619 - DNA, 20 bp, Artificial Sequence
  Antisense compound
tcacgactcagtatctcaag

SEQ ID NO: 1620 - DNA, 20 bp, Artificial Sequence
  Antisense compound
ttcacgactcagtatctcaa

SEQ ID NO: 1621 - DNA, 20 bp, Artificial Sequence
  Antisense compound
gttcacgactcagtatctca

SEQ ID NO: 1622 - DNA, 20 bp, Artificial Sequence
  Antisense compound
cgttcacgactcagtatctc

SEQ ID NO: 1623 - DNA, 20 bp, Artificial Sequence
  Antisense compound
acgttcacgactcagtatct

SEQ ID NO: 1624 - DNA, 20 bp, Artificial Sequence
  Antisense compound
cacgttcacgactcagtatc

SEQ ID NO: 1625 - DNA, 20 bp, Artificial Sequence
  Antisense compound
acacgttcacgactcagtat

SEQ ID NO: 1626 - DNA, 20 bp, Artificial Sequence
  Antisense compound
aacacgttcacgactcagta

SEQ ID NO: 1627 - DNA, 20 bp, Artificial Sequence
  Antisense compound
taacacgttcacgactcagt

SEQ ID NO: 1628 - DNA, 20 bp, Artificial Sequence
  Antisense compound
ttaacacgttcacgactcag

SEQ ID NO: 1629 - DNA, 20 bp, Artificial Sequence
  Antisense compound
gttaacacgttcacgactca

SEQ ID NO: 1630 - DNA, 20 bp, Artificial Sequence
  Antisense compound
tgttaacacgttcacgactc

SEQ ID NO: 1631 - DNA, 20 bp, Artificial Sequence
  Antisense compound
atgttaacacgttcacgact

SEQ ID NO: 1632 - DNA, 20 bp, Artificial Sequence
  Antisense compound
aatgttaacacgttcacgac

SEQ ID NO: 1633 - DNA, 20 bp, Artificial Sequence
  Antisense compound
taatgttaacacgttcacga

SEQ ID NO: 1634 - DNA, 20 bp, Artificial Sequence
  Antisense compound
ttaatgttaacacgttcacg

SEQ ID NO: 1635 - DNA, 20 bp, Artificial Sequence
  Antisense compound
gttaatgttaacacgttcac

SEQ ID NO: 1636 - DNA, 20 bp, Artificial Sequence
  Antisense compound
tgttaatgttaacacgttca

SEQ ID NO: 1637 - DNA, 20 bp, Artificial Sequence
  Antisense compound
atgttaatgttaacacgttc

SEQ ID NO: 1638 - DNA, 20 bp, Artificial Sequence
  Antisense compound
aatgttaatgttaacacgtt

SEQ ID NO: 1639 - DNA, 20 bp, Artificial Sequence
  Antisense compound
caatgttaatgttaacacgt

SEQ ID NO: 1640 - DNA, 20 bp, Artificial Sequence
  Antisense compound
acaatgttaatgttaacacg

SEQ ID NO: 1641 - DNA, 20 bp, Artificial Sequence
  Antisense compound
aacaatgttaatgttaacac

SEQ ID NO: 1642 - DNA, 20 bp, Artificial Sequence
  Antisense compound
caacaatgttaatgttaaca

SEQ ID NO: 1643 - DNA, 20 bp, Artificial Sequence
  Antisense compound
ccaacaatgttaatgttaac

SEQ ID NO: 1644 - DNA, 20 bp, Artificial Sequence
  Antisense compound
gccaacaatgttaatgttaa

SEQ ID NO: 1645 - DNA, 20 bp, Artificial Sequence
  Antisense compound
cgccaacaatgttaatgtta

SEQ ID NO: 1646 - DNA, 20 bp, Artificial Sequence
  Antisense compound
tcgccaacaatgttaatgtt

SEQ ID NO: 1647 - DNA, 20 bp, Artificial Sequence
  Antisense compound
atcgccaacaatgttaatgt

SEQ ID NO: 1648 - DNA, 20 bp, Artificial Sequence
  Antisense compound
aatcgccaacaatgttaatg

SEQ ID NO: 1649 - DNA, 20 bp, Artificial Sequence
  Antisense compound
aaatcgccaacaatgttaat

SEQ ID NO: 1650 - DNA, 20 bp, Artificial Sequence
  Antisense compound
aaaatcgccaacaatgttaa

SEQ ID NO: 1651 - DNA, 20 bp, Artificial Sequence
  Antisense compound
gaaaatcgccaacaatgtta

SEQ ID NO: 1652 - DNA, 20 bp, Artificial Sequence
  Antisense compound
tgaaaatcgccaacaatgtt

SEQ ID NO: 1653 - DNA, 20 bp, Artificial Sequence
  Antisense compound
atgaaaatcgccaacaatgt

SEQ ID NO: 1654 - DNA, 20 bp, Artificial Sequence
  Antisense compound
aatgaaaatcgccaacaatg

SEQ ID NO: 1655 - DNA, 20 bp, Artificial Sequence
  Antisense compound
aaatgaaaatcgccaacaat

SEQ ID NO: 1656 - DNA, 20 bp, Artificial Sequence
  Antisense compound
caaatgaaaatcgccaacaa

SEQ ID NO: 1657 - DNA, 20 bp, Artificial Sequence
  Antisense compound
tcaaatgaaaatcgccaaca

SEQ ID NO: 1658 - DNA, 20 bp, Artificial Sequence
  Antisense compound
ttcaaatgaaaatcgccaac

SEQ ID NO: 1659 - DNA, 20 bp, Artificial Sequence
  Antisense compound
attcaaatgaaaatcgccaa

SEQ ID NO: 1660 - DNA, 20 bp, Artificial Sequence
  Antisense compound
cattcaaatgaaaatcgcca

SEQ ID NO: 1661 - DNA, 20 bp, Artificial Sequence
  Antisense compound
tcattcaaatgaaaatcgcc

SEQ ID NO: 1662 - DNA, 20 bp, Artificial Sequence
  Antisense compound
ttcattcaaatgaaaatcgc

SEQ ID NO: 1663 - DNA, 20 bp, Artificial Sequence
  Antisense compound
cttcattcaaatgaaaatcg

SEQ ID NO: 1664 - DNA, 20 bp, Artificial Sequence
  Antisense compound
tcttcattcaaatgaaaatc

SEQ ID NO: 1665 - DNA, 20 bp, Artificial Sequence
  Antisense compound
ctcttcattcaaatgaaaat

SEQ ID NO: 1666 - DNA, 20 bp, Artificial Sequence
  Antisense compound
cctcttcattcaaatgaaaa

SEQ ID NO: 1667 - DNA, 20 bp, Artificial Sequence
  Antisense compound
acctcttcattcaaatgaaa

SEQ ID NO: 1668 - DNA, 20 bp, Artificial Sequence
  Antisense compound
aacctcttcattcaaatgaa

SEQ ID NO: 1669 - DNA, 20 bp, Artificial Sequence
  Antisense compound
caacctcttcattcaaatga

SEQ ID NO: 1670 - DNA, 20 bp, Artificial Sequence
  Antisense compound
gcaacctcttcattcaaatg

SEQ ID NO: 1671 - DNA, 20 bp, Artificial Sequence
  Antisense compound
ggcaacctcttcattcaaat

SEQ ID NO: 1672 - DNA, 20 bp, Artificial Sequence
  Antisense compound
tggcaacctcttcattcaaa

SEQ ID NO: 1673 - DNA, 20 bp, Artificial Sequence
  Antisense compound
atggcaacctcttcattcaa

SEQ ID NO: 1674 - DNA, 20 bp, Artificial Sequence
  Antisense compound
gatggcaacctcttcattca

SEQ ID NO: 1675 - DNA, 20 bp, Artificial Sequence
  Antisense compound
tgatggcaacctcttcattc

SEQ ID NO: 1676 - DNA, 20 bp, Artificial Sequence
  Antisense compound
atgatggcaacctcttcatt

SEQ ID NO: 1677 - DNA, 20 bp, Artificial Sequence
  Antisense compound
aatgatggcaacctcttcat

SEQ ID NO: 1678 - DNA, 20 bp, Artificial Sequence
  Antisense compound
aaatgatggcaacctcttca

SEQ ID NO: 1679 - DNA, 20 bp, Artificial Sequence
  Antisense compound
aaaatgatggcaacctcttc

SEQ ID NO: 1680 - DNA, 20 bp, Artificial Sequence
  Antisense compound
caaaatgatggcaacctctt

SEQ ID NO: 1681 - DNA, 20 bp, Artificial Sequence
  Antisense compound
ccaaaatgatggcaacctct

SEQ ID NO: 1682 - DNA, 20 bp, Artificial Sequence
  Antisense compound
gccaaaatgatggcaacctc

SEQ ID NO: 1683 - DNA, 20 bp, Artificial Sequence
  Antisense compound
tgccaaaatgatggcaacct

SEQ ID NO: 1684 - DNA, 20 bp, Artificial Sequence
  Antisense compound
atgccaaaatgatggcaacc

SEQ ID NO: 1685 - DNA, 20 bp, Artificial Sequence
  Antisense compound
gatgccaaaatgatggcaac

SEQ ID NO: 1686 - DNA, 20 bp, Artificial Sequence
  Antisense compound
agatgccaaaatgatggcaa

SEQ ID NO: 1687 - DNA, 20 bp, Artificial Sequence
  Antisense compound
aagatgccaaaatgatggca

SEQ ID NO: 1688 - DNA, 20 bp, Artificial Sequence
  Antisense compound
aaagatgccaaaatgatggc

SEQ ID NO: 1689 - DNA, 20 bp, Artificial Sequence
  Antisense compound
gaaagatgccaaaatgatgg

SEQ ID NO: 1690 - DNA, 20 bp, Artificial Sequence
  Antisense compound
agaaagatgccaaaatgatg

SEQ ID NO: 1691 - DNA, 20 bp, Artificial Sequence
  Antisense compound
gagaaagatgccaaaatgat

SEQ ID NO: 1692 - DNA, 20 bp, Artificial Sequence
  Antisense compound
agagaaagatgccaaaatga

SEQ ID NO: 1693 - DNA, 20 bp, Artificial Sequence
  Antisense compound
cagagaaagatgccaaaatg

SEQ ID NO: 1694 - DNA, 20 bp, Artificial Sequence
  Antisense compound
gcagagaaagatgccaaaat

SEQ ID NO: 1695 - DNA, 20 bp, Artificial Sequence
  Antisense compound
agcagagaaagatgccaaaa

SEQ ID NO: 1696 - DNA, 20 bp, Artificial Sequence
  Antisense compound
aagcagagaaagatgccaaa

SEQ ID NO: 1697 - DNA, 20 bp, Artificial Sequence
  Antisense compound
gaagcagagaaagatgccaa

SEQ ID NO: 1698 - DNA, 20 bp, Artificial Sequence
  Antisense compound
agaagcagagaaagatgcca

SEQ ID NO: 1699 - DNA, 20 bp, Artificial Sequence
  Antisense compound
tagaagcagagaaagatgcc

SEQ ID NO: 1700 - DNA, 20 bp, Artificial Sequence
  Antisense compound
gtagaagcagagaaagatgc

SEQ ID NO: 1701 - DNA, 20 bp, Artificial Sequence
  Antisense compound
tgtagaagcagagaaagatg

SEQ ID NO: 1702 - DNA, 20 bp, Artificial Sequence
  Antisense compound
ttgtagaagcagagaaagat

SEQ ID NO: 1703 - DNA, 20 bp, Artificial Sequence
  Antisense compound
cttgtagaagcagagaaaga

SEQ ID NO: 1704 - DNA, 20 bp, Artificial Sequence
  Antisense compound
acttgtagaagcagagaaag

SEQ ID NO: 1705 - DNA, 20 bp, Artificial Sequence
  Antisense compound
cacttgtagaagcagagaaa

SEQ ID NO: 1706 - DNA, 20 bp, Artificial Sequence
  Antisense compound
gcacttgtagaagcagagaa

SEQ ID NO: 1707 - DNA, 20 bp, Artificial Sequence
  Antisense compound
ggcacttgtagaagcagaga

SEQ ID NO: 1708 - DNA, 20 bp, Artificial Sequence
  Antisense compound
aggcacttgtagaagcagag

SEQ ID NO: 1709 - DNA, 20 bp, Artificial Sequence
  Antisense compound
aaggcacttgtagaagcaga

SEQ ID NO: 1710 - DNA, 20 bp, Artificial Sequence
  Antisense compound
aaaggcacttgtagaagcag

SEQ ID NO: 1711 - DNA, 20 bp, Artificial Sequence
  Antisense compound
taaaggcacttgtagaagca

SEQ ID NO: 1712 - DNA, 20 bp, Artificial Sequence
  Antisense compound
ataaaggcacttgtagaagc

SEQ ID NO: 1713 - DNA, 20 bp, Artificial Sequence
  Antisense compound
aataaaggcacttgtagaag

SEQ ID NO: 1714 - DNA, 20 bp, Artificial Sequence
  Antisense compound
caataaaggcacttgtagaa

SEQ ID NO: 1715 - DNA, 20 bp, Artificial Sequence
  Antisense compound
tcaataaaggcacttgtaga

SEQ ID NO: 1716 - DNA, 20 bp, Artificial Sequence
  Antisense compound
gtcaataaaggcacttgtag

SEQ ID NO: 1717 - DNA, 20 bp, Artificial Sequence
  Antisense compound
tgtcaataaaggcacttgta

SEQ ID NO: 1718 - DNA, 20 bp, Artificial Sequence
  Antisense compound
gtgtcaataaaggcacttgt

SEQ ID NO: 1719 - DNA, 20 bp, Artificial Sequence
  Antisense compound
agtgtcaataaaggcacttg

SEQ ID NO: 1720 - DNA, 20 bp, Artificial Sequence
  Antisense compound
tagtgtcaataaaggcactt

SEQ ID NO: 1721 - DNA, 20 bp, Artificial Sequence
  Antisense compound
atagtgtcaataaaggcact

SEQ ID NO: 1722 - DNA, 20 bp, Artificial Sequence
  Antisense compound
tatagtgtcaataaaggcac

SEQ ID NO: 1723 - DNA, 20 bp, Artificial Sequence
  Antisense compound
ttatagtgtcaataaaggca

SEQ ID NO: 1724 - DNA, 20 bp, Artificial Sequence
  Antisense compound
tttatagtgtcaataaaggc

SEQ ID NO: 1725 - DNA, 20 bp, Artificial Sequence
  Antisense compound
ctttatagtgtcaataaagg

SEQ ID NO: 1726 - DNA, 20 bp, Artificial Sequence
  Antisense compound
tctttatagtgtcaataaag

SEQ ID NO: 1727 - DNA, 20 bp, Artificial Sequence
  Antisense compound
ctctttatagtgtcaataaa

SEQ ID NO: 1728 - DNA, 20 bp, Artificial Sequence
  Antisense compound
actctttatagtgtcaataa

SEQ ID NO: 1729 - DNA, 20 bp, Artificial Sequence
  Antisense compound
gactctttatagtgtcaata

SEQ ID NO: 1730 - DNA, 20 bp, Artificial Sequence
  Antisense compound
agactctttatagtgtcaat

SEQ ID NO: 1731 - DNA, 20 bp, Artificial Sequence
  Antisense compound
aagactctttatagtgtcaa

SEQ ID NO: 1732 - DNA, 20 bp, Artificial Sequence
  Antisense compound
caagactctttatagtgtca

SEQ ID NO: 1733 - DNA, 20 bp, Artificial Sequence
  Antisense compound
tcaagactctttatagtgtc

SEQ ID NO: 1734 - DNA, 20 bp, Artificial Sequence
  Antisense compound
atcaagactctttatagtgt

SEQ ID NO: 1735 - DNA, 20 bp, Artificial Sequence
  Antisense compound
aatcaagactctttatagtg

SEQ ID NO: 1736 - DNA, 20 bp, Artificial Sequence
  Antisense compound
taatcaagactctttatagt

SEQ ID NO: 1737 - DNA, 20 bp, Artificial Sequence
  Antisense compound
gtaatcaagactctttatag

SEQ ID NO: 1738 - DNA, 20 bp, Artificial Sequence
  Antisense compound
tgtaatcaagactctttata

SEQ ID NO: 1739 - DNA, 20 bp, Artificial Sequence
  Antisense compound
ttgtaatcaagactctttat

SEQ ID NO: 1740 - DNA, 20 bp, Artificial Sequence
  Antisense compound
cttgtaatcaagactcttta

SEQ ID NO: 1741 - DNA, 20 bp, Artificial Sequence
  Antisense compound
acttgtaatcaagactcttt

SEQ ID NO: 1742 - DNA, 20 bp, Artificial Sequence
  Antisense compound
gacttgtaatcaagactctt

SEQ ID NO: 1743 - DNA, 20 bp, Artificial Sequence
  Antisense compound
agacttgtaatcaagactct

SEQ ID NO: 1744 - DNA, 20 bp, Artificial Sequence
  Antisense compound
aagacttgtaatcaagactc

SEQ ID NO: 1745 - DNA, 20 bp, Artificial Sequence
  Antisense compound
aaagacttgtaatcaagact

SEQ ID NO: 1746 - DNA, 20 bp, Artificial Sequence
  Antisense compound
gaaagacttgtaatcaagac

SEQ ID NO: 1747 - DNA, 20 bp, Artificial Sequence
  Antisense compound
tgaaagacttgtaatcaaga

SEQ ID NO: 1748 - DNA, 20 bp, Artificial Sequence
  Antisense compound
ttgaaagacttgtaatcaag

SEQ ID NO: 1749 - DNA, 20 bp, Artificial Sequence
  Antisense compound
tttgaaagacttgtaatcaa

SEQ ID NO: 1750 - DNA, 20 bp, Artificial Sequence
  Antisense compound
ttttgaaagacttgtaatca

SEQ ID NO: 1751 - DNA, 20 bp, Artificial Sequence
  Antisense compound
gttttgaaagacttgtaatc

SEQ ID NO: 1752 - DNA, 20 bp, Artificial Sequence
  Antisense compound
ggttttgaaagacttgtaat

SEQ ID NO: 1753 - DNA, 20 bp, Artificial Sequence
  Antisense compound
tggttttgaaagacttgtaa

SEQ ID NO: 1754 - DNA, 20 bp, Artificial Sequence
  Antisense compound
atggttttgaaagacttgta

SEQ ID NO: 1755 - DNA, 20 bp, Artificial Sequence
  Antisense compound
aatggttttgaaagacttgt

SEQ ID NO: 1756 - DNA, 20 bp, Artificial Sequence
  Antisense compound
caatggttttgaaagacttg

SEQ ID NO: 1757 - DNA, 20 bp, Artificial Sequence
  Antisense compound
acaatggttttgaaagactt

SEQ ID NO: 1758 - DNA, 20 bp, Artificial Sequence
  Antisense compound
aacaatggttttgaaagact

SEQ ID NO: 1759 - DNA, 20 bp, Artificial Sequence
  Antisense compound
caacaatggttttgaaagac

SEQ ID NO: 1760 - DNA, 20 bp, Artificial Sequence
  Antisense compound
tcaacaatggttttgaaaga

SEQ ID NO: 1761 - DNA, 20 bp, Artificial Sequence
  Antisense compound
ctcaacaatggttttgaaag

SEQ ID NO: 1762 - DNA, 20 bp, Artificial Sequence
  Antisense compound
actcaacaatggttttgaaa

SEQ ID NO: 1763 - DNA, 20 bp, Artificial Sequence
  Antisense compound
gactcaacaatggttttgaa

SEQ ID NO: 1764 - DNA, 20 bp, Artificial Sequence
  Antisense compound
ggactcaacaatggttttga

SEQ ID NO: 1765 - DNA, 20 bp, Artificial Sequence
  Antisense compound
aggactcaacaatggttttg

SEQ ID NO: 1766 - DNA, 20 bp, Artificial Sequence
  Antisense compound
caggactcaacaatggtttt

SEQ ID NO: 1767 - DNA, 20 bp, Artificial Sequence
  Antisense compound
gcaggactcaacaatggttt

SEQ ID NO: 1768 - DNA, 20 bp, Artificial Sequence
  Antisense compound
cgcaggactcaacaatggtt

SEQ ID NO: 1769 - DNA, 20 bp, Artificial Sequence
  Antisense compound
ccgcaggactcaacaatggt

SEQ ID NO: 1770 - DNA, 20 bp, Artificial Sequence
  Antisense compound
accgcaggactcaacaatgg

SEQ ID NO: 1771 - DNA, 20 bp, Artificial Sequence
  Antisense compound
taccgcaggactcaacaatg

SEQ ID NO: 1772 - DNA, 20 bp, Artificial Sequence
  Antisense compound
ttaccgcaggactcaacaat

SEQ ID NO: 1773 - DNA, 20 bp, Artificial Sequence
  Antisense compound
gttaccgcaggactcaacaa

SEQ ID NO: 1774 - DNA, 20 bp, Artificial Sequence
  Antisense compound
agttaccgcaggactcaaca

SEQ ID NO: 1775 - DNA, 20 bp, Artificial Sequence
  Antisense compound
tagttaccgcaggactcaac

SEQ ID NO: 1776 - DNA, 20 bp, Artificial Sequence
  Antisense compound
atagttaccgcaggactcaa

SEQ ID NO: 1777 - DNA, 20 bp, Artificial Sequence
  Antisense compound
tatagttaccgcaggactca

SEQ ID NO: 1778 - DNA, 20 bp, Artificial Sequence
  Antisense compound
ttatagttaccgcaggactc

SEQ ID NO: 1779 - DNA, 20 bp, Artificial Sequence
  Antisense compound
tttatagttaccgcaggact

SEQ ID NO: 1780 - DNA, 20 bp, Artificial Sequence
  Antisense compound
ctttatagttaccgcaggac

SEQ ID NO: 1781 - DNA, 20 bp, Artificial Sequence
  Antisense compound
actttatagttaccgcagga

SEQ ID NO: 1782 - DNA, 20 bp, Artificial Sequence
  Antisense compound
aactttatagttaccgcagg

SEQ ID NO: 1783 - DNA, 20 bp, Artificial Sequence
  Antisense compound
taactttatagttaccgcag

SEQ ID NO: 1784 - DNA, 20 bp, Artificial Sequence
  Antisense compound
gtaactttatagttaccgca

SEQ ID NO: 1785 - DNA, 20 bp, Artificial Sequence
  Antisense compound
ggtaactttatagttaccgc

SEQ ID NO: 1786 - DNA, 20 bp, Artificial Sequence
  Antisense compound
tggtaactttatagttaccg

SEQ ID NO: 1787 - DNA, 20 bp, Artificial Sequence
  Antisense compound
ttggtaactttatagttacc

SEQ ID NO: 1788 - DNA, 20 bp, Artificial Sequence
  Antisense compound
cttggtaactttatagttac

SEQ ID NO: 1789 - DNA, 20 bp, Artificial Sequence
  Antisense compound
ccttggtaactttatagtta

SEQ ID NO: 1790 - DNA, 20 bp, Artificial Sequence
  Antisense compound
cccttggtaactttatagtt

SEQ ID NO: 1791 - DNA, 20 bp, Artificial Sequence
  Antisense compound
tcccttggtaactttatagt

SEQ ID NO: 1792 - DNA, 20 bp, Artificial Sequence
  Antisense compound
ttcccttggtaactttatag

SEQ ID NO: 1793 - DNA, 20 bp, Artificial Sequence
  Antisense compound
tttcccttggtaactttata

SEQ ID NO: 1794 - DNA, 20 bp, Artificial Sequence
  Antisense compound
ctttcccttggtaactttat

SEQ ID NO: 1795 - DNA, 20 bp, Artificial Sequence
  Antisense compound
gctttcccttggtaacttta

SEQ ID NO: 1796 - DNA, 20 bp, Artificial Sequence
  Antisense compound
ggctttcccttggtaacttt

SEQ ID NO: 1797 - DNA, 20 bp, Artificial Sequence
  Antisense compound
gggctttcccttggtaactt

SEQ ID NO: 1798 - DNA, 20 bp, Artificial Sequence
  Antisense compound
cgggctttcccttggtaact

SEQ ID NO: 1799 - DNA, 20 bp, Artificial Sequence
  Antisense compound
acgggctttcccttggtaac

SEQ ID NO: 1800 - DNA, 20 bp, Artificial Sequence
  Antisense compound
tacgggctttcccttggtaa

SEQ ID NO: 1801 - DNA, 20 bp, Artificial Sequence
  Antisense compound
ttacgggctttcccttggta

SEQ ID NO: 1802 - DNA, 20 bp, Artificial Sequence
  Antisense compound
tttacgggctttcccttggt

SEQ ID NO: 1803 - DNA, 20 bp, Artificial Sequence
  Antisense compound
ttttacgggctttcccttgg

SEQ ID NO: 1804 - DNA, 20 bp, Artificial Sequence
  Antisense compound
cttttacgggctttcccttg

SEQ ID NO: 1805 - DNA, 20 bp, Artificial Sequence
  Antisense compound
ccttttacgggctttccctt

SEQ ID NO: 1806 - DNA, 20 bp, Artificial Sequence
  Antisense compound
accttttacgggctttccct

SEQ ID NO: 1807 - DNA, 20 bp, Artificial Sequence
  Antisense compound
caccttttacgggctttccc

SEQ ID NO: 1808 - DNA, 20 bp, Artificial Sequence
  Antisense compound
gcaccttttacgggctttcc

SEQ ID NO: 1809 - DNA, 20 bp, Artificial Sequence
  Antisense compound
agcaccttttacgggctttc

SEQ ID NO: 1810 - DNA, 20 bp, Artificial Sequence
  Antisense compound
aagcaccttttacgggcttt

SEQ ID NO: 1811 - DNA, 20 bp, Artificial Sequence
  Antisense compound
caagcaccttttacgggctt

SEQ ID NO: 1812 - DNA, 20 bp, Artificial Sequence
  Antisense compound
ccaagcaccttttacgggct

SEQ ID NO: 1813 - DNA, 20 bp, Artificial Sequence
  Antisense compound
tccaagcaccttttacgggc

SEQ ID NO: 1814 - DNA, 20 bp, Artificial Sequence
  Antisense compound
ttccaagcaccttttacggg

SEQ ID NO: 1815 - DNA, 20 bp, Artificial Sequence
  Antisense compound
gttccaagcaccttttacgg

SEQ ID NO: 1816 - DNA, 20 bp, Artificial Sequence
  Antisense compound
tgttccaagcaccttttacg

SEQ ID NO: 1817 - DNA, 20 bp, Artificial Sequence
  Antisense compound
atgttccaagcaccttttac

SEQ ID NO: 1818 - DNA, 20 bp, Artificial Sequence
  Antisense compound
aatgttccaagcacctttta

SEQ ID NO: 1819 - DNA, 20 bp, Artificial Sequence
  Antisense compound
caatgttccaagcacctttt

SEQ ID NO: 1820 - DNA, 20 bp, Artificial Sequence
  Antisense compound
ccaatgttccaagcaccttt

SEQ ID NO: 1821 - DNA, 20 bp, Artificial Sequence
  Antisense compound
tccaatgttccaagcacctt

SEQ ID NO: 1822 - DNA, 20 bp, Artificial Sequence
  Antisense compound
gtccaatgttccaagcacct

SEQ ID NO: 1823 - DNA, 20 bp, Artificial Sequence
  Antisense compound
tgtccaatgttccaagcacc

SEQ ID NO: 1824 - DNA, 20 bp, Artificial Sequence
  Antisense compound
ttgtccaatgttccaagcac

SEQ ID NO: 1825 - DNA, 20 bp, Artificial Sequence
  Antisense compound
gttgtccaatgttccaagca

SEQ ID NO: 1826 - DNA, 20 bp, Artificial Sequence
  Antisense compound
tgttgtccaatgttccaagc

SEQ ID NO: 1827 - DNA, 20 bp, Artificial Sequence
  Antisense compound
ctgttgtccaatgttccaag

SEQ ID NO: 1828 - DNA, 20 bp, Artificial Sequence
  Antisense compound
tctgttgtccaatgttccaa

SEQ ID NO: 1829 - DNA, 20 bp, Artificial Sequence
  Antisense compound
ctctgttgtccaatgttcca

SEQ ID NO: 1830 - DNA, 20 bp, Artificial Sequence
  Antisense compound
tctctgttgtccaatgttcc

SEQ ID NO: 1831 - DNA, 20 bp, Artificial Sequence
  Antisense compound
atctctgttgtccaatgttc

SEQ ID NO: 1832 - DNA, 20 bp, Artificial Sequence
  Antisense compound
gatctctgttgtccaatgtt

SEQ ID NO: 1833 - DNA, 20 bp, Artificial Sequence
  Antisense compound
tgatctctgttgtccaatgt

SEQ ID NO: 1834 - DNA, 20 bp, Artificial Sequence
  Antisense compound
ctgatctctgttgtccaatg

SEQ ID NO: 1835 - DNA, 20 bp, Artificial Sequence
  Antisense compound
actgatctctgttgtccaat

SEQ ID NO: 1836 - DNA, 20 bp, Artificial Sequence
  Antisense compound
aactgatctctgttgtccaa

SEQ ID NO: 1837 - DNA, 20 bp, Artificial Sequence
  Antisense compound
aaactgatctctgttgtcca

SEQ ID NO: 1838 - DNA, 20 bp, Artificial Sequence
  Antisense compound
aaaactgatctctgttgtcc

SEQ ID NO: 1839 - DNA, 20 bp, Artificial Sequence
  Antisense compound
taaaactgatctctgttgtc

SEQ ID NO: 1840 - DNA, 20 bp, Artificial Sequence
  Antisense compound
ttaaaactgatctctgttgt

SEQ ID NO: 1841 - DNA, 20 bp, Artificial Sequence
  Antisense compound
gttaaaactgatctctgttg

SEQ ID NO: 1842 - DNA, 20 bp, Artificial Sequence
  Antisense compound
tgttaaaactgatctctgtt

SEQ ID NO: 1843 - DNA, 20 bp, Artificial Sequence
  Antisense compound
gtgttaaaactgatctctgt

SEQ ID NO: 1844 - DNA, 20 bp, Artificial Sequence
  Antisense compound
ggtgttaaaactgatctctg

SEQ ID NO: 1845 - DNA, 20 bp, Artificial Sequence
  Antisense compound
tggtgttaaaactgatctct

SEQ ID NO: 1846 - DNA, 20 bp, Artificial Sequence
  Antisense compound
gtggtgttaaaactgatctc

SEQ ID NO: 1847 - DNA, 20 bp, Artificial Sequence
  Antisense compound
agtggtgttaaaactgatct

SEQ ID NO: 1848 - DNA, 20 bp, Artificial Sequence
  Antisense compound
cagtggtgttaaaactgatc

SEQ ID NO: 1849 - DNA, 20 bp, Artificial Sequence
  Antisense compound
acagtggtgttaaaactgat

SEQ ID NO: 1850 - DNA, 20 bp, Artificial Sequence
  Antisense compound
cacagtggtgttaaaactga

SEQ ID NO: 1851 - DNA, 20 bp, Artificial Sequence
  Antisense compound
acacagtggtgttaaaactg

SEQ ID NO: 1852 - DNA, 20 bp, Artificial Sequence
  Antisense compound
cacacagtggtgttaaaact

SEQ ID NO: 1853 - DNA, 20 bp, Artificial Sequence
  Antisense compound
ccacacagtggtgttaaaac

SEQ ID NO: 1854 - DNA, 20 bp, Artificial Sequence
  Antisense compound
accacacagtggtgttaaaa

SEQ ID NO: 1855 - DNA, 20 bp, Artificial Sequence
  Antisense compound
aaccacacagtggtgttaaa

SEQ ID NO: 1856 - DNA, 20 bp, Artificial Sequence
  Antisense compound
aaaccacacagtggtgttaa

SEQ ID NO: 1857 - DNA, 20 bp, Artificial Sequence
  Antisense compound
aaaaccacacagtggtgtta

SEQ ID NO: 1858 - DNA, 20 bp, Artificial Sequence
  Antisense compound
gaaaaccacacagtggtgtt

SEQ ID NO: 1859 - DNA, 20 bp, Artificial Sequence
  Antisense compound
ggaaaaccacacagtggtgt

SEQ ID NO: 1860 - DNA, 20 bp, Artificial Sequence
  Antisense compound
gggaaaaccacacagtggtg

SEQ ID NO: 1861 - DNA, 20 bp, Artificial Sequence
  Antisense compound
agggaaaaccacacagtggt

SEQ ID NO: 1862 - DNA, 20 bp, Artificial Sequence
  Antisense compound
gagggaaaaccacacagtgg

SEQ ID NO: 1863 - DNA, 20 bp, Artificial Sequence
  Antisense compound
tgagggaaaaccacacagtg

SEQ ID NO: 1864 - DNA, 20 bp, Artificial Sequence
  Antisense compound
gtgagggaaaaccacacagt

SEQ ID NO: 1865 - DNA, 20 bp, Artificial Sequence
  Antisense compound
tgtgagggaaaaccacacag

SEQ ID NO: 1866 - DNA, 20 bp, Artificial Sequence
  Antisense compound
ctgtgagggaaaaccacaca

SEQ ID NO: 1867 - DNA, 20 bp, Artificial Sequence
  Antisense compound
cctgtgagggaaaaccacac

SEQ ID NO: 1868 - DNA, 20 bp, Artificial Sequence
  Antisense compound
gcctgtgagggaaaaccaca

SEQ ID NO: 1869 - DNA, 20 bp, Artificial Sequence
  Antisense compound
agcctgtgagggaaaaccac

SEQ ID NO: 1870 - DNA, 20 bp, Artificial Sequence
  Antisense compound
cagcctgtgagggaaaacca

SEQ ID NO: 1871 - DNA, 20 bp, Artificial Sequence
  Antisense compound
gcagcctgtgagggaaaacc

SEQ ID NO: 1872 - DNA, 20 bp, Artificial Sequence
  Antisense compound
agcagcctgtgagggaaaac

SEQ ID NO: 1873 - DNA, 20 bp, Artificial Sequence
  Antisense compound
cagcagcctgtgagggaaaa

SEQ ID NO: 1874 - DNA, 20 bp, Artificial Sequence
  Antisense compound
ccagcagcctgtgagggaaa

SEQ ID NO: 1875 - DNA, 20 bp, Artificial Sequence
  Antisense compound
accagcagcctgtgagggaa

SEQ ID NO: 1876 - DNA, 20 bp, Artificial Sequence
  Antisense compound
caccagcagcctgtgaggga

SEQ ID NO: 1877 - DNA, 20 bp, Artificial Sequence
  Antisense compound
acaccagcagcctgtgaggg

SEQ ID NO: 1878 - DNA, 20 bp, Artificial Sequence
  Antisense compound
aacaccagcagcctgtgagg

SEQ ID NO: 1879 - DNA, 20 bp, Artificial Sequence
  Antisense compound
taacaccagcagcctgtgag

SEQ ID NO: 1880 - DNA, 20 bp, Artificial Sequence
  Antisense compound
ataacaccagcagcctgtga

SEQ ID NO: 1881 - DNA, 20 bp, Artificial Sequence
  Antisense compound
gataacaccagcagcctgtg

SEQ ID NO: 1882 - DNA, 20 bp, Artificial Sequence
  Antisense compound
tgataacaccagcagcctgt

SEQ ID NO: 1883 - DNA, 20 bp, Artificial Sequence
  Antisense compound
ctgataacaccagcagcctg

SEQ ID NO: 1884 - DNA, 20 bp, Artificial Sequence
  Antisense compound
tctgataacaccagcagcct

SEQ ID NO: 1885 - DNA, 20 bp, Artificial Sequence
  Antisense compound
atctgataacaccagcagcc

SEQ ID NO: 1886 - DNA, 20 bp, Artificial Sequence
  Antisense compound
gatctgataacaccagcagc

SEQ ID NO: 1887 - DNA, 20 bp, Artificial Sequence
  Antisense compound
tgatctgataacaccagcag

SEQ ID NO: 1888 - DNA, 20 bp, Artificial Sequence
  Antisense compound
ttgatctgataacaccagca

SEQ ID NO: 1889 - DNA, 20 bp, Artificial Sequence
  Antisense compound
attgatctgataacaccagc

SEQ ID NO: 1890 - DNA, 20 bp, Artificial Sequence
  Antisense compound
aattgatctgataacaccag

SEQ ID NO: 1891 - DNA, 20 bp, Artificial Sequence
  Antisense compound
aaattgatctgataacacca

SEQ ID NO: 1892 - DNA, 20 bp, Artificial Sequence
  Antisense compound
aaaattgatctgataacacc

SEQ ID NO: 1893 - DNA, 20 bp, Artificial Sequence
  Antisense compound
aaaaattgatctgataacac

SEQ ID NO: 1894 - DNA, 20 bp, Artificial Sequence
  Antisense compound
caaaaattgatctgataaca

SEQ ID NO: 1895 - DNA, 20 bp, Artificial Sequence
  Antisense compound
gcaaaaattgatctgataac

SEQ ID NO: 1896 - DNA, 20 bp, Artificial Sequence
  Antisense compound
cgcaaaaattgatctgataa

SEQ ID NO: 1897 - DNA, 20 bp, Artificial Sequence
  Antisense compound
gcgcaaaaattgatctgata

SEQ ID NO: 1898 - DNA, 20 bp, Artificial Sequence
  Antisense compound
cgcgcaaaaattgatctgat

SEQ ID NO: 1899 - DNA, 20 bp, Artificial Sequence
  Antisense compound
gcgcgcaaaaattgatctga

SEQ ID NO: 1900 - DNA, 20 bp, Artificial Sequence
  Antisense compound
tgcgcgcaaaaattgatctg

SEQ ID NO: 1901 - DNA, 20 bp, Artificial Sequence
  Antisense compound
gtgcgcgcaaaaattgatct

SEQ ID NO: 1902 - DNA, 20 bp, Artificial Sequence
  Antisense compound
tgtgcgcgcaaaaattgatc

SEQ ID NO: 1903 - DNA, 20 bp, Artificial Sequence
  Antisense compound
gtgtgcgcgcaaaaattgat

SEQ ID NO: 1904 - DNA, 20 bp, Artificial Sequence
  Antisense compound
agtgtgcgcgcaaaaattga

SEQ ID NO: 1905 - DNA, 20 bp, Artificial Sequence
  Antisense compound
aagtgtgcgcgcaaaaattg

SEQ ID NO: 1906 - DNA, 20 bp, Artificial Sequence
  Antisense compound
caagtgtgcgcgcaaaaatt

SEQ ID NO: 1907 - DNA, 20 bp, Artificial Sequence
  Antisense compound
tcaagtgtgcgcgcaaaaat

SEQ ID NO: 1908 - DNA, 20 bp, Artificial Sequence
  Antisense compound
atcaagtgtgcgcgcaaaaa

SEQ ID NO: 1909 - DNA, 20 bp, Artificial Sequence
  Antisense compound
catcaagtgtgcgcgcaaaa

SEQ ID NO: 1910 - DNA, 20 bp, Artificial Sequence
  Antisense compound
gcatcaagtgtgcgcgcaaa

SEQ ID NO: 1911 - DNA, 20 bp, Artificial Sequence
  Antisense compound
tgcatcaagtgtgcgcgcaa

SEQ ID NO: 1912 - DNA, 20 bp, Artificial Sequence
  Antisense compound
ctgcatcaagtgtgcgcgca

SEQ ID NO: 1913 - DNA, 20 bp, Artificial Sequence
  Antisense compound
gctgcatcaagtgtgcgcgc

SEQ ID NO: 1914 - DNA, 20 bp, Artificial Sequence
  Antisense compound
tgctgcatcaagtgtgcgcg

SEQ ID NO: 1915 - DNA, 20 bp, Artificial Sequence
  Antisense compound
ttgctgcatcaagtgtgcgc

SEQ ID NO: 1916 - DNA, 20 bp, Artificial Sequence
  Antisense compound
tttgctgcatcaagtgtgcg

SEQ ID NO: 1917 - DNA, 20 bp, Artificial Sequence
  Antisense compound
gtttgctgcatcaagtgtgc

SEQ ID NO: 1918 - DNA, 20 bp, Artificial Sequence
  Antisense compound
ggtttgctgcatcaagtgtg

SEQ ID NO: 1919 - DNA, 20 bp, Artificial Sequence
  Antisense compound
tggtttgctgcatcaagtgt

SEQ ID NO: 1920 - DNA, 20 bp, Artificial Sequence
  Antisense compound
gtggtttgctgcatcaagtg

SEQ ID NO: 1921 - DNA, 20 bp, Artificial Sequence
  Antisense compound
agtggtttgctgcatcaagt

SEQ ID NO: 1922 - DNA, 20 bp, Artificial Sequence
  Antisense compound
gagtggtttgctgcatcaag

SEQ ID NO: 1923 - DNA, 20 bp, Artificial Sequence
  Antisense compound
tgagtggtttgctgcatcaa

SEQ ID NO: 1924 - DNA, 20 bp, Artificial Sequence
  Antisense compound
ttgagtggtttgctgcatca

SEQ ID NO: 1925 - DNA, 20 bp, Artificial Sequence
  Antisense compound
attgagtggtttgctgcatc

SEQ ID NO: 1926 - DNA, 20 bp, Artificial Sequence
  Antisense compound
aattgagtggtttgctgcat

SEQ ID NO: 1927 - DNA, 20 bp, Artificial Sequence
  Antisense compound
gaattgagtggtttgctgca

SEQ ID NO: 1928 - DNA, 20 bp, Artificial Sequence
  Antisense compound
ggaattgagtggtttgctgc

SEQ ID NO: 1929 - DNA, 20 bp, Artificial Sequence
  Antisense compound
aggaattgagtggtttgctg

SEQ ID NO: 1930 - DNA, 20 bp, Artificial Sequence
  Antisense compound
caggaattgagtggtttgct

SEQ ID NO: 1931 - DNA, 20 bp, Artificial Sequence
  Antisense compound
tcaggaattgagtggtttgc

SEQ ID NO: 1932 - DNA, 20 bp, Artificial Sequence
  Antisense compound
atcaggaattgagtggtttg

SEQ ID NO: 1933 - DNA, 20 bp, Artificial Sequence
  Antisense compound
aatcaggaattgagtggttt

SEQ ID NO: 1934 - DNA, 20 bp, Artificial Sequence
  Antisense compound
aaatcaggaattgagtggtt

SEQ ID NO: 1935 - DNA, 20 bp, Artificial Sequence
  Antisense compound
caaatcaggaattgagtggt

SEQ ID NO: 1936 - DNA, 20 bp, Artificial Sequence
  Antisense compound
gcaaatcaggaattgagtgg

SEQ ID NO: 1937 - DNA, 20 bp, Artificial Sequence
  Antisense compound
tgcaaatcaggaattgagtg

SEQ ID NO: 1938 - DNA, 20 bp, Artificial Sequence
  Antisense compound
ttgcaaatcaggaattgagt

SEQ ID NO: 1939 - DNA, 20 bp, Artificial Sequence
  Antisense compound
tttgcaaatcaggaattgag

SEQ ID NO: 1940 - DNA, 20 bp, Artificial Sequence
  Antisense compound
ctttgcaaatcaggaattga

SEQ ID NO: 1941 - DNA, 20 bp, Artificial Sequence
  Antisense compound
tctttgcaaatcaggaattg

SEQ ID NO: 1942 - DNA, 20 bp, Artificial Sequence
  Antisense compound
ctctttgcaaatcaggaatt

SEQ ID NO: 1943 - DNA, 20 bp, Artificial Sequence
  Antisense compound
gctctttgcaaatcaggaat

SEQ ID NO: 1944 - DNA, 20 bp, Artificial Sequence
  Antisense compound
tgctctttgcaaatcaggaa

SEQ ID NO: 1945 - DNA, 20 bp, Artificial Sequence
  Antisense compound
ctgctctttgcaaatcagga

SEQ ID NO: 1946 - DNA, 20 bp, Artificial Sequence
  Antisense compound
gctgctctttgcaaatcagg

SEQ ID NO: 1947 - DNA, 20 bp, Artificial Sequence
  Antisense compound
agctgctctttgcaaatcag

SEQ ID NO: 1948 - DNA, 20 bp, Artificial Sequence
  Antisense compound
cagctgctctttgcaaatca

SEQ ID NO: 1949 - DNA, 20 bp, Artificial Sequence
  Antisense compound
acagctgctctttgcaaatc

SEQ ID NO: 1950 - DNA, 20 bp, Artificial Sequence
  Antisense compound
gacagctgctctttgcaaat

SEQ ID NO: 1951 - DNA, 20 bp, Artificial Sequence
  Antisense compound
tgacagctgctctttgcaaa

SEQ ID NO: 1952 - DNA, 20 bp, Artificial Sequence
  Antisense compound
gtgacagctgctctttgcaa

SEQ ID NO: 1953 - DNA, 20 bp, Artificial Sequence
  Antisense compound
ggtgacagctgctctttgca

SEQ ID NO: 1954 - DNA, 20 bp, Artificial Sequence
  Antisense compound
tggtgacagctgctctttgc

SEQ ID NO: 1955 - DNA, 20 bp, Artificial Sequence
  Antisense compound
atggtgacagctgctctttg

SEQ ID NO: 1956 - DNA, 20 bp, Artificial Sequence
  Antisense compound
tatggtgacagctgctcttt

SEQ ID NO: 1957 - DNA, 20 bp, Artificial Sequence
  Antisense compound
gtatggtgacagctgctctt

SEQ ID NO: 1958 - DNA, 20 bp, Artificial Sequence
  Antisense compound
agtatggtgacagctgctct

SEQ ID NO: 1959 - DNA, 20 bp, Artificial Sequence
  Antisense compound
aagtatggtgacagctgctc

SEQ ID NO: 1960 - DNA, 20 bp, Artificial Sequence
  Antisense compound
caagtatggtgacagctgct

SEQ ID NO: 1961 - DNA, 20 bp, Artificial Sequence
  Antisense compound
tcaagtatggtgacagctgc

SEQ ID NO: 1962 - DNA, 20 bp, Artificial Sequence
  Antisense compound
atcaagtatggtgacagctg

SEQ ID NO: 1963 - DNA, 20 bp, Artificial Sequence
  Antisense compound
catcaagtatggtgacagct

SEQ ID NO: 1964 - DNA, 20 bp, Artificial Sequence
  Antisense compound
ccatcaagtatggtgacagc

SEQ ID NO: 1965 - DNA, 20 bp, Artificial Sequence
  Antisense compound
accatcaagtatggtgacag

SEQ ID NO: 1966 - DNA, 20 bp, Artificial Sequence
  Antisense compound
taccatcaagtatggtgaca

SEQ ID NO: 1967 - DNA, 20 bp, Artificial Sequence
  Antisense compound
ataccatcaagtatggtgac

SEQ ID NO: 1968 - DNA, 20 bp, Artificial Sequence
  Antisense compound
aataccatcaagtatggtga

SEQ ID NO: 1969 - DNA, 20 bp, Artificial Sequence
  Antisense compound
aaataccatcaagtatggtg

SEQ ID NO: 1970 - DNA, 20 bp, Artificial Sequence
  Antisense compound
gaaataccatcaagtatggt

SEQ ID NO: 1971 - DNA, 20 bp, Artificial Sequence
  Antisense compound
agaaataccatcaagtatgg

SEQ ID NO: 1972 - DNA, 20 bp, Artificial Sequence
  Antisense compound
cagaaataccatcaagtatg

SEQ ID NO: 1973 - DNA, 20 bp, Artificial Sequence
  Antisense compound
tcagaaataccatcaagtat

SEQ ID NO: 1974 - DNA, 20 bp, Artificial Sequence
  Antisense compound
ttcagaaataccatcaagta

SEQ ID NO: 1975 - DNA, 20 bp, Artificial Sequence
  Antisense compound
gttcagaaataccatcaagt

SEQ ID NO: 1976 - DNA, 20 bp, Artificial Sequence
  Antisense compound
tgttcagaaataccatcaag

SEQ ID NO: 1977 - DNA, 20 bp, Artificial Sequence
  Antisense compound
ctgttcagaaataccatcaa

SEQ ID NO: 1978 - DNA, 20 bp, Artificial Sequence
  Antisense compound
actgttcagaaataccatca

SEQ ID NO: 1979 - DNA, 20 bp, Artificial Sequence
  Antisense compound
gactgttcagaaataccatc

SEQ ID NO: 1980 - DNA, 20 bp, Artificial Sequence
  Antisense compound
tgactgttcagaaataccat

SEQ ID NO: 1981 - DNA, 20 bp, Artificial Sequence
  Antisense compound
atgactgttcagaaatacca

SEQ ID NO: 1982 - DNA, 20 bp, Artificial Sequence
  Antisense compound
aatgactgttcagaaatacc

SEQ ID NO: 1983 - DNA, 20 bp, Artificial Sequence
  Antisense compound
taatgactgttcagaaatac

SEQ ID NO: 1984 - DNA, 20 bp, Artificial Sequence
  Antisense compound
gtaatgactgttcagaaata

SEQ ID NO: 1985 - DNA, 20 bp, Artificial Sequence
  Antisense compound
cgtaatgactgttcagaaat

SEQ ID NO: 1986 - DNA, 20 bp, Artificial Sequence
  Antisense compound
acgtaatgactgttcagaaa

SEQ ID NO: 1987 - DNA, 20 bp, Artificial Sequence
  Antisense compound
gacgtaatgactgttcagaa

SEQ ID NO: 1988 - DNA, 20 bp, Artificial Sequence
  Antisense compound
agacgtaatgactgttcaga

SEQ ID NO: 1989 - DNA, 20 bp, Artificial Sequence
  Antisense compound
aagacgtaatgactgttcag

SEQ ID NO: 1990 - DNA, 20 bp, Artificial Sequence
  Antisense compound
caagacgtaatgactgttca

SEQ ID NO: 1991 - DNA, 20 bp, Artificial Sequence
  Antisense compound
acaagacgtaatgactgttc

SEQ ID NO: 1992 - DNA, 20 bp, Artificial Sequence
  Antisense compound
gacaagacgtaatgactgtt

SEQ ID NO: 1993 - DNA, 20 bp, Artificial Sequence
  Antisense compound
cgacaagacgtaatgactgt

SEQ ID NO: 1994 - DNA, 20 bp, Artificial Sequence
  Antisense compound
tcgacaagacgtaatgactg

SEQ ID NO: 1995 - DNA, 20 bp, Artificial Sequence
  Antisense compound
gtcgacaagacgtaatgact

SEQ ID NO: 1996 - DNA, 20 bp, Artificial Sequence
  Antisense compound
cgtcgacaagacgtaatgac

SEQ ID NO: 1997 - DNA, 20 bp, Artificial Sequence
  Antisense compound
gcgtcgacaagacgtaatga

SEQ ID NO: 1998 - DNA, 20 bp, Artificial Sequence
  Antisense compound
ggcgtcgacaagacgtaatg

SEQ ID NO: 1999 - DNA, 20 bp, Artificial Sequence
  Antisense compound
tggcgtcgacaagacgtaat

SEQ ID NO: 2000 - DNA, 20 bp, Artificial Sequence
  Antisense compound
atggcgtcgacaagacgtaa

SEQ ID NO: 2001 - DNA, 20 bp, Artificial Sequence
  Antisense compound
catggcgtcgacaagacgta

SEQ ID NO: 2002 - DNA, 20 bp, Artificial Sequence
  Antisense compound
ccatggcgtcgacaagacgt

SEQ ID NO: 2003 - DNA, 20 bp, Artificial Sequence
  Antisense compound
accatggcgtcgacaagacg

SEQ ID NO: 2004 - DNA, 20 bp, Artificial Sequence
  Antisense compound
aaccatggcgtcgacaagac

SEQ ID NO: 2005 - DNA, 20 bp, Artificial Sequence
  Antisense compound
aaaccatggcgtcgacaaga

SEQ ID NO: 2006 - DNA, 20 bp, Artificial Sequence
  Antisense compound
taaaccatggcgtcgacaag

SEQ ID NO: 2007 - DNA, 20 bp, Artificial Sequence
  Antisense compound
ataaaccatggcgtcgacaa

SEQ ID NO: 2008 - DNA, 20 bp, Artificial Sequence
  Antisense compound
tataaaccatggcgtcgaca

SEQ ID NO: 2009 - DNA, 20 bp, Artificial Sequence
  Antisense compound
gtataaaccatggcgtcgac

SEQ ID NO: 2010 - DNA, 20 bp, Artificial Sequence
  Antisense compound
agtataaaccatggcgtcga

SEQ ID NO: 2011 - DNA, 20 bp, Artificial Sequence
  Antisense compound
aagtataaaccatggcgtcg

SEQ ID NO: 2012 - DNA, 20 bp, Artificial Sequence
  Antisense compound
gaagtataaaccatggcgtc

SEQ ID NO: 2013 - DNA, 20 bp, Artificial Sequence
  Antisense compound
tgaagtataaaccatggcgt

SEQ ID NO: 2014 - DNA, 20 bp, Artificial Sequence
  Antisense compound
ctgaagtataaaccatggcg

SEQ ID NO: 2015 - DNA, 20 bp, Artificial Sequence
  Antisense compound
tctgaagtataaaccatggc

SEQ ID NO: 2016 - DNA, 20 bp, Artificial Sequence
  Antisense compound
gtctgaagtataaaccatgg

SEQ ID NO: 2017 - DNA, 20 bp, Artificial Sequence
  Antisense compound
ggtctgaagtataaaccatg

SEQ ID NO: 2018 - DNA, 20 bp, Artificial Sequence
  Antisense compound
aggtctgaagtataaaccat

SEQ ID NO: 2019 - DNA, 20 bp, Artificial Sequence
  Antisense compound
caggtctgaagtataaacca

SEQ ID NO: 2020 - DNA, 20 bp, Artificial Sequence
  Antisense compound
gcaggtctgaagtataaacc

SEQ ID NO: 2021 - DNA, 20 bp, Artificial Sequence
  Antisense compound
agcaggtctgaagtataaac

SEQ ID NO: 2022 - DNA, 20 bp, Artificial Sequence
  Antisense compound
gagcaggtctgaagtataaa

SEQ ID NO: 2023 - DNA, 20 bp, Artificial Sequence
  Antisense compound
tgagcaggtctgaagtataa

SEQ ID NO: 2024 - DNA, 20 bp, Artificial Sequence
  Antisense compound
gtgagcaggtctgaagtata

SEQ ID NO: 2025 - DNA, 20 bp, Artificial Sequence
  Antisense compound
ggtgagcaggtctgaagtat

SEQ ID NO: 2026 - DNA, 20 bp, Artificial Sequence
  Antisense compound
tggtgagcaggtctgaagta

SEQ ID NO: 2027 - DNA, 20 bp, Artificial Sequence
  Antisense compound
ttggtgagcaggtctgaagt

SEQ ID NO: 2028 - DNA, 20 bp, Artificial Sequence
  Antisense compound
gttggtgagcaggtctgaag

SEQ ID NO: 2029 - DNA, 20 bp, Artificial Sequence
  Antisense compound
tgttggtgagcaggtctgaa

SEQ ID NO: 2030 - DNA, 20 bp, Artificial Sequence
  Antisense compound
ctgttggtgagcaggtctga

SEQ ID NO: 2031 - DNA, 20 bp, Artificial Sequence
  Antisense compound
actgttggtgagcaggtctg

SEQ ID NO: 2032 - DNA, 20 bp, Artificial Sequence
  Antisense compound
cactgttggtgagcaggtct

SEQ ID NO: 2033 - DNA, 20 bp, Artificial Sequence
  Antisense compound
acactgttggtgagcaggtc

SEQ ID NO: 2034 - DNA, 20 bp, Artificial Sequence
  Antisense compound
gacactgttggtgagcaggt

SEQ ID NO: 2035 - DNA, 20 bp, Artificial Sequence
  Antisense compound
tgacactgttggtgagcagg

SEQ ID NO: 2036 - DNA, 20 bp, Artificial Sequence
  Antisense compound
atgacactgttggtgagcag

SEQ ID NO: 2037 - DNA, 20 bp, Artificial Sequence
  Antisense compound
aatgacactgttggtgagca

SEQ ID NO: 2038 - DNA, 20 bp, Artificial Sequence
  Antisense compound
taatgacactgttggtgagc

SEQ ID NO: 2039 - DNA, 20 bp, Artificial Sequence
  Antisense compound
ataatgacactgttggtgag

SEQ ID NO: 2040 - DNA, 20 bp, Artificial Sequence
  Antisense compound
aataatgacactgttggtga

SEQ ID NO: 2041 - DNA, 20 bp, Artificial Sequence
  Antisense compound
taataatgacactgttggtg

SEQ ID NO: 2042 - DNA, 20 bp, Artificial Sequence
  Antisense compound
ataataatgacactgttggt

SEQ ID NO: 2043 - DNA, 20 bp, Artificial Sequence
  Antisense compound
cataataatgacactgttgg

SEQ ID NO: 2044 - DNA, 20 bp, Artificial Sequence
  Antisense compound
ccataataatgacactgttg

SEQ ID NO: 2045 - DNA, 20 bp, Artificial Sequence
  Antisense compound
gccataataatgacactgtt

SEQ ID NO: 2046 - DNA, 20 bp, Artificial Sequence
  Antisense compound
tgccataataatgacactgt

SEQ ID NO: 2047 - DNA, 20 bp, Artificial Sequence
  Antisense compound
atgccataataatgacactg

SEQ ID NO: 2048 - DNA, 20 bp, Artificial Sequence
  Antisense compound
tatgccataataatgacact

SEQ ID NO: 2049 - DNA, 20 bp, Artificial Sequence
  Antisense compound
atatgccataataatgacac

SEQ ID NO: 2050 - DNA, 20 bp, Artificial Sequence
  Antisense compound
catatgccataataatgaca

SEQ ID NO: 2051 - DNA, 20 bp, Artificial Sequence
  Antisense compound
acatatgccataataatgac

SEQ ID NO: 2052 - DNA, 20 bp, Artificial Sequence
  Antisense compound
tacatatgccataataatga

SEQ ID NO: 2053 - DNA, 20 bp, Artificial Sequence
  Antisense compound
ttacatatgccataataatg

SEQ ID NO: 2054 - DNA, 20 bp, Artificial Sequence
  Antisense compound
gttacatatgccataataat

SEQ ID NO: 2055 - DNA, 20 bp, Artificial Sequence
  Antisense compound
agttacatatgccataataa

SEQ ID NO: 2056 - DNA, 20 bp, Artificial Sequence
  Antisense compound
cagttacatatgccataata

SEQ ID NO: 2057 - DNA, 20 bp, Artificial Sequence
  Antisense compound
ccagttacatatgccataat

SEQ ID NO: 2058 - DNA, 20 bp, Artificial Sequence
  Antisense compound
accagttacatatgccataa

SEQ ID NO: 2059 - DNA, 20 bp, Artificial Sequence
  Antisense compound
caccagttacatatgccata

SEQ ID NO: 2060 - DNA, 20 bp, Artificial Sequence
  Antisense compound
ccaccagttacatatgccat

SEQ ID NO: 2061 - DNA, 20 bp, Artificial Sequence
  Antisense compound
accaccagttacatatgcca

SEQ ID NO: 2062 - DNA, 20 bp, Artificial Sequence
  Antisense compound
gaccaccagttacatatgcc

SEQ ID NO: 2063 - DNA, 20 bp, Artificial Sequence
  Antisense compound
agaccaccagttacatatgc

SEQ ID NO: 2064 - DNA, 20 bp, Artificial Sequence
  Antisense compound
aagaccaccagttacatatg

SEQ ID NO: 2065 - DNA, 20 bp, Artificial Sequence
  Antisense compound
caagaccaccagttacatat

SEQ ID NO: 2066 - DNA, 20 bp, Artificial Sequence
  Antisense compound
acaagaccaccagttacata

SEQ ID NO: 2067 - DNA, 20 bp, Artificial Sequence
  Antisense compound
tacaagaccaccagttacat

SEQ ID NO: 2068 - DNA, 20 bp, Artificial Sequence
  Antisense compound
gtacaagaccaccagttaca

SEQ ID NO: 2069 - DNA, 20 bp, Artificial Sequence
  Antisense compound
tgtacaagaccaccagttac

SEQ ID NO: 2070 - DNA, 20 bp, Artificial Sequence
  Antisense compound
ttgtacaagaccaccagtta

SEQ ID NO: 2071 - DNA, 20 bp, Artificial Sequence
  Antisense compound
gttgtacaagaccaccagtt

SEQ ID NO: 2072 - DNA, 20 bp, Artificial Sequence
  Antisense compound
tgttgtacaagaccaccagt

SEQ ID NO: 2073 - DNA, 20 bp, Artificial Sequence
  Antisense compound
ctgttgtacaagaccaccag

SEQ ID NO: 2074 - DNA, 20 bp, Artificial Sequence
  Antisense compound
tctgttgtacaagaccacca

SEQ ID NO: 2075 - DNA, 20 bp, Artificial Sequence
  Antisense compound
gtctgttgtacaagaccacc

SEQ ID NO: 2076 - DNA, 20 bp, Artificial Sequence
  Antisense compound
agtctgttgtacaagaccac

SEQ ID NO: 2077 - DNA, 20 bp, Artificial Sequence
  Antisense compound
aagtctgttgtacaagacca

SEQ ID NO: 2078 - DNA, 20 bp, Artificial Sequence
  Antisense compound
gaagtctgttgtacaagacc

SEQ ID NO: 2079 - DNA, 20 bp, Artificial Sequence
  Antisense compound
agaagtctgttgtacaagac

SEQ ID NO: 2080 - DNA, 20 bp, Artificial Sequence
  Antisense compound
gagaagtctgttgtacaaga

SEQ ID NO: 2081 - DNA, 20 bp, Artificial Sequence
  Antisense compound
tgagaagtctgttgtacaag

SEQ ID NO: 2082 - DNA, 20 bp, Artificial Sequence
  Antisense compound
ctgagaagtctgttgtacaa

SEQ ID NO: 2083 - DNA, 20 bp, Artificial Sequence
  Antisense compound
actgagaagtctgttgtaca

SEQ ID NO: 2084 - DNA, 20 bp, Artificial Sequence
  Antisense compound
cactgagaagtctgttgtac

SEQ ID NO: 2085 - DNA, 20 bp, Artificial Sequence
  Antisense compound
ccactgagaagtctgttgta

SEQ ID NO: 2086 - DNA, 20 bp, Artificial Sequence
  Antisense compound
accactgagaagtctgttgt

SEQ ID NO: 2087 - DNA, 20 bp, Artificial Sequence
  Antisense compound
aaccactgagaagtctgttg

SEQ ID NO: 2088 - DNA, 20 bp, Artificial Sequence
  Antisense compound
caaccactgagaagtctgtt

SEQ ID NO: 2089 - DNA, 20 bp, Artificial Sequence
  Antisense compound
acaaccactgagaagtctgt

SEQ ID NO: 2090 - DNA, 20 bp, Artificial Sequence
  Antisense compound
gacaaccactgagaagtctg

SEQ ID NO: 2091 - DNA, 20 bp, Artificial Sequence
  Antisense compound
agacaaccactgagaagtct

SEQ ID NO: 2092 - DNA, 20 bp, Artificial Sequence
  Antisense compound
tagacaaccactgagaagtc

SEQ ID NO: 2093 - DNA, 20 bp, Artificial Sequence
  Antisense compound
ttagacaaccactgagaagt

SEQ ID NO: 2094 - DNA, 20 bp, Artificial Sequence
  Antisense compound
attagacaaccactgagaag

SEQ ID NO: 2095 - DNA, 20 bp, Artificial Sequence
  Antisense compound
gattagacaaccactgagaa

SEQ ID NO: 2096 - DNA, 20 bp, Artificial Sequence
  Antisense compound
agattagacaaccactgaga

SEQ ID NO: 2097 - DNA, 20 bp, Artificial Sequence
  Antisense compound
aagattagacaaccactgag

SEQ ID NO: 2098 - DNA, 20 bp, Artificial Sequence
  Antisense compound
aaagattagacaaccactga

SEQ ID NO: 2099 - DNA, 20 bp, Artificial Sequence
  Antisense compound
aaaagattagacaaccactg

SEQ ID NO: 2100 - DNA, 20 bp, Artificial Sequence
  Antisense compound
caaaagattagacaaccact

SEQ ID NO: 2101 - DNA, 20 bp, Artificial Sequence
  Antisense compound
ccaaaagattagacaaccac

SEQ ID NO: 2102 - DNA, 20 bp, Artificial Sequence
  Antisense compound
cccaaaagattagacaacca

SEQ ID NO: 2103 - DNA, 20 bp, Artificial Sequence
  Antisense compound
gcccaaaagattagacaacc

SEQ ID NO: 2104 - DNA, 20 bp, Artificial Sequence
  Antisense compound
tgcccaaaagattagacaac

SEQ ID NO: 2105 - DNA, 20 bp, Artificial Sequence
  Antisense compound
gtgcccaaaagattagacaa

SEQ ID NO: 2106 - DNA, 20 bp, Artificial Sequence
  Antisense compound
agtgcccaaaagattagaca

SEQ ID NO: 2107 - DNA, 20 bp, Artificial Sequence
  Antisense compound
tagtgcccaaaagattagac

SEQ ID NO: 2108 - DNA, 20 bp, Artificial Sequence
  Antisense compound
gtagtgcccaaaagattaga

SEQ ID NO: 2109 - DNA, 20 bp, Artificial Sequence
  Antisense compound
agtagtgcccaaaagattag

SEQ ID NO: 2110 - DNA, 20 bp, Artificial Sequence
  Antisense compound
cagtagtgcccaaaagatta

SEQ ID NO: 2111 - DNA, 20 bp, Artificial Sequence
  Antisense compound
acagtagtgcccaaaagatt

SEQ ID NO: 2112 - DNA, 20 bp, Artificial Sequence
  Antisense compound
aacagtagtgcccaaaagat

SEQ ID NO: 2113 - DNA, 20 bp, Artificial Sequence
  Antisense compound
caacagtagtgcccaaaaga

SEQ ID NO: 2114 - DNA, 20 bp, Artificial Sequence
  Antisense compound
tcaacagtagtgcccaaaag

SEQ ID NO: 2115 - DNA, 20 bp, Artificial Sequence
  Antisense compound
ttcaacagtagtgcccaaaa

SEQ ID NO: 2116 - DNA, 20 bp, Artificial Sequence
  Antisense compound
tttcaacagtagtgcccaaa

SEQ ID NO: 2117 - DNA, 20 bp, Artificial Sequence
  Antisense compound
ttttcaacagtagtgcccaa

SEQ ID NO: 2118 - DNA, 20 bp, Artificial Sequence
  Antisense compound
tttttcaacagtagtgccca

SEQ ID NO: 2119 - DNA, 20 bp, Artificial Sequence
  Antisense compound
gtttttcaacagtagtgccc

SEQ ID NO: 2120 - DNA, 20 bp, Artificial Sequence
  Antisense compound
agtttttcaacagtagtgcc

SEQ ID NO: 2121 - DNA, 20 bp, Artificial Sequence
  Antisense compound
gagtttttcaacagtagtgc

SEQ ID NO: 2122 - DNA, 20 bp, Artificial Sequence
  Antisense compound
tgagtttttcaacagtagtg

SEQ ID NO: 2123 - DNA, 20 bp, Artificial Sequence
  Antisense compound
ctgagtttttcaacagtagt

SEQ ID NO: 2124 - DNA, 20 bp, Artificial Sequence
  Antisense compound
cctgagtttttcaacagtag

SEQ ID NO: 2125 - DNA, 20 bp, Artificial Sequence
  Antisense compound
gcctgagtttttcaacagta

SEQ ID NO: 2126 - DNA, 20 bp, Artificial Sequence
  Antisense compound
ggcctgagtttttcaacagt

SEQ ID NO: 2127 - DNA, 20 bp, Artificial Sequence
  Antisense compound
aggcctgagtttttcaacag

SEQ ID NO: 2128 - DNA, 20 bp, Artificial Sequence
  Antisense compound
taggcctgagtttttcaaca

SEQ ID NO: 2129 - DNA, 20 bp, Artificial Sequence
  Antisense compound
ataggcctgagtttttcaac

SEQ ID NO: 2130 - DNA, 20 bp, Artificial Sequence
  Antisense compound
gataggcctgagtttttcaa

SEQ ID NO: 2131 - DNA, 20 bp, Artificial Sequence
  Antisense compound
agataggcctgagtttttca

SEQ ID NO: 2132 - DNA, 20 bp, Artificial Sequence
  Antisense compound
aagataggcctgagtttttc

SEQ ID NO: 2133 - DNA, 20 bp, Artificial Sequence
  Antisense compound
aaagataggcctgagttttt

SEQ ID NO: 2134 - DNA, 20 bp, Artificial Sequence
  Antisense compound
caaagataggcctgagtttt

SEQ ID NO: 2135 - DNA, 20 bp, Artificial Sequence
  Antisense compound
tcaaagataggcctgagttt

SEQ ID NO: 2136 - DNA, 20 bp, Artificial Sequence
  Antisense compound
ttcaaagataggcctgagtt

SEQ ID NO: 2137 - DNA, 20 bp, Artificial Sequence
  Antisense compound
attcaaagataggcctgagt

SEQ ID NO: 2138 - DNA, 20 bp, Artificial Sequence
  Antisense compound
cattcaaagataggcctgag

SEQ ID NO: 2139 - DNA, 20 bp, Artificial Sequence
  Antisense compound
ccattcaaagataggcctga

SEQ ID NO: 2140 - DNA, 20 bp, Artificial Sequence
  Antisense compound
tccattcaaagataggcctg

SEQ ID NO: 2141 - DNA, 20 bp, Artificial Sequence
  Antisense compound
atccattcaaagataggcct

SEQ ID NO: 2142 - DNA, 20 bp, Artificial Sequence
  Antisense compound
aatccattcaaagataggcc

SEQ ID NO: 2143 - DNA, 20 bp, Artificial Sequence
  Antisense compound
caatccattcaaagataggc

SEQ ID NO: 2144 - DNA, 20 bp, Artificial Sequence
  Antisense compound
tcaatccattcaaagatagg

SEQ ID NO: 2145 - DNA, 20 bp, Artificial Sequence
  Antisense compound
ctcaatccattcaaagatag

SEQ ID NO: 2146 - DNA, 20 bp, Artificial Sequence
  Antisense compound
cctcaatccattcaaagata

SEQ ID NO: 2147 - DNA, 20 bp, Artificial Sequence
  Antisense compound
gcctcaatccattcaaagat

SEQ ID NO: 2148 - DNA, 20 bp, Artificial Sequence
  Antisense compound
cgcctcaatccattcaaaga

SEQ ID NO: 2149 - DNA, 20 bp, Artificial Sequence
  Antisense compound
tcgcctcaatccattcaaag

SEQ ID NO: 2150 - DNA, 20 bp, Artificial Sequence
  Antisense compound
ttcgcctcaatccattcaaa

SEQ ID NO: 2151 - DNA, 20 bp, Artificial Sequence
  Antisense compound
tttcgcctcaatccattcaa

SEQ ID NO: 2152 - DNA, 20 bp, Artificial Sequence
  Antisense compound
gtttcgcctcaatccattca

SEQ ID NO: 2153 - DNA, 20 bp, Artificial Sequence
  Antisense compound
agtttcgcctcaatccattc

SEQ ID NO: 2154 - DNA, 20 bp, Artificial Sequence
  Antisense compound
aagtttcgcctcaatccatt

SEQ ID NO: 2155 - DNA, 20 bp, Artificial Sequence
  Antisense compound
taagtttcgcctcaatccat

SEQ ID NO: 2156 - DNA, 20 bp, Artificial Sequence
  Antisense compound
ctaagtttcgcctcaatcca

SEQ ID NO: 2157 - DNA, 20 bp, Artificial Sequence
  Antisense compound
actaagtttcgcctcaatcc

SEQ ID NO: 2158 - DNA, 20 bp, Artificial Sequence
  Antisense compound
cactaagtttcgcctcaatc

SEQ ID NO: 2159 - DNA, 20 bp, Artificial Sequence
  Antisense compound
gcactaagtttcgcctcaat

SEQ ID NO: 2160 - DNA, 20 bp, Artificial Sequence
  Antisense compound
tgcactaagtttcgcctcaa

SEQ ID NO: 2161 - DNA, 20 bp, Artificial Sequence
  Antisense compound
ctgcactaagtttcgcctca

SEQ ID NO: 2162 - DNA, 20 bp, Artificial Sequence
  Antisense compound
cctgcactaagtttcgcctc

SEQ ID NO: 2163 - DNA, 20 bp, Artificial Sequence
  Antisense compound
tcctgcactaagtttcgcct

SEQ ID NO: 2164 - DNA, 20 bp, Artificial Sequence
  Antisense compound
ctcctgcactaagtttcgcc

SEQ ID NO: 2165 - DNA, 20 bp, Artificial Sequence
  Antisense compound
actcctgcactaagtttcgc

SEQ ID NO: 2166 - DNA, 20 bp, Artificial Sequence
  Antisense compound
aactcctgcactaagtttcg

SEQ ID NO: 2167 - DNA, 20 bp, Artificial Sequence
  Antisense compound
caactcctgcactaagtttc

SEQ ID NO: 2168 - DNA, 20 bp, Artificial Sequence
  Antisense compound
tcaactcctgcactaagttt

SEQ ID NO: 2169 - DNA, 20 bp, Artificial Sequence
  Antisense compound
ttcaactcctgcactaagtt

SEQ ID NO: 2170 - DNA, 20 bp, Artificial Sequence
  Antisense compound
attcaactcctgcactaagt

SEQ ID NO: 2171 - DNA, 20 bp, Artificial Sequence
  Antisense compound
aattcaactcctgcactaag

SEQ ID NO: 2172 - DNA, 20 bp, Artificial Sequence
  Antisense compound
aaattcaactcctgcactaa

SEQ ID NO: 2173 - DNA, 20 bp, Artificial Sequence
  Antisense compound
gaaattcaactcctgcacta

SEQ ID NO: 2174 - DNA, 20 bp, Artificial Sequence
  Antisense compound
agaaattcaactcctgcact

SEQ ID NO: 2175 - DNA, 20 bp, Artificial Sequence
  Antisense compound
gagaaattcaactcctgcac

SEQ ID NO: 2176 - DNA, 20 bp, Artificial Sequence
  Antisense compound
tgagaaattcaactcctgca

SEQ ID NO: 2177 - DNA, 20 bp, Artificial Sequence
  Antisense compound
ttgagaaattcaactcctgc

SEQ ID NO: 2178 - DNA, 20 bp, Artificial Sequence
  Antisense compound
cttgagaaattcaactcctg

SEQ ID NO: 2179 - DNA, 20 bp, Artificial Sequence
  Antisense compound
ccttgagaaattcaactcct

SEQ ID NO: 2180 - DNA, 20 bp, Artificial Sequence
  Antisense compound
tccttgagaaattcaactcc

SEQ ID NO: 2181 - DNA, 20 bp, Artificial Sequence
  Antisense compound
atccttgagaaattcaactc

SEQ ID NO: 2182 - DNA, 20 bp, Artificial Sequence
  Antisense compound
catccttgagaaattcaact

SEQ ID NO: 2183 - DNA, 20 bp, Artificial Sequence
  Antisense compound
gcatccttgagaaattcaac

SEQ ID NO: 2184 - DNA, 20 bp, Artificial Sequence
  Antisense compound
agcatccttgagaaattcaa

SEQ ID NO: 2185 - DNA, 20 bp, Artificial Sequence
  Antisense compound
aagcatccttgagaaattca

SEQ ID NO: 2186 - DNA, 20 bp, Artificial Sequence
  Antisense compound
caagcatccttgagaaattc

SEQ ID NO: 2187 - DNA, 20 bp, Artificial Sequence
  Antisense compound
ccaagcatccttgagaaatt

SEQ ID NO: 2188 - DNA, 20 bp, Artificial Sequence
  Antisense compound
cccaagcatccttgagaaat

SEQ ID NO: 2189 - DNA, 20 bp, Artificial Sequence
  Antisense compound
tcccaagcatccttgagaaa

SEQ ID NO: 2190 - DNA, 20 bp, Artificial Sequence
  Antisense compound
ctcccaagcatccttgagaa

SEQ ID NO: 2191 - DNA, 20 bp, Artificial Sequence
  Antisense compound
tctcccaagcatccttgaga

SEQ ID NO: 2192 - DNA, 20 bp, Artificial Sequence
  Antisense compound
atctcccaagcatccttgag

SEQ ID NO: 2193 - DNA, 20 bp, Artificial Sequence
  Antisense compound
aatctcccaagcatccttga

SEQ ID NO: 2194 - DNA, 20 bp, Artificial Sequence
  Antisense compound
gaatctcccaagcatccttg

SEQ ID NO: 2195 - DNA, 20 bp, Artificial Sequence
  Antisense compound
agaatctcccaagcatcctt

SEQ ID NO: 2196 - DNA, 20 bp, Artificial Sequence
  Antisense compound
gagaatctcccaagcatcct

SEQ ID NO: 2197 - DNA, 20 bp, Artificial Sequence
  Antisense compound
tgagaatctcccaagcatcc

SEQ ID NO: 2198 - DNA, 20 bp, Artificial Sequence
  Antisense compound
ttgagaatctcccaagcatc

SEQ ID NO: 2199 - DNA, 20 bp, Artificial Sequence
  Antisense compound
tttgagaatctcccaagcat

SEQ ID NO: 2200 - DNA, 20 bp, Artificial Sequence
  Antisense compound
atttgagaatctcccaagca

SEQ ID NO: 2201 - DNA, 20 bp, Artificial Sequence
  Antisense compound
aatttgagaatctcccaagc

SEQ ID NO: 2202 - DNA, 20 bp, Artificial Sequence
  Antisense compound
aaatttgagaatctcccaag

SEQ ID NO: 2203 - DNA, 20 bp, Artificial Sequence
  Antisense compound
gaaatttgagaatctcccaa

SEQ ID NO: 2204 - DNA, 20 bp, Artificial Sequence
  Antisense compound
agaaatttgagaatctccca

SEQ ID NO: 2205 - DNA, 20 bp, Artificial Sequence
  Antisense compound
gagaaatttgagaatctccc

SEQ ID NO: 2206 - DNA, 20 bp, Artificial Sequence
  Antisense compound
tgagaaatttgagaatctcc

SEQ ID NO: 2207 - DNA, 20 bp, Artificial Sequence
  Antisense compound
atgagaaatttgagaatctc

SEQ ID NO: 2208 - DNA, 20 bp, Artificial Sequence
  Antisense compound
aatgagaaatttgagaatct

SEQ ID NO: 2209 - DNA, 20 bp, Artificial Sequence
  Antisense compound
taatgagaaatttgagaatc

SEQ ID NO: 2210 - DNA, 20 bp, Artificial Sequence
  Antisense compound
gtaatgagaaatttgagaat

SEQ ID NO: 2211 - DNA, 20 bp, Artificial Sequence
  Antisense compound
tgtaatgagaaatttgagaa

SEQ ID NO: 2212 - DNA, 20 bp, Artificial Sequence
  Antisense compound
ctgtaatgagaaatttgaga

SEQ ID NO: 2213 - DNA, 20 bp, Artificial Sequence
  Antisense compound
cctgtaatgagaaatttgag

SEQ ID NO: 2214 - DNA, 20 bp, Artificial Sequence
  Antisense compound
acctgtaatgagaaatttga

SEQ ID NO: 2215 - DNA, 20 bp, Artificial Sequence
  Antisense compound
cacctgtaatgagaaatttg

SEQ ID NO: 2216 - DNA, 20 bp, Artificial Sequence
  Antisense compound
acacctgtaatgagaaattt

SEQ ID NO: 2217 - DNA, 20 bp, Artificial Sequence
  Antisense compound
aacacctgtaatgagaaatt

SEQ ID NO: 2218 - DNA, 20 bp, Artificial Sequence
  Antisense compound
aaacacctgtaatgagaaat

SEQ ID NO: 2219 - DNA, 20 bp, Artificial Sequence
  Antisense compound
aaaacacctgtaatgagaaa

SEQ ID NO: 2220 - DNA, 20 bp, Artificial Sequence
  Antisense compound
aaaaacacctgtaatgagaa

SEQ ID NO: 2221 - DNA, 20 bp, Artificial Sequence
  Antisense compound
caaaaacacctgtaatgaga

SEQ ID NO: 2222 - DNA, 20 bp, Artificial Sequence
  Antisense compound
tcaaaaacacctgtaatgag

SEQ ID NO: 2223 - DNA, 20 bp, Artificial Sequence
  Antisense compound
gtcaaaaacacctgtaatga

SEQ ID NO: 2224 - DNA, 20 bp, Artificial Sequence
  Antisense compound
tgtcaaaaacacctgtaatg

SEQ ID NO: 2225 - DNA, 20 bp, Artificial Sequence
  Antisense compound
atgtcaaaaacacctgtaat

SEQ ID NO: 2226 - DNA, 20 bp, Artificial Sequence
  Antisense compound
gatgtcaaaaacacctgtaa

SEQ ID NO: 2227 - DNA, 20 bp, Artificial Sequence
  Antisense compound
cgatgtcaaaaacacctgta

SEQ ID NO: 2228 - DNA, 20 bp, Artificial Sequence
  Antisense compound
acgatgtcaaaaacacctgt

SEQ ID NO: 2229 - DNA, 20 bp, Artificial Sequence
  Antisense compound
gacgatgtcaaaaacacctg

SEQ ID NO: 2230 - DNA, 20 bp, Artificial Sequence
  Antisense compound
tgacgatgtcaaaaacacct

SEQ ID NO: 2231 - DNA, 20 bp, Artificial Sequence
  Antisense compound
ttgacgatgtcaaaaacacc

SEQ ID NO: 2232 - DNA, 20 bp, Artificial Sequence
  Antisense compound
cttgacgatgtcaaaaacac

SEQ ID NO: 2233 - DNA, 20 bp, Artificial Sequence
  Antisense compound
ccttgacgatgtcaaaaaca

SEQ ID NO: 2234 - DNA, 20 bp, Artificial Sequence
  Antisense compound
cccttgacgatgtcaaaaac

SEQ ID NO: 2235 - DNA, 20 bp, Artificial Sequence
  Antisense compound
acccttgacgatgtcaaaaa

SEQ ID NO: 2236 - DNA, 20 bp, Artificial Sequence
  Antisense compound
gacccttgacgatgtcaaaa

SEQ ID NO: 2237 - DNA, 20 bp, Artificial Sequence
  Antisense compound
tgacccttgacgatgtcaaa

SEQ ID NO: 2238 - DNA, 20 bp, Artificial Sequence
  Antisense compound
ttgacccttgacgatgtcaa

SEQ ID NO: 2239 - DNA, 20 bp, Artificial Sequence
  Antisense compound
tttgacccttgacgatgtca

SEQ ID NO: 2240 - DNA, 20 bp, Artificial Sequence
  Antisense compound
atttgacccttgacgatgtc

SEQ ID NO: 2241 - DNA, 20 bp, Artificial Sequence
  Antisense compound
tatttgacccttgacgatgt

SEQ ID NO: 2242 - DNA, 20 bp, Artificial Sequence
  Antisense compound
gtatttgacccttgacgatg

SEQ ID NO: 2243 - DNA, 20 bp, Artificial Sequence
  Antisense compound
tgtatttgacccttgacgat

SEQ ID NO: 2244 - DNA, 20 bp, Artificial Sequence
  Antisense compound
ctgtatttgacccttgacga

SEQ ID NO: 2245 - DNA, 20 bp, Artificial Sequence
  Antisense compound
cctgtatttgacccttgacg

SEQ ID NO: 2246 - DNA, 20 bp, Artificial Sequence
  Antisense compound
acctgtatttgacccttgac

SEQ ID NO: 2247 - DNA, 20 bp, Artificial Sequence
  Antisense compound
aacctgtatttgacccttga

SEQ ID NO: 2248 - DNA, 20 bp, Artificial Sequence
  Antisense compound
caacctgtatttgacccttg

SEQ ID NO: 2249 - DNA, 20 bp, Artificial Sequence
  Antisense compound
gcaacctgtatttgaccctt

SEQ ID NO: 2250 - DNA, 20 bp, Artificial Sequence
  Antisense compound
agcaacctgtatttgaccct

SEQ ID NO: 2251 - DNA, 20 bp, Artificial Sequence
  Antisense compound
aagcaacctgtatttgaccc

SEQ ID NO: 2252 - DNA, 20 bp, Artificial Sequence
  Antisense compound
gaagcaacctgtatttgacc

SEQ ID NO: 2253 - DNA, 20 bp, Artificial Sequence
  Antisense compound
tgaagcaacctgtatttgac

SEQ ID NO: 2254 - DNA, 20 bp, Artificial Sequence
  Antisense compound
ctgaagcaacctgtatttga

SEQ ID NO: 2255 - DNA, 20 bp, Artificial Sequence
  Antisense compound
tctgaagcaacctgtatttg

SEQ ID NO: 2256 - DNA, 20 bp, Artificial Sequence
  Antisense compound
atctgaagcaacctgtattt

SEQ ID NO: 2257 - DNA, 20 bp, Artificial Sequence
  Antisense compound
tatctgaagcaacctgtatt

SEQ ID NO: 2258 - DNA, 20 bp, Artificial Sequence
  Antisense compound
ttatctgaagcaacctgtat

SEQ ID NO: 2259 - DNA, 20 bp, Artificial Sequence
  Antisense compound
gttatctgaagcaacctgta

SEQ ID NO: 2260 - DNA, 20 bp, Artificial Sequence
  Antisense compound
tgttatctgaagcaacctgt

SEQ ID NO: 2261 - DNA, 20 bp, Artificial Sequence
  Antisense compound
atgttatctgaagcaacctg

SEQ ID NO: 2262 - DNA, 20 bp, Artificial Sequence
  Antisense compound
gatgttatctgaagcaacct

SEQ ID NO: 2263 - DNA, 20 bp, Artificial Sequence
  Antisense compound
tgatgttatctgaagcaacc

SEQ ID NO: 2264 - DNA, 20 bp, Artificial Sequence
  Antisense compound
ttgatgttatctgaagcaac

SEQ ID NO: 2265 - DNA, 20 bp, Artificial Sequence
  Antisense compound
cttgatgttatctgaagcaa

SEQ ID NO: 2266 - DNA, 20 bp, Artificial Sequence
  Antisense compound
ccttgatgttatctgaagca

SEQ ID NO: 2267 - DNA, 20 bp, Artificial Sequence
  Antisense compound
tccttgatgttatctgaagc

SEQ ID NO: 2268 - DNA, 20 bp, Artificial Sequence
  Antisense compound
atccttgatgttatctgaag

SEQ ID NO: 2269 - DNA, 20 bp, Artificial Sequence
  Antisense compound
aatccttgatgttatctgaa

SEQ ID NO: 2270 - DNA, 20 bp, Artificial Sequence
  Antisense compound
caatccttgatgttatctga

SEQ ID NO: 2271 - DNA, 20 bp, Artificial Sequence
  Antisense compound
acaatccttgatgttatctg

SEQ ID NO: 2272 - DNA, 20 bp, Artificial Sequence
  Antisense compound
cacaatccttgatgttatct

SEQ ID NO: 2273 - DNA, 20 bp, Artificial Sequence
  Antisense compound
acacaatccttgatgttatc

SEQ ID NO: 2274 - DNA, 20 bp, Artificial Sequence
  Antisense compound
tacacaatccttgatgttat

SEQ ID NO: 2275 - DNA, 20 bp, Artificial Sequence
  Antisense compound
ttacacaatccttgatgtta

SEQ ID NO: 2276 - DNA, 20 bp, Artificial Sequence
  Antisense compound
tttacacaatccttgatgtt

SEQ ID NO: 2277 - DNA, 20 bp, Artificial Sequence
  Antisense compound
ttttacacaatccttgatgt

SEQ ID NO: 2278 - DNA, 20 bp, Artificial Sequence
  Antisense compound
attttacacaatccttgatg

SEQ ID NO: 2279 - DNA, 20 bp, Artificial Sequence
  Antisense compound
cattttacacaatccttgat

SEQ ID NO: 2280 - DNA, 20 bp, Artificial Sequence
  Antisense compound
gcattttacacaatccttga

SEQ ID NO: 2281 - DNA, 20 bp, Artificial Sequence
  Antisense compound
agcattttacacaatccttg

SEQ ID NO: 2282 - DNA, 20 bp, Artificial Sequence
  Antisense compound
aagcattttacacaatcctt

SEQ ID NO: 2283 - DNA, 20 bp, Artificial Sequence
  Antisense compound
gaagcattttacacaatcct

SEQ ID NO: 2284 - DNA, 20 bp, Artificial Sequence
  Antisense compound
tgaagcattttacacaatcc

SEQ ID NO: 2285 - DNA, 20 bp, Artificial Sequence
  Antisense compound
atgaagcattttacacaatc

SEQ ID NO: 2286 - DNA, 20 bp, Artificial Sequence
  Antisense compound
aatgaagcattttacacaat

SEQ ID NO: 2287 - DNA, 20 bp, Artificial Sequence
  Antisense compound
caatgaagcattttacacaa

SEQ ID NO: 2288 - DNA, 20 bp, Artificial Sequence
  Antisense compound
tcaatgaagcattttacaca

SEQ ID NO: 2289 - DNA, 20 bp, Artificial Sequence
  Antisense compound
atcaatgaagcattttacac

SEQ ID NO: 2290 - DNA, 20 bp, Artificial Sequence
  Antisense compound
catcaatgaagcattttaca

SEQ ID NO: 2291 - DNA, 20 bp, Artificial Sequence
  Antisense compound
acatcaatgaagcattttac

SEQ ID NO: 2292 - DNA, 20 bp, Artificial Sequence
  Antisense compound
aacatcaatgaagcatttta

SEQ ID NO: 2293 - DNA, 20 bp, Artificial Sequence
  Antisense compound
caacatcaatgaagcatttt

SEQ ID NO: 2294 - DNA, 20 bp, Artificial Sequence
  Antisense compound
acaacatcaatgaagcattt

SEQ ID NO: 2295 - DNA, 20 bp, Artificial Sequence
  Antisense compound
aacaacatcaatgaagcatt

SEQ ID NO: 2296 - DNA, 20 bp, Artificial Sequence
  Antisense compound
taacaacatcaatgaagcat

SEQ ID NO: 2297 - DNA, 20 bp, Artificial Sequence
  Antisense compound
ttaacaacatcaatgaagca

SEQ ID NO: 2298 - DNA, 20 bp, Artificial Sequence
  Antisense compound
gttaacaacatcaatgaagc

SEQ ID NO: 2299 - DNA, 20 bp, Artificial Sequence
  Antisense compound
tgttaacaacatcaatgaag

SEQ ID NO: 2300 - DNA, 20 bp, Artificial Sequence
  Antisense compound
ttgttaacaacatcaatgaa

SEQ ID NO: 2301 - DNA, 20 bp, Artificial Sequence
  Antisense compound
cttgttaacaacatcaatga

SEQ ID NO: 2302 - DNA, 20 bp, Artificial Sequence
  Antisense compound
ccttgttaacaacatcaatg

SEQ ID NO: 2303 - DNA, 20 bp, Artificial Sequence
  Antisense compound
gccttgttaacaacatcaat

SEQ ID NO: 2304 - DNA, 20 bp, Artificial Sequence
  Antisense compound
tgccttgttaacaacatcaa

SEQ ID NO: 2305 - DNA, 20 bp, Artificial Sequence
  Antisense compound
gtgccttgttaacaacatca

SEQ ID NO: 2306 - DNA, 20 bp, Artificial Sequence
  Antisense compound
agtgccttgttaacaacatc

SEQ ID NO: 2307 - DNA, 20 bp, Artificial Sequence
  Antisense compound
gagtgccttgttaacaacat

SEQ ID NO: 2308 - DNA, 20 bp, Artificial Sequence
  Antisense compound
cgagtgccttgttaacaaca

SEQ ID NO: 2309 - DNA, 20 bp, Artificial Sequence
  Antisense compound
tcgagtgccttgttaacaac

SEQ ID NO: 2310 - DNA, 20 bp, Artificial Sequence
  Antisense compound
ttcgagtgccttgttaacaa

SEQ ID NO: 2311 - DNA, 20 bp, Artificial Sequence
  Antisense compound
tttcgagtgccttgttaaca

SEQ ID NO: 2312 - DNA, 20 bp, Artificial Sequence
  Antisense compound
atttcgagtgccttgttaac

SEQ ID NO: 2313 - DNA, 20 bp, Artificial Sequence
  Antisense compound
catttcgagtgccttgttaa

SEQ ID NO: 2314 - DNA, 20 bp, Artificial Sequence
  Antisense compound
acatttcgagtgccttgtta

SEQ ID NO: 2315 - DNA, 20 bp, Artificial Sequence
  Antisense compound
cacatttcgagtgccttgtt

SEQ ID NO: 2316 - DNA, 20 bp, Artificial Sequence
  Antisense compound
gcacatttcgagtgccttgt

SEQ ID NO: 2317 - DNA, 20 bp, Artificial Sequence
  Antisense compound
tgcacatttcgagtgccttg

SEQ ID NO: 2318 - DNA, 20 bp, Artificial Sequence
  Antisense compound
atgcacatttcgagtgcctt

SEQ ID NO: 2319 - DNA, 20 bp, Artificial Sequence
  Antisense compound
aatgcacatttcgagtgcct

SEQ ID NO: 2320 - DNA, 20 bp, Artificial Sequence
  Antisense compound
caatgcacatttcgagtgcc

SEQ ID NO: 2321 - DNA, 20 bp, Artificial Sequence
  Antisense compound
tcaatgcacatttcgagtgc

SEQ ID NO: 2322 - DNA, 20 bp, Artificial Sequence
  Antisense compound
atcaatgcacatttcgagtg

SEQ ID NO: 2323 - DNA, 20 bp, Artificial Sequence
  Antisense compound
gatcaatgcacatttcgagt

SEQ ID NO: 2324 - DNA, 20 bp, Artificial Sequence
  Antisense compound
tgatcaatgcacatttcgag

SEQ ID NO: 2325 - DNA, 20 bp, Artificial Sequence
  Antisense compound
ttgatcaatgcacatttcga

SEQ ID NO: 2326 - DNA, 20 bp, Artificial Sequence
  Antisense compound
cttgatcaatgcacatttcg

SEQ ID NO: 2327 - DNA, 20 bp, Artificial Sequence
  Antisense compound
acttgatcaatgcacatttc

SEQ ID NO: 2328 - DNA, 20 bp, Artificial Sequence
  Antisense compound
gacttgatcaatgcacattt

SEQ ID NO: 2329 - DNA, 20 bp, Artificial Sequence
  Antisense compound
tgacttgatcaatgcacatt

SEQ ID NO: 2330 - DNA, 20 bp, Artificial Sequence
  Antisense compound
gtgacttgatcaatgcacat

SEQ ID NO: 2331 - DNA, 20 bp, Artificial Sequence
  Antisense compound
agtgacttgatcaatgcaca

SEQ ID NO: 2332 - DNA, 20 bp, Artificial Sequence
  Antisense compound
tagtgacttgatcaatgcac

SEQ ID NO: 2333 - DNA, 20 bp, Artificial Sequence
  Antisense compound
atagtgacttgatcaatgca

SEQ ID NO: 2334 - DNA, 20 bp, Artificial Sequence
  Antisense compound
gatagtgacttgatcaatgc

SEQ ID NO: 2335 - DNA, 20 bp, Artificial Sequence
  Antisense compound
cgatagtgacttgatcaatg

SEQ ID NO: 2336 - DNA, 20 bp, Artificial Sequence
  Antisense compound
gcgatagtgacttgatcaat

SEQ ID NO: 2337 - DNA, 20 bp, Artificial Sequence
  Antisense compound
agcgatagtgacttgatcaa

SEQ ID NO: 2338 - DNA, 20 bp, Artificial Sequence
  Antisense compound
cagcgatagtgacttgatca

SEQ ID NO: 2339 - DNA, 20 bp, Artificial Sequence
  Antisense compound
ccagcgatagtgacttgatc

SEQ ID NO: 2340 - DNA, 20 bp, Artificial Sequence
  Antisense compound
gccagcgatagtgacttgat

SEQ ID NO: 2341 - DNA, 20 bp, Artificial Sequence
  Antisense compound
cgccagcgatagtgacttga

SEQ ID NO: 2342 - DNA, 20 bp, Artificial Sequence
  Antisense compound
gcgccagcgatagtgacttg

SEQ ID NO: 2343 - DNA, 20 bp, Artificial Sequence
  Antisense compound
tgcgccagcgatagtgactt

SEQ ID NO: 2344 - DNA, 20 bp, Artificial Sequence
  Antisense compound
ttgcgccagcgatagtgact

SEQ ID NO: 2345 - DNA, 20 bp, Artificial Sequence
  Antisense compound
tttgcgccagcgatagtgac

SEQ ID NO: 2346 - DNA, 20 bp, Artificial Sequence
  Antisense compound
ctttgcgccagcgatagtga

SEQ ID NO: 2347 - DNA, 20 bp, Artificial Sequence
  Antisense compound
actttgcgccagcgatagtg

SEQ ID NO: 2348 - DNA, 20 bp, Artificial Sequence
  Antisense compound
aactttgcgccagcgatagt

SEQ ID NO: 2349 - DNA, 20 bp, Artificial Sequence
  Antisense compound
caactttgcgccagcgatag

SEQ ID NO: 2350 - DNA, 20 bp, Artificial Sequence
  Antisense compound
gcaactttgcgccagcgata

SEQ ID NO: 2351 - DNA, 20 bp, Artificial Sequence
  Antisense compound
cgcaactttgcgccagcgat

SEQ ID NO: 2352 - DNA, 20 bp, Artificial Sequence
  Antisense compound
tcgcaactttgcgccagcga

SEQ ID NO: 2353 - DNA, 20 bp, Artificial Sequence
  Antisense compound
atcgcaactttgcgccagcg

SEQ ID NO: 2354 - DNA, 20 bp, Artificial Sequence
  Antisense compound
gatcgcaactttgcgccagc

SEQ ID NO: 2355 - DNA, 20 bp, Artificial Sequence
  Antisense compound
tgatcgcaactttgcgccag

SEQ ID NO: 2356 - DNA, 20 bp, Artificial Sequence
  Antisense compound
gtgatcgcaactttgcgcca

SEQ ID NO: 2357 - DNA, 20 bp, Artificial Sequence
  Antisense compound
agtgatcgcaactttgcgcc

SEQ ID NO: 2358 - DNA, 20 bp, Artificial Sequence
  Antisense compound
gagtgatcgcaactttgcgc

SEQ ID NO: 2359 - DNA, 20 bp, Artificial Sequence
  Antisense compound
tgagtgatcgcaactttgcg

SEQ ID NO: 2360 - DNA, 20 bp, Artificial Sequence
  Antisense compound
ttgagtgatcgcaactttgc

SEQ ID NO: 2361 - DNA, 20 bp, Artificial Sequence
  Antisense compound
gttgagtgatcgcaactttg

SEQ ID NO: 2362 - DNA, 20 bp, Artificial Sequence
  Antisense compound
agttgagtgatcgcaacttt

SEQ ID NO: 2363 - DNA, 20 bp, Artificial Sequence
  Antisense compound
aagttgagtgatcgcaactt

SEQ ID NO: 2364 - DNA, 20 bp, Artificial Sequence
  Antisense compound
taagttgagtgatcgcaact

SEQ ID NO: 2365 - DNA, 20 bp, Artificial Sequence
  Antisense compound
ctaagttgagtgatcgcaac

SEQ ID NO: 2366 - DNA, 20 bp, Artificial Sequence
  Antisense compound
cctaagttgagtgatcgcaa

SEQ ID NO: 2367 - DNA, 20 bp, Artificial Sequence
  Antisense compound
acctaagttgagtgatcgca

SEQ ID NO: 2368 - DNA, 20 bp, Artificial Sequence
  Antisense compound
cacctaagttgagtgatcgc

SEQ ID NO: 2369 - DNA, 20 bp, Artificial Sequence
  Antisense compound
tcacctaagttgagtgatcg

SEQ ID NO: 2370 - DNA, 20 bp, Artificial Sequence
  Antisense compound
ttcacctaagttgagtgatc

SEQ ID NO: 2371 - DNA, 20 bp, Artificial Sequence
  Antisense compound
cttcacctaagttgagtgat

SEQ ID NO: 2372 - DNA, 20 bp, Artificial Sequence
  Antisense compound
acttcacctaagttgagtga

SEQ ID NO: 2373 - DNA, 20 bp, Artificial Sequence
  Antisense compound
gacttcacctaagttgagtg

SEQ ID NO: 2374 - DNA, 20 bp, Artificial Sequence
  Antisense compound
agacttcacctaagttgagt

SEQ ID NO: 2375 - DNA, 20 bp, Artificial Sequence
  Antisense compound
aagacttcacctaagttgag

SEQ ID NO: 2376 - DNA, 20 bp, Artificial Sequence
  Antisense compound
gaagacttcacctaagttga

SEQ ID NO: 2377 - DNA, 20 bp, Artificial Sequence
  Antisense compound
tgaagacttcacctaagttg

SEQ ID NO: 2378 - DNA, 20 bp, Artificial Sequence
  Antisense compound
atgaagacttcacctaagtt

SEQ ID NO: 2379 - DNA, 20 bp, Artificial Sequence
  Antisense compound
gatgaagacttcacctaagt

SEQ ID NO: 2380 - DNA, 20 bp, Artificial Sequence
  Antisense compound
cgatgaagacttcacctaag

SEQ ID NO: 2381 - DNA, 20 bp, Artificial Sequence
  Antisense compound
gcgatgaagacttcacctaa

SEQ ID NO: 2382 - DNA, 20 bp, Artificial Sequence
  Antisense compound
agcgatgaagacttcaccta

SEQ ID NO: 2383 - DNA, 20 bp, Artificial Sequence
  Antisense compound
gagcgatgaagacttcacct

SEQ ID NO: 2384 - DNA, 20 bp, Artificial Sequence
  Antisense compound
tgagcgatgaagacttcacc

SEQ ID NO: 2385 - DNA, 20 bp, Artificial Sequence
  Antisense compound
ttgagcgatgaagacttcac

SEQ ID NO: 2386 - DNA, 20 bp, Artificial Sequence
  Antisense compound
tttgagcgatgaagacttca

SEQ ID NO: 2387 - DNA, 20 bp, Artificial Sequence
  Antisense compound
ctttgagcgatgaagacttc

SEQ ID NO: 2388 - DNA, 20 bp, Artificial Sequence
  Antisense compound
gctttgagcgatgaagactt

SEQ ID NO: 2389 - DNA, 20 bp, Artificial Sequence
  Antisense compound
tgctttgagcgatgaagact

SEQ ID NO: 2390 - DNA, 20 bp, Artificial Sequence
  Antisense compound
ttgctttgagcgatgaagac

SEQ ID NO: 2391 - DNA, 20 bp, Artificial Sequence
  Antisense compound
cttgctttgagcgatgaaga

SEQ ID NO: 2392 - DNA, 20 bp, Artificial Sequence
  Antisense compound
ccttgctttgagcgatgaag

SEQ ID NO: 2393 - DNA, 20 bp, Artificial Sequence
  Antisense compound
cccttgctttgagcgatgaa

SEQ ID NO: 2394 - DNA, 20 bp, Artificial Sequence
  Antisense compound
tcccttgctttgagcgatga

SEQ ID NO: 2395 - DNA, 20 bp, Artificial Sequence
  Antisense compound
gtcccttgctttgagcgatg

SEQ ID NO: 2396 - DNA, 20 bp, Artificial Sequence
  Antisense compound
agtcccttgctttgagcgat

SEQ ID NO: 2397 - DNA, 20 bp, Artificial Sequence
  Antisense compound
aagtcccttgctttgagcga

SEQ ID NO: 2398 - DNA, 20 bp, Artificial Sequence
  Antisense compound
aaagtcccttgctttgagcg

SEQ ID NO: 2399 - DNA, 20 bp, Artificial Sequence
  Antisense compound
taaagtcccttgctttgagc

SEQ ID NO: 2400 - DNA, 20 bp, Artificial Sequence
  Antisense compound
gtaaagtcccttgctttgag

SEQ ID NO: 2401 - DNA, 20 bp, Artificial Sequence
  Antisense compound
ggtaaagtcccttgctttga

SEQ ID NO: 2402 - DNA, 20 bp, Artificial Sequence
  Antisense compound
cggtaaagtcccttgctttg

SEQ ID NO: 2403 - DNA, 20 bp, Artificial Sequence
  Antisense compound
acggtaaagtcccttgcttt

SEQ ID NO: 2404 - DNA, 20 bp, Artificial Sequence
  Antisense compound
gacggtaaagtcccttgctt

SEQ ID NO: 2405 - DNA, 20 bp, Artificial Sequence
  Antisense compound
tgacggtaaagtcccttgct

SEQ ID NO: 2406 - DNA, 20 bp, Artificial Sequence
  Antisense compound
ctgacggtaaagtcccttgc

SEQ ID NO: 2407 - DNA, 20 bp, Artificial Sequence
  Antisense compound
actgacggtaaagtcccttg

SEQ ID NO: 2408 - DNA, 20 bp, Artificial Sequence
  Antisense compound
cactgacggtaaagtccctt

SEQ ID NO: 2409 - DNA, 20 bp, Artificial Sequence
  Antisense compound
acactgacggtaaagtccct

SEQ ID NO: 2410 - DNA, 20 bp, Artificial Sequence
  Antisense compound
tacactgacggtaaagtccc

SEQ ID NO: 2411 - DNA, 20 bp, Artificial Sequence
  Antisense compound
atacactgacggtaaagtcc

SEQ ID NO: 2412 - DNA, 20 bp, Artificial Sequence
  Antisense compound
tatacactgacggtaaagtc

SEQ ID NO: 2413 - DNA, 20 bp, Artificial Sequence
  Antisense compound
gtatacactgacggtaaagt

SEQ ID NO: 2414 - DNA, 20 bp, Artificial Sequence
  Antisense compound
cgtatacactgacggtaaag

SEQ ID NO: 2415 - DNA, 20 bp, Artificial Sequence
  Antisense compound
acgtatacactgacggtaaa

SEQ ID NO: 2416 - DNA, 20 bp, Artificial Sequence
  Antisense compound
cacgtatacactgacggtaa

SEQ ID NO: 2417 - DNA, 20 bp, Artificial Sequence
  Antisense compound
ccacgtatacactgacggta

SEQ ID NO: 2418 - DNA, 20 bp, Artificial Sequence
  Antisense compound
gccacgtatacactgacggt

SEQ ID NO: 2419 - DNA, 20 bp, Artificial Sequence
  Antisense compound
tgccacgtatacactgacgg

SEQ ID NO: 2420 - DNA, 20 bp, Artificial Sequence
  Antisense compound
ttgccacgtatacactgacg

SEQ ID NO: 2421 - DNA, 20 bp, Artificial Sequence
  Antisense compound
cttgccacgtatacactgac

SEQ ID NO: 2422 - DNA, 20 bp, Artificial Sequence
  Antisense compound
ccttgccacgtatacactga

SEQ ID NO: 2423 - DNA, 20 bp, Artificial Sequence
  Antisense compound
tccttgccacgtatacactg

SEQ ID NO: 2424 - DNA, 20 bp, Artificial Sequence
  Antisense compound
ctccttgccacgtatacact

SEQ ID NO: 2425 - DNA, 20 bp, Artificial Sequence
  Antisense compound
gctccttgccacgtatacac

SEQ ID NO: 2426 - DNA, 20 bp, Artificial Sequence
  Antisense compound
tgctccttgccacgtataca

SEQ ID NO: 2427 - DNA, 20 bp, Artificial Sequence
  Antisense compound
ctgctccttgccacgtatac

SEQ ID NO: 2428 - DNA, 20 bp, Artificial Sequence
  Antisense compound
gctgctccttgccacgtata

SEQ ID NO: 2429 - DNA, 20 bp, Artificial Sequence
  Antisense compound
agctgctccttgccacgtat

SEQ ID NO: 2430 - DNA, 20 bp, Artificial Sequence
  Antisense compound
cagctgctccttgccacgta

SEQ ID NO: 2431 - DNA, 20 bp, Artificial Sequence
  Antisense compound
gcagctgctccttgccacgt

SEQ ID NO: 2432 - DNA, 20 bp, Artificial Sequence
  Antisense compound
tgcagctgctccttgccacg

SEQ ID NO: 2433 - DNA, 20 bp, Artificial Sequence
  Antisense compound
ttgcagctgctccttgccac

SEQ ID NO: 2434 - DNA, 20 bp, Artificial Sequence
  Antisense compound
gttgcagctgctccttgcca

SEQ ID NO: 2435 - DNA, 20 bp, Artificial Sequence
  Antisense compound
agttgcagctgctccttgcc

SEQ ID NO: 2436 - DNA, 20 bp, Artificial Sequence
  Antisense compound
tagttgcagctgctccttgc

SEQ ID NO: 2437 - DNA, 20 bp, Artificial Sequence
  Antisense compound
gtagttgcagctgctccttg

SEQ ID NO: 2438 - DNA, 20 bp, Artificial Sequence
  Antisense compound
agtagttgcagctgctcctt

SEQ ID NO: 2439 - DNA, 20 bp, Artificial Sequence
  Antisense compound
gagtagttgcagctgctcct

SEQ ID NO: 2440 - DNA, 20 bp, Artificial Sequence
  Antisense compound
tgagtagttgcagctgctcc

SEQ ID NO: 2441 - DNA, 20 bp, Artificial Sequence
  Antisense compound
atgagtagttgcagctgctc

SEQ ID NO: 2442 - DNA, 20 bp, Artificial Sequence
  Antisense compound
catgagtagttgcagctgct

SEQ ID NO: 2443 - DNA, 20 bp, Artificial Sequence
  Antisense compound
gcatgagtagttgcagctgc

SEQ ID NO: 2444 - DNA, 20 bp, Artificial Sequence
  Antisense compound
ggcatgagtagttgcagctg

SEQ ID NO: 2445 - DNA, 20 bp, Artificial Sequence
  Antisense compound
aggcatgagtagttgcagct

SEQ ID NO: 2446 - DNA, 20 bp, Artificial Sequence
  Antisense compound
gaggcatgagtagttgcagc

SEQ ID NO: 2447 - DNA, 20 bp, Artificial Sequence
  Antisense compound
agaggcatgagtagttgcag

SEQ ID NO: 2448 - DNA, 20 bp, Artificial Sequence
  Antisense compound
aagaggcatgagtagttgca

SEQ ID NO: 2449 - DNA, 20 bp, Artificial Sequence
  Antisense compound
taagaggcatgagtagttgc

SEQ ID NO: 2450 - DNA, 20 bp, Artificial Sequence
  Antisense compound
ttaagaggcatgagtagttg

SEQ ID NO: 2451 - DNA, 20 bp, Artificial Sequence
  Antisense compound
cttaagaggcatgagtagtt

SEQ ID NO: 2452 - DNA, 20 bp, Artificial Sequence
  Antisense compound
ccttaagaggcatgagtagt

SEQ ID NO: 2453 - DNA, 20 bp, Artificial Sequence
  Antisense compound
gccttaagaggcatgagtag

SEQ ID NO: 2454 - DNA, 20 bp, Artificial Sequence
  Antisense compound
tgccttaagaggcatgagta

SEQ ID NO: 2455 - DNA, 20 bp, Artificial Sequence
  Antisense compound
gtgccttaagaggcatgagt

SEQ ID NO: 2456 - DNA, 20 bp, Artificial Sequence
  Antisense compound
ggtgccttaagaggcatgag

SEQ ID NO: 2457 - DNA, 20 bp, Artificial Sequence
  Antisense compound
tggtgccttaagaggcatga

SEQ ID NO: 2458 - DNA, 20 bp, Artificial Sequence
  Antisense compound
ttggtgccttaagaggcatg

SEQ ID NO: 2459 - DNA, 20 bp, Artificial Sequence
  Antisense compound
tttggtgccttaagaggcat

SEQ ID NO: 2460 - DNA, 20 bp, Artificial Sequence
  Antisense compound
ttttggtgccttaagaggca

SEQ ID NO: 2461 - DNA, 20 bp, Artificial Sequence
  Antisense compound
cttttggtgccttaagaggc

SEQ ID NO: 2462 - DNA, 20 bp, Artificial Sequence
  Antisense compound
tcttttggtgccttaagagg

SEQ ID NO: 2463 - DNA, 20 bp, Artificial Sequence
  Antisense compound
ttcttttggtgccttaagag

SEQ ID NO: 2464 - DNA, 20 bp, Artificial Sequence
  Antisense compound
cttcttttggtgccttaaga

SEQ ID NO: 2465 - DNA, 20 bp, Artificial Sequence
  Antisense compound
acttcttttggtgccttaag

SEQ ID NO: 2466 - DNA, 20 bp, Artificial Sequence
  Antisense compound
tacttcttttggtgccttaa

SEQ ID NO: 2467 - DNA, 20 bp, Artificial Sequence
  Antisense compound
ttacttcttttggtgcctta

SEQ ID NO: 2468 - DNA, 20 bp, Artificial Sequence
  Antisense compound
gttacttcttttggtgcctt

SEQ ID NO: 2469 - DNA, 20 bp, Artificial Sequence
  Antisense compound
ggttacttcttttggtgcct

SEQ ID NO: 2470 - DNA, 20 bp, Artificial Sequence
  Antisense compound
aggttacttcttttggtgcc

SEQ ID NO: 2471 - DNA, 20 bp, Artificial Sequence
  Antisense compound
aaggttacttcttttggtgc

SEQ ID NO: 2472 - DNA, 20 bp, Artificial Sequence
  Antisense compound
aaaggttacttcttttggtg

SEQ ID NO: 2473 - DNA, 20 bp, Artificial Sequence
  Antisense compound
gaaaggttacttcttttggt

SEQ ID NO: 2474 - DNA, 20 bp, Artificial Sequence
  Antisense compound
agaaaggttacttcttttgg

SEQ ID NO: 2475 - DNA, 20 bp, Artificial Sequence
  Antisense compound
aagaaaggttacttcttttg

SEQ ID NO: 2476 - DNA, 20 bp, Artificial Sequence
  Antisense compound
caagaaaggttacttctttt

SEQ ID NO: 2477 - DNA, 20 bp, Artificial Sequence
  Antisense compound
tcaagaaaggttacttcttt

SEQ ID NO: 2478 - DNA, 20 bp, Artificial Sequence
  Antisense compound
ttcaagaaaggttacttctt

SEQ ID NO: 2479 - DNA, 20 bp, Artificial Sequence
  Antisense compound
cttcaagaaaggttacttct

SEQ ID NO: 2480 - DNA, 20 bp, Artificial Sequence
  Antisense compound
ccttcaagaaaggttacttc

SEQ ID NO: 2481 - DNA, 20 bp, Artificial Sequence
  Antisense compound
accttcaagaaaggttactt

SEQ ID NO: 2482 - DNA, 20 bp, Artificial Sequence
  Antisense compound
caccttcaagaaaggttact

SEQ ID NO: 2483 - DNA, 20 bp, Artificial Sequence
  Antisense compound
tcaccttcaagaaaggttac

SEQ ID NO: 2484 - DNA, 20 bp, Artificial Sequence
  Antisense compound
atcaccttcaagaaaggtta

SEQ ID NO: 2485 - DNA, 20 bp, Artificial Sequence
  Antisense compound
aatcaccttcaagaaaggtt

SEQ ID NO: 2486 - DNA, 20 bp, Artificial Sequence
  Antisense compound
gaatcaccttcaagaaaggt

SEQ ID NO: 2487 - DNA, 20 bp, Artificial Sequence
  Antisense compound
tgaatcaccttcaagaaagg

SEQ ID NO: 2488 - DNA, 20 bp, Artificial Sequence
  Antisense compound
gtgaatcaccttcaagaaag

SEQ ID NO: 2489 - DNA, 20 bp, Artificial Sequence
  Antisense compound
tgtgaatcaccttcaagaaa

SEQ ID NO: 2490 - DNA, 20 bp, Artificial Sequence
  Antisense compound
atgtgaatcaccttcaagaa

SEQ ID NO: 2491 - DNA, 20 bp, Artificial Sequence
  Antisense compound
catgtgaatcaccttcaaga

SEQ ID NO: 2492 - DNA, 20 bp, Artificial Sequence
  Antisense compound
tcatgtgaatcaccttcaag

SEQ ID NO: 2493 - DNA, 20 bp, Artificial Sequence
  Antisense compound
gtcatgtgaatcaccttcaa

SEQ ID NO: 2494 - DNA, 20 bp, Artificial Sequence
  Antisense compound
tgtcatgtgaatcaccttca

SEQ ID NO: 2495 - DNA, 20 bp, Artificial Sequence
  Antisense compound
gtgtcatgtgaatcaccttc

SEQ ID NO: 2496 - DNA, 20 bp, Artificial Sequence
  Antisense compound
tgtgtcatgtgaatcacctt

SEQ ID NO: 2497 - DNA, 20 bp, Artificial Sequence
  Antisense compound
ctgtgtcatgtgaatcacct

SEQ ID NO: 2498 - DNA, 20 bp, Artificial Sequence
  Antisense compound
actgtgtcatgtgaatcacc

SEQ ID NO: 2499 - DNA, 20 bp, Artificial Sequence
  Antisense compound
tactgtgtcatgtgaatcac

SEQ ID NO: 2500 - DNA, 20 bp, Artificial Sequence
  Antisense compound
gtactgtgtcatgtgaatca

SEQ ID NO: 2501 - DNA, 20 bp, Artificial Sequence
  Antisense compound
agtactgtgtcatgtgaatc

SEQ ID NO: 2502 - DNA, 20 bp, Artificial Sequence
  Antisense compound
aagtactgtgtcatgtgaat

SEQ ID NO: 2503 - DNA, 20 bp, Artificial Sequence
  Antisense compound
taagtactgtgtcatgtgaa

SEQ ID NO: 2504 - DNA, 20 bp, Artificial Sequence
  Antisense compound
gtaagtactgtgtcatgtga

SEQ ID NO: 2505 - DNA, 20 bp, Artificial Sequence
  Antisense compound
ggtaagtactgtgtcatgtg

SEQ ID NO: 2506 - DNA, 20 bp, Artificial Sequence
  Antisense compound
aggtaagtactgtgtcatgt

SEQ ID NO: 2507 - DNA, 20 bp, Artificial Sequence
  Antisense compound
gaggtaagtactgtgtcatg

SEQ ID NO: 2508 - DNA, 20 bp, Artificial Sequence
  Antisense compound
agaggtaagtactgtgtcat

SEQ ID NO: 2509 - DNA, 20 bp, Artificial Sequence
  Antisense compound
cagaggtaagtactgtgtca

SEQ ID NO: 2510 - DNA, 20 bp, Artificial Sequence
  Antisense compound
tcagaggtaagtactgtgtc

SEQ ID NO: 2511 - DNA, 20 bp, Artificial Sequence
  Antisense compound
ctcagaggtaagtactgtgt

SEQ ID NO: 2512 - DNA, 20 bp, Artificial Sequence
  Antisense compound
cctcagaggtaagtactgtg

SEQ ID NO: 2513 - DNA, 20 bp, Artificial Sequence
  Antisense compound
tcctcagaggtaagtactgt

SEQ ID NO: 2514 - DNA, 20 bp, Artificial Sequence
  Antisense compound
ctcctcagaggtaagtactg

SEQ ID NO: 2515 - DNA, 20 bp, Artificial Sequence
  Antisense compound
cctcctcagaggtaagtact

SEQ ID NO: 2516 - DNA, 20 bp, Artificial Sequence
  Antisense compound
acctcctcagaggtaagtac

SEQ ID NO: 2517 - DNA, 20 bp, Artificial Sequence
  Antisense compound
aacctcctcagaggtaagta

SEQ ID NO: 2518 - DNA, 20 bp, Artificial Sequence
  Antisense compound
caacctcctcagaggtaagt

SEQ ID NO: 2519 - DNA, 20 bp, Artificial Sequence
  Antisense compound
acaacctcctcagaggtaag

SEQ ID NO: 2520 - DNA, 20 bp, Artificial Sequence
  Antisense compound
aacaacctcctcagaggtaa

SEQ ID NO: 2521 - DNA, 20 bp, Artificial Sequence
  Antisense compound
gaacaacctcctcagaggta

SEQ ID NO: 2522 - DNA, 20 bp, Artificial Sequence
  Antisense compound
agaacaacctcctcagaggt

SEQ ID NO: 2523 - DNA, 20 bp, Artificial Sequence
  Antisense compound
gagaacaacctcctcagagg

SEQ ID NO: 2524 - DNA, 20 bp, Artificial Sequence
  Antisense compound
tgagaacaacctcctcagag

SEQ ID NO: 2525 - DNA, 20 bp, Artificial Sequence
  Antisense compound
ttgagaacaacctcctcaga

SEQ ID NO: 2526 - DNA, 20 bp, Artificial Sequence
  Antisense compound
cttgagaacaacctcctcag

SEQ ID NO: 2527 - DNA, 20 bp, Artificial Sequence
  Antisense compound
tcttgagaacaacctcctca

SEQ ID NO: 2528 - DNA, 20 bp, Artificial Sequence
  Antisense compound
ttcttgagaacaacctcctc

SEQ ID NO: 2529 - DNA, 20 bp, Artificial Sequence
  Antisense compound
gttcttgagaacaacctcct

SEQ ID NO: 2530 - DNA, 20 bp, Artificial Sequence
  Antisense compound
cgttcttgagaacaacctcc

SEQ ID NO: 2531 - DNA, 20 bp, Artificial Sequence
  Antisense compound
ccgttcttgagaacaacctc

SEQ ID NO: 2532 - DNA, 20 bp, Artificial Sequence
  Antisense compound
accgttcttgagaacaacct

SEQ ID NO: 2533 - DNA, 20 bp, Artificial Sequence
  Antisense compound
caccgttcttgagaacaacc

SEQ ID NO: 2534 - DNA, 20 bp, Artificial Sequence
  Antisense compound
tcaccgttcttgagaacaac

SEQ ID NO: 2535 - DNA, 20 bp, Artificial Sequence
  Antisense compound
ttcaccgttcttgagaacaa

SEQ ID NO: 2536 - DNA, 20 bp, Artificial Sequence
  Antisense compound
gttcaccgttcttgagaaca

SEQ ID NO: 2537 - DNA, 20 bp, Artificial Sequence
  Antisense compound
agttcaccgttcttgagaac

SEQ ID NO: 2538 - DNA, 20 bp, Artificial Sequence
  Antisense compound
gagttcaccgttcttgagaa

SEQ ID NO: 2539 - DNA, 20 bp, Artificial Sequence
  Antisense compound
cgagttcaccgttcttgaga

SEQ ID NO: 2540 - DNA, 20 bp, Artificial Sequence
  Antisense compound
tcgagttcaccgttcttgag

SEQ ID NO: 2541 - DNA, 20 bp, Artificial Sequence
  Antisense compound
ttcgagttcaccgttcttga

SEQ ID NO: 2542 - DNA, 20 bp, Artificial Sequence
  Antisense compound
cttcgagttcaccgttcttg

SEQ ID NO: 2543 - DNA, 20 bp, Artificial Sequence
  Antisense compound
gcttcgagttcaccgttctt

SEQ ID NO: 2544 - DNA, 20 bp, Artificial Sequence
  Antisense compound
tgcttcgagttcaccgttct

SEQ ID NO: 2545 - DNA, 20 bp, Artificial Sequence
  Antisense compound
gtgcttcgagttcaccgttc

SEQ ID NO: 2546 - DNA, 20 bp, Artificial Sequence
  Antisense compound
agtgcttcgagttcaccgtt

SEQ ID NO: 2547 - DNA, 20 bp, Artificial Sequence
  Antisense compound
gagtgcttcgagttcaccgt

SEQ ID NO: 2548 - DNA, 20 bp, Artificial Sequence
  Antisense compound
cgagtgcttcgagttcaccg

SEQ ID NO: 2549 - DNA, 20 bp, Artificial Sequence
  Antisense compound
tcgagtgcttcgagttcacc

SEQ ID NO: 2550 - DNA, 20 bp, Artificial Sequence
  Antisense compound
ctcgagtgcttcgagttcac

SEQ ID NO: 2551 - DNA, 20 bp, Artificial Sequence
  Antisense compound
tctcgagtgcttcgagttca

SEQ ID NO: 2552 - DNA, 20 bp, Artificial Sequence
  Antisense compound
gtctcgagtgcttcgagttc

SEQ ID NO: 2553 - DNA, 20 bp, Artificial Sequence
  Antisense compound
cgtctcgagtgcttcgagtt

SEQ ID NO: 2554 - DNA, 20 bp, Artificial Sequence
  Antisense compound
gcgtctcgagtgcttcgagt

SEQ ID NO: 2555 - DNA, 20 bp, Artificial Sequence
  Antisense compound
ggcgtctcgagtgcttcgag

SEQ ID NO: 2556 - DNA, 20 bp, Artificial Sequence
  Antisense compound
gggcgtctcgagtgcttcga

SEQ ID NO: 2557 - DNA, 20 bp, Artificial Sequence
  Antisense compound
cgggcgtctcgagtgcttcg

SEQ ID NO: 2558 - DNA, 20 bp, Artificial Sequence
  Antisense compound
acgggcgtctcgagtgcttc

SEQ ID NO: 2559 - DNA, 20 bp, Artificial Sequence
  Antisense compound
aacgggcgtctcgagtgctt

SEQ ID NO: 2560 - DNA, 20 bp, Artificial Sequence
  Antisense compound
caacgggcgtctcgagtgct

SEQ ID NO: 2561 - DNA, 20 bp, Artificial Sequence
  Antisense compound
tcaacgggcgtctcgagtgc

SEQ ID NO: 2562 - DNA, 20 bp, Artificial Sequence
  Antisense compound
atcaacgggcgtctcgagtg

SEQ ID NO: 2563 - DNA, 20 bp, Artificial Sequence
  Antisense compound
tatcaacgggcgtctcgagt

SEQ ID NO: 2564 - DNA, 20 bp, Artificial Sequence
  Antisense compound
ctatcaacgggcgtctcgag

SEQ ID NO: 2565 - DNA, 20 bp, Artificial Sequence
  Antisense compound
gctatcaacgggcgtctcga

SEQ ID NO: 2566 - DNA, 20 bp, Artificial Sequence
  Antisense compound
agctatcaacgggcgtctcg

SEQ ID NO: 2567 - DNA, 20 bp, Artificial Sequence
  Antisense compound
aagctatcaacgggcgtctc

SEQ ID NO: 2568 - DNA, 20 bp, Artificial Sequence
  Antisense compound
gaagctatcaacgggcgtct

SEQ ID NO: 2569 - DNA, 20 bp, Artificial Sequence
  Antisense compound
tgaagctatcaacgggcgtc

SEQ ID NO: 2570 - DNA, 20 bp, Artificial Sequence
  Antisense compound
gtgaagctatcaacgggcgt

SEQ ID NO: 2571 - DNA, 20 bp, Artificial Sequence
  Antisense compound
tgtgaagctatcaacgggcg

SEQ ID NO: 2572 - DNA, 20 bp, Artificial Sequence
  Antisense compound
ttgtgaagctatcaacgggc

SEQ ID NO: 2573 - DNA, 20 bp, Artificial Sequence
  Antisense compound
tttgtgaagctatcaacggg

SEQ ID NO: 2574 - DNA, 20 bp, Artificial Sequence
  Antisense compound
atttgtgaagctatcaacgg

SEQ ID NO: 2575 - DNA, 20 bp, Artificial Sequence
  Antisense compound
catttgtgaagctatcaacg

SEQ ID NO: 2576 - DNA, 20 bp, Artificial Sequence
  Antisense compound
ccatttgtgaagctatcaac

SEQ ID NO: 2577 - DNA, 20 bp, Artificial Sequence
  Antisense compound
tccatttgtgaagctatcaa

SEQ ID NO: 2578 - DNA, 20 bp, Artificial Sequence
  Antisense compound
ctccatttgtgaagctatca

SEQ ID NO: 2579 - DNA, 20 bp, Artificial Sequence
  Antisense compound
gctccatttgtgaagctatc

SEQ ID NO: 2580 - DNA, 20 bp, Artificial Sequence
  Antisense compound
agctccatttgtgaagctat

SEQ ID NO: 2581 - DNA, 20 bp, Artificial Sequence
  Antisense compound
tagctccatttgtgaagcta

SEQ ID NO: 2582 - DNA, 20 bp, Artificial Sequence
  Antisense compound
atagctccatttgtgaagct

SEQ ID NO: 2583 - DNA, 20 bp, Artificial Sequence
  Antisense compound
gatagctccatttgtgaagc

SEQ ID NO: 2584 - DNA, 20 bp, Artificial Sequence
  Antisense compound
cgatagctccatttgtgaag

SEQ ID NO: 2585 - DNA, 20 bp, Artificial Sequence
  Antisense compound
acgatagctccatttgtgaa

SEQ ID NO: 2586 - DNA, 20 bp, Artificial Sequence
  Antisense compound
gacgatagctccatttgtga

SEQ ID NO: 2587 - DNA, 20 bp, Artificial Sequence
  Antisense compound
cgacgatagctccatttgtg

SEQ ID NO: 2588 - DNA, 20 bp, Artificial Sequence
  Antisense compound
ccgacgatagctccatttgt

SEQ ID NO: 2589 - DNA, 20 bp, Artificial Sequence
  Antisense compound
gccgacgatagctccatttg

SEQ ID NO: 2590 - DNA, 20 bp, Artificial Sequence
  Antisense compound
tgccgacgatagctccattt

SEQ ID NO: 2591 - DNA, 20 bp, Artificial Sequence
  Antisense compound
gtgccgacgatagctccatt

SEQ ID NO: 2592 - DNA, 20 bp, Artificial Sequence
  Antisense compound
tgtgccgacgatagctccat

SEQ ID NO: 2593 - DNA, 20 bp, Artificial Sequence
  Antisense compound
gtgtgccgacgatagctcca

SEQ ID NO: 2594 - DNA, 20 bp, Artificial Sequence
  Antisense compound
ggtgtgccgacgatagctcc

SEQ ID NO: 2595 - DNA, 20 bp, Artificial Sequence
  Antisense compound
tggtgtgccgacgatagctc

SEQ ID NO: 2596 - DNA, 20 bp, Artificial Sequence
  Antisense compound
ctggtgtgccgacgatagct

SEQ ID NO: 2597 - DNA, 20 bp, Artificial Sequence
  Antisense compound
actggtgtgccgacgatagc

SEQ ID NO: 2598 - DNA, 20 bp, Artificial Sequence
  Antisense compound
gactggtgtgccgacgatag

SEQ ID NO: 2599 - DNA, 20 bp, Artificial Sequence
  Antisense compound
agactggtgtgccgacgata

SEQ ID NO: 2600 - DNA, 20 bp, Artificial Sequence
  Antisense compound
cagactggtgtgccgacgat

SEQ ID NO: 2601 - DNA, 20 bp, Artificial Sequence
  Antisense compound
acagactggtgtgccgacga

SEQ ID NO: 2602 - DNA, 20 bp, Artificial Sequence
  Antisense compound
cacagactggtgtgccgacg

SEQ ID NO: 2603 - DNA, 20 bp, Artificial Sequence
  Antisense compound
acacagactggtgtgccgac

SEQ ID NO: 2604 - DNA, 20 bp, Artificial Sequence
  Antisense compound
tacacagactggtgtgccga

SEQ ID NO: 2605 - DNA, 20 bp, Artificial Sequence
  Antisense compound
ttacacagactggtgtgccg

SEQ ID NO: 2606 - DNA, 20 bp, Artificial Sequence
  Antisense compound
tttacacagactggtgtgcc

SEQ ID NO: 2607 - DNA, 20 bp, Artificial Sequence
  Antisense compound
atttacacagactggtgtgc

SEQ ID NO: 2608 - DNA, 20 bp, Artificial Sequence
  Antisense compound
catttacacagactggtgtg

SEQ ID NO: 2609 - DNA, 20 bp, Artificial Sequence
  Antisense compound
ccatttacacagactggtgt

SEQ ID NO: 2610 - DNA, 20 bp, Artificial Sequence
  Antisense compound
gccatttacacagactggtg

SEQ ID NO: 2611 - DNA, 20 bp, Artificial Sequence
  Antisense compound
ggccatttacacagactggt

SEQ ID NO: 2612 - DNA, 20 bp, Artificial Sequence
  Antisense compound
aggccatttacacagactgg

SEQ ID NO: 2613 - DNA, 20 bp, Artificial Sequence
  Antisense compound
gaggccatttacacagactg

SEQ ID NO: 2614 - DNA, 20 bp, Artificial Sequence
  Antisense compound
tgaggccatttacacagact

SEQ ID NO: 2615 - DNA, 20 bp, Artificial Sequence
  Antisense compound
atgaggccatttacacagac

SEQ ID NO: 2616 - DNA, 20 bp, Artificial Sequence
  Antisense compound
catgaggccatttacacaga

SEQ ID NO: 2617 - DNA, 20 bp, Artificial Sequence
  Antisense compound
gcatgaggccatttacacag

SEQ ID NO: 2618 - DNA, 20 bp, Artificial Sequence
  Antisense compound
agcatgaggccatttacaca

SEQ ID NO: 2619 - DNA, 20 bp, Artificial Sequence
  Antisense compound
gagcatgaggccatttacac

SEQ ID NO: 2620 - DNA, 20 bp, Artificial Sequence
  Antisense compound
agagcatgaggccatttaca

SEQ ID NO: 2621 - DNA, 20 bp, Artificial Sequence
  Antisense compound
aagagcatgaggccatttac

SEQ ID NO: 2622 - DNA, 20 bp, Artificial Sequence
  Antisense compound
taagagcatgaggccattta

SEQ ID NO: 2623 - DNA, 20 bp, Artificial Sequence
  Antisense compound
ctaagagcatgaggccattt

SEQ ID NO: 2624 - DNA, 20 bp, Artificial Sequence
  Antisense compound
tctaagagcatgaggccatt

SEQ ID NO: 2625 - DNA, 20 bp, Artificial Sequence
  Antisense compound
ctctaagagcatgaggccat

SEQ ID NO: 2626 - DNA, 20 bp, Artificial Sequence
  Antisense compound
tctctaagagcatgaggcca

SEQ ID NO: 2627 - DNA, 20 bp, Artificial Sequence
  Antisense compound
atctctaagagcatgaggcc

SEQ ID NO: 2628 - DNA, 20 bp, Artificial Sequence
  Antisense compound
aatctctaagagcatgaggc

SEQ ID NO: 2629 - DNA, 20 bp, Artificial Sequence
  Antisense compound
taatctctaagagcatgagg

SEQ ID NO: 2630 - DNA, 20 bp, Artificial Sequence
  Antisense compound
ttaatctctaagagcatgag

SEQ ID NO: 2631 - DNA, 20 bp, Artificial Sequence
  Antisense compound
cttaatctctaagagcatga

SEQ ID NO: 2632 - DNA, 20 bp, Artificial Sequence
  Antisense compound
ccttaatctctaagagcatg

SEQ ID NO: 2633 - DNA, 20 bp, Artificial Sequence
  Antisense compound
tccttaatctctaagagcat

SEQ ID NO: 2634 - DNA, 20 bp, Artificial Sequence
  Antisense compound
gtccttaatctctaagagca

SEQ ID NO: 2635 - DNA, 20 bp, Artificial Sequence
  Antisense compound
tgtccttaatctctaagagc

SEQ ID NO: 2636 - DNA, 20 bp, Artificial Sequence
  Antisense compound
ttgtccttaatctctaagag

SEQ ID NO: 2637 - DNA, 20 bp, Artificial Sequence
  Antisense compound
tttgtccttaatctctaaga

SEQ ID NO: 2638 - DNA, 20 bp, Artificial Sequence
  Antisense compound
ctttgtccttaatctctaag

SEQ ID NO: 2639 - DNA, 20 bp, Artificial Sequence
  Antisense compound
tctttgtccttaatctctaa

SEQ ID NO: 2640 - DNA, 20 bp, Artificial Sequence
  Antisense compound
ttctttgtccttaatctcta

SEQ ID NO: 2641 - DNA, 20 bp, Artificial Sequence
  Antisense compound
gttctttgtccttaatctct

SEQ ID NO: 2642 - DNA, 20 bp, Artificial Sequence
  Antisense compound
tgttctttgtccttaatctc

SEQ ID NO: 2643 - DNA, 20 bp, Artificial Sequence
  Antisense compound
ttgttctttgtccttaatct

SEQ ID NO: 2644 - DNA, 20 bp, Artificial Sequence
  Antisense compound
attgttctttgtccttaatc

SEQ ID NO: 2645 - DNA, 20 bp, Artificial Sequence
  Antisense compound
tattgttctttgtccttaat

SEQ ID NO: 2646 - DNA, 20 bp, Artificial Sequence
  Antisense compound
gtattgttctttgtccttaa

SEQ ID NO: 2647 - DNA, 20 bp, Artificial Sequence
  Antisense compound
agtattgttctttgtcctta

SEQ ID NO: 2648 - DNA, 20 bp, Artificial Sequence
  Antisense compound
cagtattgttctttgtcctt

SEQ ID NO: 2649 - DNA, 20 bp, Artificial Sequence
  Antisense compound
gcagtattgttctttgtcct

SEQ ID NO: 2650 - DNA, 20 bp, Artificial Sequence
  Antisense compound
cgcagtattgttctttgtcc

SEQ ID NO: 2651 - DNA, 20 bp, Artificial Sequence
  Antisense compound
gcgcagtattgttctttgtc

SEQ ID NO: 2652 - DNA, 20 bp, Artificial Sequence
  Antisense compound
tgcgcagtattgttctttgt

SEQ ID NO: 2653 - DNA, 20 bp, Artificial Sequence
  Antisense compound
atgcgcagtattgttctttg

SEQ ID NO: 2654 - DNA, 20 bp, Artificial Sequence
  Antisense compound
aatgcgcagtattgttcttt

SEQ ID NO: 2655 - DNA, 20 bp, Artificial Sequence
  Antisense compound
caatgcgcagtattgttctt

SEQ ID NO: 2656 - DNA, 20 bp, Artificial Sequence
  Antisense compound
acaatgcgcagtattgttct

SEQ ID NO: 2657 - DNA, 20 bp, Artificial Sequence
  Antisense compound
gacaatgcgcagtattgttc

SEQ ID NO: 2658 - DNA, 20 bp, Artificial Sequence
  Antisense compound
agacaatgcgcagtattgtt

SEQ ID NO: 2659 - DNA, 20 bp, Artificial Sequence
  Antisense compound
gagacaatgcgcagtattgt

SEQ ID NO: 2660 - DNA, 20 bp, Artificial Sequence
  Antisense compound
ggagacaatgcgcagtattg

SEQ ID NO: 2661 - DNA, 20 bp, Artificial Sequence
  Antisense compound
aggagacaatgcgcagtatt

SEQ ID NO: 2662 - DNA, 20 bp, Artificial Sequence
  Antisense compound
caggagacaatgcgcagtat

SEQ ID NO: 2663 - DNA, 20 bp, Artificial Sequence
  Antisense compound
ccaggagacaatgcgcagta

SEQ ID NO: 2664 - DNA, 20 bp, Artificial Sequence
  Antisense compound
accaggagacaatgcgcagt

SEQ ID NO: 2665 - DNA, 20 bp, Artificial Sequence
  Antisense compound
aaccaggagacaatgcgcag

SEQ ID NO: 2666 - DNA, 20 bp, Artificial Sequence
  Antisense compound
aaaccaggagacaatgcgca

SEQ ID NO: 2667 - DNA, 20 bp, Artificial Sequence
  Antisense compound
taaaccaggagacaatgcgc

SEQ ID NO: 2668 - DNA, 20 bp, Artificial Sequence
  Antisense compound
gtaaaccaggagacaatgcg

SEQ ID NO: 2669 - DNA, 20 bp, Artificial Sequence
  Antisense compound
agtaaaccaggagacaatgc

SEQ ID NO: 2670 - DNA, 20 bp, Artificial Sequence
  Antisense compound
cagtaaaccaggagacaatg

SEQ ID NO: 2671 - DNA, 20 bp, Artificial Sequence
  Antisense compound
ccagtaaaccaggagacaat

SEQ ID NO: 2672 - DNA, 20 bp, Artificial Sequence
  Antisense compound
gccagtaaaccaggagacaa

SEQ ID NO: 2673 - DNA, 20 bp, Artificial Sequence
  Antisense compound
agccagtaaaccaggagaca

SEQ ID NO: 2674 - DNA, 20 bp, Artificial Sequence
  Antisense compound
tagccagtaaaccaggagac

SEQ ID NO: 2675 - DNA, 20 bp, Artificial Sequence
  Antisense compound
gtagccagtaaaccaggaga

SEQ ID NO: 2676 - DNA, 20 bp, Artificial Sequence
  Antisense compound
tgtagccagtaaaccaggag

SEQ ID NO: 2677 - DNA, 20 bp, Artificial Sequence
  Antisense compound
ttgtagccagtaaaccagga

SEQ ID NO: 2678 - DNA, 20 bp, Artificial Sequence
  Antisense compound
tttgtagccagtaaaccagg

SEQ ID NO: 2679 - DNA, 20 bp, Artificial Sequence
  Antisense compound
gtttgtagccagtaaaccag

SEQ ID NO: 2680 - DNA, 20 bp, Artificial Sequence
  Antisense compound
tgtttgtagccagtaaacca

SEQ ID NO: 2681 - DNA, 20 bp, Artificial Sequence
  Antisense compound
ttgtttgtagccagtaaacc

SEQ ID NO: 2682 - DNA, 20 bp, Artificial Sequence
  Antisense compound
attgtttgtagccagtaaac

SEQ ID NO: 2683 - DNA, 20 bp, Artificial Sequence
  Antisense compound
cattgtttgtagccagtaaa

SEQ ID NO: 2684 - DNA, 20 bp, Artificial Sequence
  Antisense compound
acattgtttgtagccagtaa

SEQ ID NO: 2685 - DNA, 20 bp, Artificial Sequence
  Antisense compound
gacattgtttgtagccagta

SEQ ID NO: 2686 - DNA, 20 bp, Artificial Sequence
  Antisense compound
agacattgtttgtagccagt

SEQ ID NO: 2687 - DNA, 20 bp, Artificial Sequence
  Antisense compound
aagacattgtttgtagccag

SEQ ID NO: 2688 - DNA, 20 bp, Artificial Sequence
  Antisense compound
aaagacattgtttgtagcca

SEQ ID NO: 2689 - DNA, 20 bp, Artificial Sequence
  Antisense compound
gaaagacattgtttgtagcc

SEQ ID NO: 2690 - DNA, 20 bp, Artificial Sequence
  Antisense compound
cgaaagacattgtttgtagc

SEQ ID NO: 2691 - DNA, 20 bp, Artificial Sequence
  Antisense compound
gcgaaagacattgtttgtag

SEQ ID NO: 2692 - DNA, 20 bp, Artificial Sequence
  Antisense compound
agcgaaagacattgtttgta

SEQ ID NO: 2693 - DNA, 20 bp, Artificial Sequence
  Antisense compound
aagcgaaagacattgtttgt

SEQ ID NO: 2694 - DNA, 20 bp, Artificial Sequence
  Antisense compound
taagcgaaagacattgtttg

SEQ ID NO: 2695 - DNA, 20 bp, Artificial Sequence
  Antisense compound
ttaagcgaaagacattgttt

SEQ ID NO: 2696 - DNA, 20 bp, Artificial Sequence
  Antisense compound
tttaagcgaaagacattgtt

SEQ ID NO: 2697 - DNA, 20 bp, Artificial Sequence
  Antisense compound
ttttaagcgaaagacattgt

SEQ ID NO: 2698 - DNA, 20 bp, Artificial Sequence
  Antisense compound
cttttaagcgaaagacattg

SEQ ID NO: 2699 - DNA, 20 bp, Artificial Sequence
  Antisense compound
ccttttaagcgaaagacatt

SEQ ID NO: 2700 - DNA, 20 bp, Artificial Sequence
  Antisense compound
cccttttaagcgaaagacat

SEQ ID NO: 2701 - DNA, 20 bp, Artificial Sequence
  Antisense compound
ccccttttaagcgaaagaca

SEQ ID NO: 2702 - DNA, 20 bp, Artificial Sequence
  Antisense compound
cccccttttaagcgaaagac

SEQ ID NO: 2703 - DNA, 20 bp, Artificial Sequence
  Antisense compound
acccccttttaagcgaaaga

SEQ ID NO: 2704 - DNA, 20 bp, Artificial Sequence
  Antisense compound
cacccccttttaagcgaaag

SEQ ID NO: 2705 - DNA, 20 bp, Artificial Sequence
  Antisense compound
gcacccccttttaagcgaaa

SEQ ID NO: 2706 - DNA, 20 bp, Artificial Sequence
  Antisense compound
tgcacccccttttaagcgaa

SEQ ID NO: 2707 - DNA, 20 bp, Artificial Sequence
  Antisense compound
gtgcacccccttttaagcga

SEQ ID NO: 2708 - DNA, 20 bp, Artificial Sequence
  Antisense compound
ggtgcacccccttttaagcg

SEQ ID NO: 2709 - DNA, 20 bp, Artificial Sequence
  Antisense compound
tggtgcacccccttttaagc

SEQ ID NO: 2710 - DNA, 20 bp, Artificial Sequence
  Antisense compound
ttggtgcacccccttttaag

SEQ ID NO: 2711 - DNA, 20 bp, Artificial Sequence
  Antisense compound
attggtgcacccccttttaa

SEQ ID NO: 2712 - DNA, 20 bp, Artificial Sequence
  Antisense compound
aattggtgcaccccctttta

SEQ ID NO: 2713 - DNA, 20 bp, Artificial Sequence
  Antisense compound
taattggtgcaccccctttt

SEQ ID NO: 2714 - DNA, 20 bp, Artificial Sequence
  Antisense compound
ttaattggtgcacccccttt

SEQ ID NO: 2715 - DNA, 20 bp, Artificial Sequence
  Antisense compound
tttaattggtgcaccccctt

SEQ ID NO: 2716 - DNA, 20 bp, Artificial Sequence
  Antisense compound
ctttaattggtgcaccccct

SEQ ID NO: 2717 - DNA, 20 bp, Artificial Sequence
  Antisense compound
cctttaattggtgcaccccc

SEQ ID NO: 2718 - DNA, 20 bp, Artificial Sequence
  Antisense compound
acctttaattggtgcacccc

SEQ ID NO: 2719 - DNA, 20 bp, Artificial Sequence
  Antisense compound
cacctttaattggtgcaccc

SEQ ID NO: 2720 - DNA, 20 bp, Artificial Sequence
  Antisense compound
acacctttaattggtgcacc

SEQ ID NO: 2721 - DNA, 20 bp, Artificial Sequence
  Antisense compound
tacacctttaattggtgcac

SEQ ID NO: 2722 - DNA, 20 bp, Artificial Sequence
  Antisense compound
ttacacctttaattggtgca

SEQ ID NO: 2723 - DNA, 20 bp, Artificial Sequence
  Antisense compound
gttacacctttaattggtgc

SEQ ID NO: 2724 - DNA, 20 bp, Artificial Sequence
  Antisense compound
ggttacacctttaattggtg

SEQ ID NO: 2725 - DNA, 20 bp, Artificial Sequence
  Antisense compound
aggttacacctttaattggt

SEQ ID NO: 2726 - DNA, 20 bp, Artificial Sequence
  Antisense compound
aaggttacacctttaattgg

SEQ ID NO: 2727 - DNA, 20 bp, Artificial Sequence
  Antisense compound
aaaggttacacctttaattg

SEQ ID NO: 2728 - DNA, 20 bp, Artificial Sequence
  Antisense compound
caaaggttacacctttaatt

SEQ ID NO: 2729 - DNA, 20 bp, Artificial Sequence
  Antisense compound
ccaaaggttacacctttaat

SEQ ID NO: 2730 - DNA, 20 bp, Artificial Sequence
  Antisense compound
tccaaaggttacacctttaa

SEQ ID NO: 2731 - DNA, 20 bp, Artificial Sequence
  Antisense compound
ctccaaaggttacaccttta

SEQ ID NO: 2732 - DNA, 20 bp, Artificial Sequence
  Antisense compound
tctccaaaggttacaccttt

SEQ ID NO: 2733 - DNA, 20 bp, Artificial Sequence
  Antisense compound
ttctccaaaggttacacctt

SEQ ID NO: 2734 - DNA, 20 bp, Artificial Sequence
  Antisense compound
cttctccaaaggttacacct

SEQ ID NO: 2735 - DNA, 20 bp, Artificial Sequence
  Antisense compound
tcttctccaaaggttacacc

SEQ ID NO: 2736 - DNA, 20 bp, Artificial Sequence
  Antisense compound
atcttctccaaaggttacac

SEQ ID NO: 2737 - DNA, 20 bp, Artificial Sequence
  Antisense compound
tatcttctccaaaggttaca

SEQ ID NO: 2738 - DNA, 20 bp, Artificial Sequence
  Antisense compound
gtatcttctccaaaggttac

SEQ ID NO: 2739 - DNA, 20 bp, Artificial Sequence
  Antisense compound
agtatcttctccaaaggtta

SEQ ID NO: 2740 - DNA, 20 bp, Artificial Sequence
  Antisense compound
cagtatcttctccaaaggtt

SEQ ID NO: 2741 - DNA, 20 bp, Artificial Sequence
  Antisense compound
acagtatcttctccaaaggt

SEQ ID NO: 2742 - DNA, 20 bp, Artificial Sequence
  Antisense compound
aacagtatcttctccaaagg

SEQ ID NO: 2743 - DNA, 20 bp, Artificial Sequence
  Antisense compound
aaacagtatcttctccaaag

SEQ ID NO: 2744 - DNA, 20 bp, Artificial Sequence
  Antisense compound
caaacagtatcttctccaaa

SEQ ID NO: 2745 - DNA, 20 bp, Artificial Sequence
  Antisense compound
ccaaacagtatcttctccaa

SEQ ID NO: 2746 - DNA, 20 bp, Artificial Sequence
  Antisense compound
cccaaacagtatcttctcca

SEQ ID NO: 2747 - DNA, 20 bp, Artificial Sequence
  Antisense compound
tcccaaacagtatcttctcc

SEQ ID NO: 2748 - DNA, 20 bp, Artificial Sequence
  Antisense compound
ttcccaaacagtatcttctc

SEQ ID NO: 2749 - DNA, 20 bp, Artificial Sequence
  Antisense compound
cttcccaaacagtatcttct

SEQ ID NO: 2750 - DNA, 20 bp, Artificial Sequence
  Antisense compound
acttcccaaacagtatcttc

SEQ ID NO: 2751 - DNA, 20 bp, Artificial Sequence
  Antisense compound
aacttcccaaacagtatctt

SEQ ID NO: 2752 - DNA, 20 bp, Artificial Sequence
  Antisense compound
gaacttcccaaacagtatct

SEQ ID NO: 2753 - DNA, 20 bp, Artificial Sequence
  Antisense compound
tgaacttcccaaacagtatc

SEQ ID NO: 2754 - DNA, 20 bp, Artificial Sequence
  Antisense compound
ttgaacttcccaaacagtat

SEQ ID NO: 2755 - DNA, 20 bp, Artificial Sequence
  Antisense compound
cttgaacttcccaaacagta

SEQ ID NO: 2756 - DNA, 20 bp, Artificial Sequence
  Antisense compound
ccttgaacttcccaaacagt

SEQ ID NO: 2757 - DNA, 20 bp, Artificial Sequence
  Antisense compound
accttgaacttcccaaacag

SEQ ID NO: 2758 - DNA, 20 bp, Artificial Sequence
  Antisense compound
aaccttgaacttcccaaaca

SEQ ID NO: 2759 - DNA, 20 bp, Artificial Sequence
  Antisense compound
taaccttgaacttcccaaac

SEQ ID NO: 2760 - DNA, 20 bp, Artificial Sequence
  Antisense compound
gtaaccttgaacttcccaaa

SEQ ID NO: 2761 - DNA, 20 bp, Artificial Sequence
  Antisense compound
tgtaaccttgaacttcccaa

SEQ ID NO: 2762 - DNA, 20 bp, Artificial Sequence
  Antisense compound
ttgtaaccttgaacttccca

SEQ ID NO: 2763 - DNA, 20 bp, Artificial Sequence
  Antisense compound
cttgtaaccttgaacttccc

SEQ ID NO: 2764 - DNA, 20 bp, Artificial Sequence
  Antisense compound
tcttgtaaccttgaacttcc

SEQ ID NO: 2765 - DNA, 20 bp, Artificial Sequence
  Antisense compound
ttcttgtaaccttgaacttc

SEQ ID NO: 2766 - DNA, 20 bp, Artificial Sequence
  Antisense compound
attcttgtaaccttgaactt

SEQ ID NO: 2767 - DNA, 20 bp, Artificial Sequence
  Antisense compound
cattcttgtaaccttgaact

SEQ ID NO: 2768 - DNA, 20 bp, Artificial Sequence
  Antisense compound
acattcttgtaaccttgaac

SEQ ID NO: 2769 - DNA, 20 bp, Artificial Sequence
  Antisense compound
cacattcttgtaaccttgaa

SEQ ID NO: 2770 - DNA, 20 bp, Artificial Sequence
  Antisense compound
tcacattcttgtaaccttga

SEQ ID NO: 2771 - DNA, 20 bp, Artificial Sequence
  Antisense compound
ctcacattcttgtaaccttg

SEQ ID NO: 2772 - DNA, 20 bp, Artificial Sequence
  Antisense compound
tctcacattcttgtaacctt

SEQ ID NO: 2773 - DNA, 20 bp, Artificial Sequence
  Antisense compound
ttctcacattcttgtaacct

SEQ ID NO: 2774 - DNA, 20 bp, Artificial Sequence
  Antisense compound
attctcacattcttgtaacc

SEQ ID NO: 2775 - DNA, 20 bp, Artificial Sequence
  Antisense compound
gattctcacattcttgtaac

SEQ ID NO: 2776 - DNA, 20 bp, Artificial Sequence
  Antisense compound
tgattctcacattcttgtaa

SEQ ID NO: 2777 - DNA, 20 bp, Artificial Sequence
  Antisense compound
gtgattctcacattcttgta

SEQ ID NO: 2778 - DNA, 20 bp, Artificial Sequence
  Antisense compound
tgtgattctcacattcttgt

SEQ ID NO: 2779 - DNA, 20 bp, Artificial Sequence
  Antisense compound
atgtgattctcacattcttg

SEQ ID NO: 2780 - DNA, 20 bp, Artificial Sequence
  Antisense compound
aatgtgattctcacattctt

SEQ ID NO: 2781 - DNA, 20 bp, Artificial Sequence
  Antisense compound
aaatgtgattctcacattct

SEQ ID NO: 2782 - DNA, 20 bp, Artificial Sequence
  Antisense compound
caaatgtgattctcacattc

SEQ ID NO: 2783 - DNA, 20 bp, Artificial Sequence
  Antisense compound
tcaaatgtgattctcacatt

SEQ ID NO: 2784 - DNA, 20 bp, Artificial Sequence
  Antisense compound
ctcaaatgtgattctcacat

SEQ ID NO: 2785 - DNA, 20 bp, Artificial Sequence
  Antisense compound
gctcaaatgtgattctcaca

SEQ ID NO: 2786 - DNA, 20 bp, Artificial Sequence
  Antisense compound
agctcaaatgtgattctcac

SEQ ID NO: 2787 - DNA, 20 bp, Artificial Sequence
  Antisense compound
aagctcaaatgtgattctca

SEQ ID NO: 2788 - DNA, 20 bp, Artificial Sequence
  Antisense compound
caagctcaaatgtgattctc

SEQ ID NO: 2789 - DNA, 20 bp, Artificial Sequence
  Antisense compound
tcaagctcaaatgtgattct

SEQ ID NO: 2790 - DNA, 20 bp, Artificial Sequence
  Antisense compound
atcaagctcaaatgtgattc

SEQ ID NO: 2791 - DNA, 20 bp, Artificial Sequence
  Antisense compound
catcaagctcaaatgtgatt

SEQ ID NO: 2792 - DNA, 20 bp, Artificial Sequence
  Antisense compound
tcatcaagctcaaatgtgat

SEQ ID NO: 2793 - DNA, 20 bp, Artificial Sequence
  Antisense compound
ttcatcaagctcaaatgtga

SEQ ID NO: 2794 - DNA, 20 bp, Artificial Sequence
  Antisense compound
gttcatcaagctcaaatgtg

SEQ ID NO: 2795 - DNA, 20 bp, Artificial Sequence
  Antisense compound
cgttcatcaagctcaaatgt

SEQ ID NO: 2796 - DNA, 20 bp, Artificial Sequence
  Antisense compound
acgttcatcaagctcaaatg

SEQ ID NO: 2797 - DNA, 20 bp, Artificial Sequence
  Antisense compound
cacgttcatcaagctcaaat

SEQ ID NO: 2798 - DNA, 20 bp, Artificial Sequence
  Antisense compound
acacgttcatcaagctcaaa

SEQ ID NO: 2799 - DNA, 20 bp, Artificial Sequence
  Antisense compound
aacacgttcatcaagctcaa

SEQ ID NO: 2800 - DNA, 20 bp, Artificial Sequence
  Antisense compound
caacacgttcatcaagctca

SEQ ID NO: 2801 - DNA, 20 bp, Artificial Sequence
  Antisense compound
tcaacacgttcatcaagctc

SEQ ID NO: 2802 - DNA, 20 bp, Artificial Sequence
  Antisense compound
gtcaacacgttcatcaagct

SEQ ID NO: 2803 - DNA, 20 bp, Artificial Sequence
  Antisense compound
tgtcaacacgttcatcaagc

SEQ ID NO: 2804 - DNA, 20 bp, Artificial Sequence
  Antisense compound
ttgtcaacacgttcatcaag

SEQ ID NO: 2805 - DNA, 20 bp, Artificial Sequence
  Antisense compound
tttgtcaacacgttcatcaa

SEQ ID NO: 2806 - DNA, 20 bp, Artificial Sequence
  Antisense compound
ctttgtcaacacgttcatca

SEQ ID NO: 2807 - DNA, 20 bp, Artificial Sequence
  Antisense compound
actttgtcaacacgttcatc

SEQ ID NO: 2808 - DNA, 20 bp, Artificial Sequence
  Antisense compound
cactttgtcaacacgttcat

SEQ ID NO: 2809 - DNA, 20 bp, Artificial Sequence
  Antisense compound
gcactttgtcaacacgttca

SEQ ID NO: 2810 - DNA, 20 bp, Artificial Sequence
  Antisense compound
agcactttgtcaacacgttc

SEQ ID NO: 2811 - DNA, 20 bp, Artificial Sequence
  Antisense compound
aagcactttgtcaacacgtt

SEQ ID NO: 2812 - DNA, 20 bp, Artificial Sequence
  Antisense compound
taagcactttgtcaacacgt

SEQ ID NO: 2813 - DNA, 20 bp, Artificial Sequence
  Antisense compound
ttaagcactttgtcaacacg

SEQ ID NO: 2814 - DNA, 20 bp, Artificial Sequence
  Antisense compound
attaagcactttgtcaacac

SEQ ID NO: 2815 - DNA, 20 bp, Artificial Sequence
  Antisense compound
cattaagcactttgtcaaca

SEQ ID NO: 2816 - DNA, 20 bp, Artificial Sequence
  Antisense compound
tcattaagcactttgtcaac

SEQ ID NO: 2817 - DNA, 20 bp, Artificial Sequence
  Antisense compound
ttcattaagcactttgtcaa

SEQ ID NO: 2818 - DNA, 20 bp, Artificial Sequence
  Antisense compound
tttcattaagcactttgtca

SEQ ID NO: 2819 - DNA, 20 bp, Artificial Sequence
  Antisense compound
ttttcattaagcactttgtc

SEQ ID NO: 2820 - DNA, 20 bp, Artificial Sequence
  Antisense compound
cttttcattaagcactttgt

SEQ ID NO: 2821 - DNA, 20 bp, Artificial Sequence
  Antisense compound
acttttcattaagcactttg

SEQ ID NO: 2822 - DNA, 20 bp, Artificial Sequence
  Antisense compound
cacttttcattaagcacttt

SEQ ID NO: 2823 - DNA, 20 bp, Artificial Sequence
  Antisense compound
gcacttttcattaagcactt

SEQ ID NO: 2824 - DNA, 20 bp, Artificial Sequence
  Antisense compound
agcacttttcattaagcact

SEQ ID NO: 2825 - DNA, 20 bp, Artificial Sequence
  Antisense compound
gagcacttttcattaagcac

SEQ ID NO: 2826 - DNA, 20 bp, Artificial Sequence
  Antisense compound
agagcacttttcattaagca

SEQ ID NO: 2827 - DNA, 20 bp, Artificial Sequence
  Antisense compound
cagagcacttttcattaagc

SEQ ID NO: 2828 - DNA, 20 bp, Artificial Sequence
  Antisense compound
acagagcacttttcattaag

SEQ ID NO: 2829 - DNA, 20 bp, Artificial Sequence
  Antisense compound
gacagagcacttttcattaa

SEQ ID NO: 2830 - DNA, 20 bp, Artificial Sequence
  Antisense compound
agacagagcacttttcatta

SEQ ID NO: 2831 - DNA, 20 bp, Artificial Sequence
  Antisense compound
tagacagagcacttttcatt

SEQ ID NO: 2832 - DNA, 20 bp, Artificial Sequence
  Antisense compound
gtagacagagcacttttcat

SEQ ID NO: 2833 - DNA, 20 bp, Artificial Sequence
  Antisense compound
tgtagacagagcacttttca

SEQ ID NO: 2834 - DNA, 20 bp, Artificial Sequence
  Antisense compound
gtgtagacagagcacttttc

SEQ ID NO: 2835 - DNA, 20 bp, Artificial Sequence
  Antisense compound
agtgtagacagagcactttt

SEQ ID NO: 2836 - DNA, 20 bp, Artificial Sequence
  Antisense compound
cagtgtagacagagcacttt

SEQ ID NO: 2837 - DNA, 20 bp, Artificial Sequence
  Antisense compound
acagtgtagacagagcactt

SEQ ID NO: 2838 - DNA, 20 bp, Artificial Sequence
  Antisense compound
aacagtgtagacagagcact

SEQ ID NO: 2839 - DNA, 20 bp, Artificial Sequence
  Antisense compound
caacagtgtagacagagcac

SEQ ID NO: 2840 - DNA, 20 bp, Artificial Sequence
  Antisense compound
tcaacagtgtagacagagca

SEQ ID NO: 2841 - DNA, 20 bp, Artificial Sequence
  Antisense compound
ttcaacagtgtagacagagc

SEQ ID NO: 2842 - DNA, 20 bp, Artificial Sequence
  Antisense compound
attcaacagtgtagacagag

SEQ ID NO: 2843 - DNA, 20 bp, Artificial Sequence
  Antisense compound
gattcaacagtgtagacaga

SEQ ID NO: 2844 - DNA, 20 bp, Artificial Sequence
  Antisense compound
ggattcaacagtgtagacag

SEQ ID NO: 2845 - DNA, 20 bp, Artificial Sequence
  Antisense compound
cggattcaacagtgtagaca

SEQ ID NO: 2846 - DNA, 20 bp, Artificial Sequence
  Antisense compound
ccggattcaacagtgtagac

SEQ ID NO: 2847 - DNA, 20 bp, Artificial Sequence
  Antisense compound
accggattcaacagtgtaga

SEQ ID NO: 2848 - DNA, 20 bp, Artificial Sequence
  Antisense compound
taccggattcaacagtgtag

SEQ ID NO: 2849 - DNA, 20 bp, Artificial Sequence
  Antisense compound
gtaccggattcaacagtgta

SEQ ID NO: 2850 - DNA, 20 bp, Artificial Sequence
  Antisense compound
ggtaccggattcaacagtgt

SEQ ID NO: 2851 - DNA, 20 bp, Artificial Sequence
  Antisense compound
cggtaccggattcaacagtg

SEQ ID NO: 2852 - DNA, 20 bp, Artificial Sequence
  Antisense compound
tcggtaccggattcaacagt

SEQ ID NO: 2853 - DNA, 20 bp, Artificial Sequence
  Antisense compound
ttcggtaccggattcaacag

SEQ ID NO: 2854 - DNA, 20 bp, Artificial Sequence
  Antisense compound
cttcggtaccggattcaaca

SEQ ID NO: 2855 - DNA, 20 bp, Artificial Sequence
  Antisense compound
acttcggtaccggattcaac

SEQ ID NO: 2856 - DNA, 20 bp, Artificial Sequence
  Antisense compound
aacttcggtaccggattcaa

SEQ ID NO: 2857 - DNA, 20 bp, Artificial Sequence
  Antisense compound
taacttcggtaccggattca

SEQ ID NO: 2858 - DNA, 20 bp, Artificial Sequence
  Antisense compound
gtaacttcggtaccggattc

SEQ ID NO: 2859 - DNA, 20 bp, Artificial Sequence
  Antisense compound
agtaacttcggtaccggatt

SEQ ID NO: 2860 - DNA, 20 bp, Artificial Sequence
  Antisense compound
cagtaacttcggtaccggat

SEQ ID NO: 2861 - DNA, 20 bp, Artificial Sequence
  Antisense compound
tcagtaacttcggtaccgga

SEQ ID NO: 2862 - DNA, 20 bp, Artificial Sequence
  Antisense compound
ctcagtaacttcggtaccgg

SEQ ID NO: 2863 - DNA, 20 bp, Artificial Sequence
  Antisense compound
actcagtaacttcggtaccg

SEQ ID NO: 2864 - DNA, 20 bp, Artificial Sequence
  Antisense compound
aactcagtaacttcggtacc

SEQ ID NO: 2865 - DNA, 20 bp, Artificial Sequence
  Antisense compound
aaactcagtaacttcggtac

SEQ ID NO: 2866 - DNA, 20 bp, Artificial Sequence
  Antisense compound
caaactcagtaacttcggta

SEQ ID NO: 2867 - DNA, 20 bp, Artificial Sequence
  Antisense compound
gcaaactcagtaacttcggt

SEQ ID NO: 2868 - DNA, 20 bp, Artificial Sequence
  Antisense compound
tgcaaactcagtaacttcgg

SEQ ID NO: 2869 - DNA, 20 bp, Artificial Sequence
  Antisense compound
atgcaaactcagtaacttcg

SEQ ID NO: 2870 - DNA, 20 bp, Artificial Sequence
  Antisense compound
catgcaaactcagtaacttc

SEQ ID NO: 2871 - DNA, 20 bp, Artificial Sequence
  Antisense compound
acatgcaaactcagtaactt

SEQ ID NO: 2872 - DNA, 20 bp, Artificial Sequence
  Antisense compound
cacatgcaaactcagtaact

SEQ ID NO: 2873 - DNA, 20 bp, Artificial Sequence
  Antisense compound
acacatgcaaactcagtaac

SEQ ID NO: 2874 - DNA, 20 bp, Artificial Sequence
  Antisense compound
aacacatgcaaactcagtaa

SEQ ID NO: 2875 - DNA, 20 bp, Artificial Sequence
  Antisense compound
caacacatgcaaactcagta

SEQ ID NO: 2876 - DNA, 20 bp, Artificial Sequence
  Antisense compound
acaacacatgcaaactcagt

SEQ ID NO: 2877 - DNA, 20 bp, Artificial Sequence
  Antisense compound
tacaacacatgcaaactcag

SEQ ID NO: 2878 - DNA, 20 bp, Artificial Sequence
  Antisense compound
ctacaacacatgcaaactca

SEQ ID NO: 2879 - DNA, 20 bp, Artificial Sequence
  Antisense compound
gctacaacacatgcaaactc

SEQ ID NO: 2880 - DNA, 20 bp, Artificial Sequence
  Antisense compound
tgctacaacacatgcaaact

SEQ ID NO: 2881 - DNA, 20 bp, Artificial Sequence
  Antisense compound
ctgctacaacacatgcaaac

SEQ ID NO: 2882 - DNA, 20 bp, Artificial Sequence
  Antisense compound
tctgctacaacacatgcaaa

SEQ ID NO: 2883 - DNA, 20 bp, Artificial Sequence
  Antisense compound
ctctgctacaacacatgcaa

SEQ ID NO: 2884 - DNA, 20 bp, Artificial Sequence
  Antisense compound
cctctgctacaacacatgca

SEQ ID NO: 2885 - DNA, 20 bp, Artificial Sequence
  Antisense compound
gcctctgctacaacacatgc

SEQ ID NO: 2886 - DNA, 20 bp, Artificial Sequence
  Antisense compound
agcctctgctacaacacatg

SEQ ID NO: 2887 - DNA, 20 bp, Artificial Sequence
  Antisense compound
cagcctctgctacaacacat

SEQ ID NO: 2888 - DNA, 20 bp, Artificial Sequence
  Antisense compound
acagcctctgctacaacaca

SEQ ID NO: 2889 - DNA, 20 bp, Artificial Sequence
  Antisense compound
aacagcctctgctacaacac

SEQ ID NO: 2890 - DNA, 20 bp, Artificial Sequence
  Antisense compound
caacagcctctgctacaaca

SEQ ID NO: 2891 - DNA, 20 bp, Artificial Sequence
  Antisense compound
acaacagcctctgctacaac

SEQ ID NO: 2892 - DNA, 20 bp, Artificial Sequence
  Antisense compound
cacaacagcctctgctacaa

SEQ ID NO: 2893 - DNA, 20 bp, Artificial Sequence
  Antisense compound
tcacaacagcctctgctaca

SEQ ID NO: 2894 - DNA, 20 bp, Artificial Sequence
  Antisense compound
ttcacaacagcctctgctac

SEQ ID NO: 2895 - DNA, 20 bp, Artificial Sequence
  Antisense compound
cttcacaacagcctctgcta

SEQ ID NO: 2896 - DNA, 20 bp, Artificial Sequence
  Antisense compound
tcttcacaacagcctctgct

SEQ ID NO: 2897 - DNA, 20 bp, Artificial Sequence
  Antisense compound
gtcttcacaacagcctctgc

SEQ ID NO: 2898 - DNA, 20 bp, Artificial Sequence
  Antisense compound
agtcttcacaacagcctctg

SEQ ID NO: 2899 - DNA, 20 bp, Artificial Sequence
  Antisense compound
aagtcttcacaacagcctct

SEQ ID NO: 2900 - DNA, 20 bp, Artificial Sequence
  Antisense compound
aaagtcttcacaacagcctc

SEQ ID NO: 2901 - DNA, 20 bp, Artificial Sequence
  Antisense compound
taaagtcttcacaacagcct

SEQ ID NO: 2902 - DNA, 20 bp, Artificial Sequence
  Antisense compound
gtaaagtcttcacaacagcc

SEQ ID NO: 2903 - DNA, 20 bp, Artificial Sequence
  Antisense compound
tgtaaagtcttcacaacagc

SEQ ID NO: 2904 - DNA, 20 bp, Artificial Sequence
  Antisense compound
ttgtaaagtcttcacaacag

SEQ ID NO: 2905 - DNA, 20 bp, Artificial Sequence
  Antisense compound
gttgtaaagtcttcacaaca

SEQ ID NO: 2906 - DNA, 20 bp, Artificial Sequence
  Antisense compound
ggttgtaaagtcttcacaac

SEQ ID NO: 2907 - DNA, 20 bp, Artificial Sequence
  Antisense compound
tggttgtaaagtcttcacaa

SEQ ID NO: 2908 - DNA, 20 bp, Artificial Sequence
  Antisense compound
ctggttgtaaagtcttcaca

SEQ ID NO: 2909 - DNA, 20 bp, Artificial Sequence
  Antisense compound
actggttgtaaagtcttcac

SEQ ID NO: 2910 - DNA, 20 bp, Artificial Sequence
  Antisense compound
aactggttgtaaagtcttca

SEQ ID NO: 2911 - DNA, 20 bp, Artificial Sequence
  Antisense compound
aaactggttgtaaagtcttc

SEQ ID NO: 2912 - DNA, 20 bp, Artificial Sequence
  Antisense compound
gaaactggttgtaaagtctt

SEQ ID NO: 2913 - DNA, 20 bp, Artificial Sequence
  Antisense compound
agaaactggttgtaaagtct

SEQ ID NO: 2914 - DNA, 20 bp, Artificial Sequence
  Antisense compound
cagaaactggttgtaaagtc

SEQ ID NO: 2915 - DNA, 20 bp, Artificial Sequence
  Antisense compound
tcagaaactggttgtaaagt

SEQ ID NO: 2916 - DNA, 20 bp, Artificial Sequence
  Antisense compound
atcagaaactggttgtaaag

SEQ ID NO: 2917 - DNA, 20 bp, Artificial Sequence
  Antisense compound
gatcagaaactggttgtaaa

SEQ ID NO: 2918 - DNA, 20 bp, Artificial Sequence
  Antisense compound
agatcagaaactggttgtaa

SEQ ID NO: 2919 - DNA, 20 bp, Artificial Sequence
  Antisense compound
gagatcagaaactggttgta

SEQ ID NO: 2920 - DNA, 20 bp, Artificial Sequence
  Antisense compound
ggagatcagaaactggttgt

SEQ ID NO: 2921 - DNA, 20 bp, Artificial Sequence
  Antisense compound
aggagatcagaaactggttg

SEQ ID NO: 2922 - DNA, 20 bp, Artificial Sequence
  Antisense compound
aaggagatcagaaactggtt

SEQ ID NO: 2923 - DNA, 20 bp, Artificial Sequence
  Antisense compound
taaggagatcagaaactggt

SEQ ID NO: 2924 - DNA, 20 bp, Artificial Sequence
  Antisense compound
gtaaggagatcagaaactgg

SEQ ID NO: 2925 - DNA, 20 bp, Artificial Sequence
  Antisense compound
ggtaaggagatcagaaactg

SEQ ID NO: 2926 - DNA, 20 bp, Artificial Sequence
  Antisense compound
tggtaaggagatcagaaact

SEQ ID NO: 2927 - DNA, 20 bp, Artificial Sequence
  Antisense compound
ttggtaaggagatcagaaac

SEQ ID NO: 2928 - DNA, 20 bp, Artificial Sequence
  Antisense compound
gttggtaaggagatcagaaa

SEQ ID NO: 2929 - DNA, 20 bp, Artificial Sequence
  Antisense compound
tgttggtaaggagatcagaa

SEQ ID NO: 2930 - DNA, 20 bp, Artificial Sequence
  Antisense compound
atgttggtaaggagatcaga

SEQ ID NO: 2931 - DNA, 20 bp, Artificial Sequence
  Antisense compound
catgttggtaaggagatcag

SEQ ID NO: 2932 - DNA, 20 bp, Artificial Sequence
  Antisense compound
ccatgttggtaaggagatca

SEQ ID NO: 2933 - DNA, 20 bp, Artificial Sequence
  Antisense compound
cccatgttggtaaggagatc

SEQ ID NO: 2934 - DNA, 20 bp, Artificial Sequence
  Antisense compound
acccatgttggtaaggagat

SEQ ID NO: 2935 - DNA, 20 bp, Artificial Sequence
  Antisense compound
tacccatgttggtaaggaga

SEQ ID NO: 2936 - DNA, 20 bp, Artificial Sequence
  Antisense compound
atacccatgttggtaaggag

SEQ ID NO: 2937 - DNA, 20 bp, Artificial Sequence
  Antisense compound
aatacccatgttggtaagga

SEQ ID NO: 2938 - DNA, 20 bp, Artificial Sequence
  Antisense compound
caatacccatgttggtaagg

SEQ ID NO: 2939 - DNA, 20 bp, Artificial Sequence
  Antisense compound
tcaatacccatgttggtaag

SEQ ID NO: 2940 - DNA, 20 bp, Artificial Sequence
  Antisense compound
atcaatacccatgttggtaa

SEQ ID NO: 2941 - DNA, 20 bp, Artificial Sequence
  Antisense compound
gatcaatacccatgttggta

SEQ ID NO: 2942 - DNA, 20 bp, Artificial Sequence
  Antisense compound
agatcaatacccatgttggt

SEQ ID NO: 2943 - DNA, 20 bp, Artificial Sequence
  Antisense compound
aagatcaatacccatgttgg

SEQ ID NO: 2944 - DNA, 20 bp, Artificial Sequence
  Antisense compound
caagatcaatacccatgttg

SEQ ID NO: 2945 - DNA, 20 bp, Artificial Sequence
  Antisense compound
tcaagatcaatacccatgtt

SEQ ID NO: 2946 - DNA, 20 bp, Artificial Sequence
  Antisense compound
atcaagatcaatacccatgt

SEQ ID NO: 2947 - DNA, 20 bp, Artificial Sequence
  Antisense compound
catcaagatcaatacccatg

SEQ ID NO: 2948 - DNA, 20 bp, Artificial Sequence
  Antisense compound
tcatcaagatcaatacccat

SEQ ID NO: 2949 - DNA, 20 bp, Artificial Sequence
  Antisense compound
ctcatcaagatcaataccca

SEQ ID NO: 2950 - DNA, 20 bp, Artificial Sequence
  Antisense compound
actcatcaagatcaataccc

SEQ ID NO: 2951 - DNA, 20 bp, Artificial Sequence
  Antisense compound
cactcatcaagatcaatacc

SEQ ID NO: 2952 - DNA, 20 bp, Artificial Sequence
  Antisense compound
ccactcatcaagatcaatac

SEQ ID NO: 2953 - DNA, 20 bp, Artificial Sequence
  Antisense compound
tccactcatcaagatcaata

SEQ ID NO: 2954 - DNA, 20 bp, Artificial Sequence
  Antisense compound
ctccactcatcaagatcaat

SEQ ID NO: 2955 - DNA, 20 bp, Artificial Sequence
  Antisense compound
actccactcatcaagatcaa

SEQ ID NO: 2956 - DNA, 20 bp, Artificial Sequence
  Antisense compound
cactccactcatcaagatca

SEQ ID NO: 2957 - DNA, 20 bp, Artificial Sequence
  Antisense compound
acactccactcatcaagatc

SEQ ID NO: 2958 - DNA, 20 bp, Artificial Sequence
  Antisense compound
tacactccactcatcaagat

SEQ ID NO: 2959 - DNA, 20 bp, Artificial Sequence
  Antisense compound
ctacactccactcatcaaga

SEQ ID NO: 2960 - DNA, 20 bp, Artificial Sequence
  Antisense compound
gctacactccactcatcaag

SEQ ID NO: 2961 - DNA, 20 bp, Artificial Sequence
  Antisense compound
agctacactccactcatcaa

SEQ ID NO: 2962 - DNA, 20 bp, Artificial Sequence
  Antisense compound
tagctacactccactcatca

SEQ ID NO: 2963 - DNA, 20 bp, Artificial Sequence
  Antisense compound
gtagctacactccactcatc

SEQ ID NO: 2964 - DNA, 20 bp, Artificial Sequence
  Antisense compound
tgtagctacactccactcat

SEQ ID NO: 2965 - DNA, 20 bp, Artificial Sequence
  Antisense compound
atgtagctacactccactca

SEQ ID NO: 2966 - DNA, 20 bp, Artificial Sequence
  Antisense compound
aatgtagctacactccactc

SEQ ID NO: 2967 - DNA, 20 bp, Artificial Sequence
  Antisense compound
gaatgtagctacactccact

SEQ ID NO: 2968 - DNA, 20 bp, Artificial Sequence
  Antisense compound
agaatgtagctacactccac

SEQ ID NO: 2969 - DNA, 20 bp, Artificial Sequence
  Antisense compound
tagaatgtagctacactcca

SEQ ID NO: 2970 - DNA, 20 bp, Artificial Sequence
  Antisense compound
gtagaatgtagctacactcc

SEQ ID NO: 2971 - DNA, 20 bp, Artificial Sequence
  Antisense compound
agtagaatgtagctacactc

SEQ ID NO: 2972 - DNA, 20 bp, Artificial Sequence
  Antisense compound
aagtagaatgtagctacact

SEQ ID NO: 2973 - DNA, 20 bp, Artificial Sequence
  Antisense compound
taagtagaatgtagctacac

SEQ ID NO: 2974 - DNA, 20 bp, Artificial Sequence
  Antisense compound
ataagtagaatgtagctaca

SEQ ID NO: 2975 - DNA, 20 bp, Artificial Sequence
  Antisense compound
aataagtagaatgtagctac

SEQ ID NO: 2976 - DNA, 20 bp, Artificial Sequence
  Antisense compound
aaataagtagaatgtagcta

SEQ ID NO: 2977 - DNA, 20 bp, Artificial Sequence
  Antisense compound
caaataagtagaatgtagct

SEQ ID NO: 2978 - DNA, 20 bp, Artificial Sequence
  Antisense compound
tcaaataagtagaatgtagc

SEQ ID NO: 2979 - DNA, 20 bp, Artificial Sequence
  Antisense compound
atcaaataagtagaatgtag

SEQ ID NO: 2980 - DNA, 20 bp, Artificial Sequence
  Antisense compound
catcaaataagtagaatgta

SEQ ID NO: 2981 - DNA, 20 bp, Artificial Sequence
  Antisense compound
tcatcaaataagtagaatgt

SEQ ID NO: 2982 - DNA, 20 bp, Artificial Sequence
  Antisense compound
atcatcaaataagtagaatg

SEQ ID NO: 2983 - DNA, 20 bp, Artificial Sequence
  Antisense compound
catcatcaaataagtagaat

SEQ ID NO: 2984 - DNA, 20 bp, Artificial Sequence
  Antisense compound
gcatcatcaaataagtagaa

SEQ ID NO: 2985 - DNA, 20 bp, Artificial Sequence
  Antisense compound
agcatcatcaaataagtaga

SEQ ID NO: 2986 - DNA, 20 bp, Artificial Sequence
  Antisense compound
cagcatcatcaaataagtag

SEQ ID NO: 2987 - DNA, 20 bp, Artificial Sequence
  Antisense compound
ccagcatcatcaaataagta

SEQ ID NO: 2988 - DNA, 20 bp, Artificial Sequence
  Antisense compound
accagcatcatcaaataagt

SEQ ID NO: 2989 - DNA, 20 bp, Artificial Sequence
  Antisense compound
caccagcatcatcaaataag

SEQ ID NO: 2990 - DNA, 20 bp, Artificial Sequence
  Antisense compound
tcaccagcatcatcaaataa

SEQ ID NO: 2991 - DNA, 20 bp, Artificial Sequence
  Antisense compound
ttcaccagcatcatcaaata

SEQ ID NO: 2992 - DNA, 20 bp, Artificial Sequence
  Antisense compound
cttcaccagcatcatcaaat

SEQ ID NO: 2993 - DNA, 20 bp, Artificial Sequence
  Antisense compound
tcttcaccagcatcatcaaa

SEQ ID NO: 2994 - DNA, 20 bp, Artificial Sequence
  Antisense compound
ttcttcaccagcatcatcaa

SEQ ID NO: 2995 - DNA, 20 bp, Artificial Sequence
  Antisense compound
tttcttcaccagcatcatca

SEQ ID NO: 2996 - DNA, 20 bp, Artificial Sequence
  Antisense compound
ttttcttcaccagcatcatc

SEQ ID NO: 2997 - DNA, 20 bp, Artificial Sequence
  Antisense compound
gttttcttcaccagcatcat

SEQ ID NO: 2998 - DNA, 20 bp, Artificial Sequence
  Antisense compound
agttttcttcaccagcatca

SEQ ID NO: 2999 - DNA, 20 bp, Artificial Sequence
  Antisense compound
aagttttcttcaccagcatc

SEQ ID NO: 3000 - DNA, 20 bp, Artificial Sequence
  Antisense compound
aaagttttcttcaccagcat

SEQ ID NO: 3001 - DNA, 20 bp, Artificial Sequence
  Antisense compound
aaaagttttcttcaccagca

SEQ ID NO: 3002 - DNA, 20 bp, Artificial Sequence
  Antisense compound
gaaaagttttcttcaccagc

SEQ ID NO: 3003 - DNA, 20 bp, Artificial Sequence
  Antisense compound
tgaaaagttttcttcaccag

SEQ ID NO: 3004 - DNA, 20 bp, Artificial Sequence
  Antisense compound
atgaaaagttttcttcacca

SEQ ID NO: 3005 - DNA, 20 bp, Artificial Sequence
  Antisense compound
gatgaaaagttttcttcacc

SEQ ID NO: 3006 - DNA, 20 bp, Artificial Sequence
  Antisense compound
tgatgaaaagttttcttcac

SEQ ID NO: 3007 - DNA, 20 bp, Artificial Sequence
  Antisense compound
gtgatgaaaagttttcttca

SEQ ID NO: 3008 - DNA, 20 bp, Artificial Sequence
  Antisense compound
cgtgatgaaaagttttcttc

SEQ ID NO: 3009 - DNA, 20 bp, Artificial Sequence
  Antisense compound
acgtgatgaaaagttttctt

SEQ ID NO: 3010 - DNA, 20 bp, Artificial Sequence
  Antisense compound
tacgtgatgaaaagttttct

SEQ ID NO: 3011 - DNA, 20 bp, Artificial Sequence
  Antisense compound
atacgtgatgaaaagttttc

SEQ ID NO: 3012 - DNA, 20 bp, Artificial Sequence
  Antisense compound
catacgtgatgaaaagtttt

SEQ ID NO: 3013 - DNA, 20 bp, Artificial Sequence
  Antisense compound
acatacgtgatgaaaagttt

SEQ ID NO: 3014 - DNA, 20 bp, Artificial Sequence
  Antisense compound
tacatacgtgatgaaaagtt

SEQ ID NO: 3015 - DNA, 20 bp, Artificial Sequence
  Antisense compound
atacatacgtgatgaaaagt

SEQ ID NO: 3016 - DNA, 20 bp, Artificial Sequence
  Antisense compound
aatacatacgtgatgaaaag

SEQ ID NO: 3017 - DNA, 20 bp, Artificial Sequence
  Antisense compound
caatacatacgtgatgaaaa

SEQ ID NO: 3018 - DNA, 20 bp, Artificial Sequence
  Antisense compound
acaatacatacgtgatgaaa

SEQ ID NO: 3019 - DNA, 20 bp, Artificial Sequence
  Antisense compound
aacaatacatacgtgatgaa

SEQ ID NO: 3020 - DNA, 20 bp, Artificial Sequence
  Antisense compound
gaacaatacatacgtgatga

SEQ ID NO: 3021 - DNA, 20 bp, Artificial Sequence
  Antisense compound
ggaacaatacatacgtgatg

SEQ ID NO: 3022 - DNA, 20 bp, Artificial Sequence
  Antisense compound
aggaacaatacatacgtgat

SEQ ID NO: 3023 - DNA, 20 bp, Artificial Sequence
  Antisense compound
aaggaacaatacatacgtga

SEQ ID NO: 3024 - DNA, 20 bp, Artificial Sequence
  Antisense compound
aaaggaacaatacatacgtg

SEQ ID NO: 3025 - DNA, 20 bp, Artificial Sequence
  Antisense compound
aaaaggaacaatacatacgt

SEQ ID NO: 3026 - DNA, 20 bp, Artificial Sequence
  Antisense compound
taaaaggaacaatacatacg

SEQ ID NO: 3027 - DNA, 20 bp, Artificial Sequence
  Antisense compound
gtaaaaggaacaatacatac

SEQ ID NO: 3028 - DNA, 20 bp, Artificial Sequence
  Antisense compound
ggtaaaaggaacaatacata

SEQ ID NO: 3029 - DNA, 20 bp, Artificial Sequence
  Antisense compound
gggtaaaaggaacaatacat

SEQ ID NO: 3030 - DNA, 20 bp, Artificial Sequence
  Antisense compound
agggtaaaaggaacaataca

SEQ ID NO: 3031 - DNA, 20 bp, Artificial Sequence
  Antisense compound
gagggtaaaaggaacaatac

SEQ ID NO: 3032 - DNA, 20 bp, Artificial Sequence
  Antisense compound
ggagggtaaaaggaacaata

SEQ ID NO: 3033 - DNA, 20 bp, Artificial Sequence
  Antisense compound
tggagggtaaaaggaacaat

SEQ ID NO: 3034 - DNA, 20 bp, Artificial Sequence
  Antisense compound
ctggagggtaaaaggaacaa

SEQ ID NO: 3035 - DNA, 20 bp, Artificial Sequence
  Antisense compound
tctggagggtaaaaggaaca

SEQ ID NO: 3036 - DNA, 20 bp, Artificial Sequence
  Antisense compound
atctggagggtaaaaggaac

SEQ ID NO: 3037 - DNA, 20 bp, Artificial Sequence
  Antisense compound
catctggagggtaaaaggaa

SEQ ID NO: 3038 - DNA, 20 bp, Artificial Sequence
  Antisense compound
tcatctggagggtaaaagga

SEQ ID NO: 3039 - DNA, 20 bp, Artificial Sequence
  Antisense compound
ctcatctggagggtaaaagg

SEQ ID NO: 3040 - DNA, 20 bp, Artificial Sequence
  Antisense compound
cctcatctggagggtaaaag

SEQ ID NO: 3041 - DNA, 20 bp, Artificial Sequence
  Antisense compound
tcctcatctggagggtaaaa

SEQ ID NO: 3042 - DNA, 20 bp, Artificial Sequence
  Antisense compound
ttcctcatctggagggtaaa

SEQ ID NO: 3043 - DNA, 20 bp, Artificial Sequence
  Antisense compound
cttcctcatctggagggtaa

SEQ ID NO: 3044 - DNA, 20 bp, Artificial Sequence
  Antisense compound
tcttcctcatctggagggta

SEQ ID NO: 3045 - DNA, 20 bp, Artificial Sequence
  Antisense compound
ttcttcctcatctggagggt

SEQ ID NO: 3046 - DNA, 20 bp, Artificial Sequence
  Antisense compound
cttcttcctcatctggaggg

SEQ ID NO: 3047 - DNA, 20 bp, Artificial Sequence
  Antisense compound
tcttcttcctcatctggagg

SEQ ID NO: 3048 - DNA, 20 bp, Artificial Sequence
  Antisense compound
ctcttcttcctcatctggag

SEQ ID NO: 3049 - DNA, 20 bp, Artificial Sequence
  Antisense compound
cctcttcttcctcatctgga

SEQ ID NO: 3050 - DNA, 20 bp, Artificial Sequence
  Antisense compound
tcctcttcttcctcatctgg

SEQ ID NO: 3051 - DNA, 20 bp, Artificial Sequence
  Antisense compound
gtcctcttcttcctcatctg

SEQ ID NO: 3052 - DNA, 20 bp, Artificial Sequence
  Antisense compound
cgtcctcttcttcctcatct

SEQ ID NO: 3053 - DNA, 20 bp, Artificial Sequence
  Antisense compound
tcgtcctcttcttcctcatc

SEQ ID NO: 3054 - DNA, 20 bp, Artificial Sequence
  Antisense compound
atcgtcctcttcttcctcat

SEQ ID NO: 3055 - DNA, 20 bp, Artificial Sequence
  Antisense compound
catcgtcctcttcttcctca

SEQ ID NO: 3056 - DNA, 20 bp, Artificial Sequence
  Antisense compound
gcatcgtcctcttcttcctc

SEQ ID NO: 3057 - DNA, 20 bp, Artificial Sequence
  Antisense compound
tgcatcgtcctcttcttcct

SEQ ID NO: 3058 - DNA, 20 bp, Artificial Sequence
  Antisense compound
ctgcatcgtcctcttcttcc

SEQ ID NO: 3059 - DNA, 20 bp, Artificial Sequence
  Antisense compound
tctgcatcgtcctcttcttc

SEQ ID NO: 3060 - DNA, 20 bp, Artificial Sequence
  Antisense compound
ctctgcatcgtcctcttctt

SEQ ID NO: 3061 - DNA, 20 bp, Artificial Sequence
  Antisense compound
actctgcatcgtcctcttct

SEQ ID NO: 3062 - DNA, 20 bp, Artificial Sequence
  Antisense compound
cactctgcatcgtcctcttc

SEQ ID NO: 3063 - DNA, 20 bp, Artificial Sequence
  Antisense compound
acactctgcatcgtcctctt

SEQ ID NO: 3064 - DNA, 20 bp, Artificial Sequence
  Antisense compound
cacactctgcatcgtcctct

SEQ ID NO: 3065 - DNA, 20 bp, Artificial Sequence
  Antisense compound
tcacactctgcatcgtcctc

SEQ ID NO: 3066 - DNA, 20 bp, Artificial Sequence
  Antisense compound
ctcacactctgcatcgtcct

SEQ ID NO: 3067 - DNA, 20 bp, Artificial Sequence
  Antisense compound
cctcacactctgcatcgtcc

SEQ ID NO: 3068 - DNA, 20 bp, Artificial Sequence
  Antisense compound
tcctcacactctgcatcgtc

SEQ ID NO: 3069 - DNA, 20 bp, Artificial Sequence
  Antisense compound
ttcctcacactctgcatcgt

SEQ ID NO: 3070 - DNA, 20 bp, Artificial Sequence
  Antisense compound
cttcctcacactctgcatcg

SEQ ID NO: 3071 - DNA, 20 bp, Artificial Sequence
  Antisense compound
tcttcctcacactctgcatc

SEQ ID NO: 3072 - DNA, 20 bp, Artificial Sequence
  Antisense compound
ttcttcctcacactctgcat

SEQ ID NO: 3073 - DNA, 20 bp, Artificial Sequence
  Antisense compound
cttcttcctcacactctgca

SEQ ID NO: 3074 - DNA, 20 bp, Artificial Sequence
  Antisense compound
tcttcttcctcacactctgc

SEQ ID NO: 3075 - DNA, 20 bp, Artificial Sequence
  Antisense compound
ttcttcttcctcacactctg

SEQ ID NO: 3076 - DNA, 20 bp, Artificial Sequence
  Antisense compound
tttcttcttcctcacactct

SEQ ID NO: 3077 - DNA, 20 bp, Artificial Sequence
  Antisense compound
atttcttcttcctcacactc

SEQ ID NO: 3078 - DNA, 20 bp, Artificial Sequence
  Antisense compound
aatttcttcttcctcacact

SEQ ID NO: 3079 - DNA, 20 bp, Artificial Sequence
  Antisense compound
caatttcttcttcctcacac

SEQ ID NO: 3080 - DNA, 20 bp, Artificial Sequence
  Antisense compound
tcaatttcttcttcctcaca

SEQ ID NO: 3081 - DNA, 20 bp, Artificial Sequence
  Antisense compound
atcaatttcttcttcctcac

SEQ ID NO: 3082 - DNA, 20 bp, Artificial Sequence
  Antisense compound
catcaatttcttcttcctca

SEQ ID NO: 3083 - DNA, 20 bp, Artificial Sequence
  Antisense compound
tcatcaatttcttcttcctc

SEQ ID NO: 3084 - DNA, 20 bp, Artificial Sequence
  Antisense compound
ttcatcaatttcttcttcct

SEQ ID NO: 3085 - DNA, 20 bp, Artificial Sequence
  Antisense compound
tttcatcaatttcttcttcc

SEQ ID NO: 3086 - DNA, 20 bp, Artificial Sequence
  Antisense compound
gtttcatcaatttcttcttc

SEQ ID NO: 3087 - DNA, 20 bp, Artificial Sequence
  Antisense compound
ggtttcatcaatttcttctt

SEQ ID NO: 3088 - DNA, 20 bp, Artificial Sequence
  Antisense compound
aggtttcatcaatttcttct

SEQ ID NO: 3089 - DNA, 20 bp, Artificial Sequence
  Antisense compound
caggtttcatcaatttcttc

SEQ ID NO: 3090 - DNA, 20 bp, Artificial Sequence
  Antisense compound
acaggtttcatcaatttctt

SEQ ID NO: 3091 - DNA, 20 bp, Artificial Sequence
  Antisense compound
cacaggtttcatcaatttct

SEQ ID NO: 3092 - DNA, 20 bp, Artificial Sequence
  Antisense compound
tcacaggtttcatcaatttc

SEQ ID NO: 3093 - DNA, 20 bp, Artificial Sequence
  Antisense compound
ttcacaggtttcatcaattt

SEQ ID NO: 3094 - DNA, 20 bp, Artificial Sequence
  Antisense compound
gttcacaggtttcatcaatt

SEQ ID NO: 3095 - DNA, 20 bp, Artificial Sequence
  Antisense compound
tgttcacaggtttcatcaat

SEQ ID NO: 3096 - DNA, 20 bp, Artificial Sequence
  Antisense compound
atgttcacaggtttcatcaa

SEQ ID NO: 3097 - DNA, 20 bp, Artificial Sequence
  Antisense compound
catgttcacaggtttcatca

SEQ ID NO: 3098 - DNA, 20 bp, Artificial Sequence
  Antisense compound
tcatgttcacaggtttcatc

SEQ ID NO: 3099 - DNA, 20 bp, Artificial Sequence
  Antisense compound
ctcatgttcacaggtttcat

SEQ ID NO: 3100 - DNA, 20 bp, Artificial Sequence
  Antisense compound
actcatgttcacaggtttca

SEQ ID NO: 3101 - DNA, 20 bp, Artificial Sequence
  Antisense compound
tactcatgttcacaggtttc

SEQ ID NO: 3102 - DNA, 20 bp, Artificial Sequence
  Antisense compound
gtactcatgttcacaggttt

SEQ ID NO: 3103 - DNA, 20 bp, Artificial Sequence
  Antisense compound
cgtactcatgttcacaggtt

SEQ ID NO: 3104 - DNA, 20 bp, Artificial Sequence
  Antisense compound
ccgtactcatgttcacaggt

SEQ ID NO: 3105 - DNA, 20 bp, Artificial Sequence
  Antisense compound
accgtactcatgttcacagg

SEQ ID NO: 3106 - DNA, 20 bp, Artificial Sequence
  Antisense compound
taccgtactcatgttcacag

SEQ ID NO: 3107 - DNA, 20 bp, Artificial Sequence
  Antisense compound
gtaccgtactcatgttcaca

SEQ ID NO: 3108 - DNA, 20 bp, Artificial Sequence
  Antisense compound
tgtaccgtactcatgttcac

SEQ ID NO: 3109 - DNA, 20 bp, Artificial Sequence
  Antisense compound
ctgtaccgtactcatgttca

SEQ ID NO: 3110 - DNA, 20 bp, Artificial Sequence
  Antisense compound
tctgtaccgtactcatgttc

SEQ ID NO: 3111 - DNA, 20 bp, Artificial Sequence
  Antisense compound
ctctgtaccgtactcatgtt

SEQ ID NO: 3112 - DNA, 20 bp, Artificial Sequence
  Antisense compound
cctctgtaccgtactcatgt

SEQ ID NO: 3113 - DNA, 20 bp, Artificial Sequence
  Antisense compound
tcctctgtaccgtactcatg

SEQ ID NO: 3114 - DNA, 20 bp, Artificial Sequence
  Antisense compound
atcctctgtaccgtactcat

SEQ ID NO: 3115 - DNA, 20 bp, Artificial Sequence
  Antisense compound
catcctctgtaccgtactca

SEQ ID NO: 3116 - DNA, 20 bp, Artificial Sequence
  Antisense compound
tcatcctctgtaccgtactc

SEQ ID NO: 3117 - DNA, 20 bp, Artificial Sequence
  Antisense compound
atcatcctctgtaccgtact

SEQ ID NO: 3118 - DNA, 20 bp, Artificial Sequence
  Antisense compound
aatcatcctctgtaccgtac

SEQ ID NO: 3119 - DNA, 20 bp, Artificial Sequence
  Antisense compound
taatcatcctctgtaccgta

SEQ ID NO: 3120 - DNA, 20 bp, Artificial Sequence
  Antisense compound
ataatcatcctctgtaccgt

SEQ ID NO: 3121 - DNA, 20 bp, Artificial Sequence
  Antisense compound
gataatcatcctctgtaccg

SEQ ID NO: 3122 - DNA, 20 bp, Artificial Sequence
  Antisense compound
tgataatcatcctctgtacc

SEQ ID NO: 3123 - DNA, 20 bp, Artificial Sequence
  Antisense compound
ttgataatcatcctctgtac

SEQ ID NO: 3124 - DNA, 20 bp, Artificial Sequence
  Antisense compound
cttgataatcatcctctgta

SEQ ID NO: 3125 - DNA, 20 bp, Artificial Sequence
  Antisense compound
ccttgataatcatcctctgt

SEQ ID NO: 3126 - DNA, 20 bp, Artificial Sequence
  Antisense compound
accttgataatcatcctctg

SEQ ID NO: 3127 - DNA, 20 bp, Artificial Sequence
  Antisense compound
gaccttgataatcatcctct

SEQ ID NO: 3128 - DNA, 20 bp, Artificial Sequence
  Antisense compound
agaccttgataatcatcctc

SEQ ID NO: 3129 - DNA, 20 bp, Artificial Sequence
  Antisense compound
gagaccttgataatcatcct

SEQ ID NO: 3130 - DNA, 20 bp, Artificial Sequence
  Antisense compound
ggagaccttgataatcatcc

SEQ ID NO: 3131 - DNA, 20 bp, Artificial Sequence
  Antisense compound
gggagaccttgataatcatc

SEQ ID NO: 3132 - DNA, 20 bp, Artificial Sequence
  Antisense compound
agggagaccttgataatcat

SEQ ID NO: 3133 - DNA, 20 bp, Artificial Sequence
  Antisense compound
gagggagaccttgataatca

SEQ ID NO: 3134 - DNA, 20 bp, Artificial Sequence
  Antisense compound
agagggagaccttgataatc

SEQ ID NO: 3135 - DNA, 20 bp, Artificial Sequence
  Antisense compound
cagagggagaccttgataat

SEQ ID NO: 3136 - DNA, 20 bp, Artificial Sequence
  Antisense compound
ccagagggagaccttgataa

SEQ ID NO: 3137 - DNA, 20 bp, Artificial Sequence
  Antisense compound
tccagagggagaccttgata

SEQ ID NO: 3138 - DNA, 20 bp, Artificial Sequence
  Antisense compound
ttccagagggagaccttgat

SEQ ID NO: 3139 - DNA, 20 bp, Artificial Sequence
  Antisense compound
attccagagggagaccttga

SEQ ID NO: 3140 - DNA, 20 bp, Artificial Sequence
  Antisense compound
aattccagagggagaccttg

SEQ ID NO: 3141 - DNA, 20 bp, Artificial Sequence
  Antisense compound
aaattccagagggagacctt

SEQ ID NO: 3142 - DNA, 20 bp, Artificial Sequence
  Antisense compound
caaattccagagggagacct

SEQ ID NO: 3143 - DNA, 20 bp, Artificial Sequence
  Antisense compound
ccaaattccagagggagacc

SEQ ID NO: 3144 - DNA, 20 bp, Artificial Sequence
  Antisense compound
accaaattccagagggagac

SEQ ID NO: 3145 - DNA, 20 bp, Artificial Sequence
  Antisense compound
caccaaattccagagggaga

SEQ ID NO: 3146 - DNA, 20 bp, Artificial Sequence
  Antisense compound
gcaccaaattccagagggag

SEQ ID NO: 3147 - DNA, 20 bp, Artificial Sequence
  Antisense compound
ggcaccaaattccagaggga

SEQ ID NO: 3148 - DNA, 20 bp, Artificial Sequence
  Antisense compound
aggcaccaaattccagaggg

SEQ ID NO: 3149 - DNA, 20 bp, Artificial Sequence
  Antisense compound
gaggcaccaaattccagagg

SEQ ID NO: 3150 - DNA, 20 bp, Artificial Sequence
  Antisense compound
tgaggcaccaaattccagag

SEQ ID NO: 3151 - DNA, 20 bp, Artificial Sequence
  Antisense compound
ctgaggcaccaaattccaga

SEQ ID NO: 3152 - DNA, 20 bp, Artificial Sequence
  Antisense compound
gctgaggcaccaaattccag

SEQ ID NO: 3153 - DNA, 20 bp, Artificial Sequence
  Antisense compound
agctgaggcaccaaattcca

SEQ ID NO: 3154 - DNA, 20 bp, Artificial Sequence
  Antisense compound
cagctgaggcaccaaattcc

SEQ ID NO: 3155 - DNA, 20 bp, Artificial Sequence
  Antisense compound
tcagctgaggcaccaaattc

SEQ ID NO: 3156 - DNA, 20 bp, Artificial Sequence
  Antisense compound
ttcagctgaggcaccaaatt

SEQ ID NO: 3157 - DNA, 20 bp, Artificial Sequence
  Antisense compound
tttcagctgaggcaccaaat

SEQ ID NO: 3158 - DNA, 20 bp, Artificial Sequence
  Antisense compound
gtttcagctgaggcaccaaa

SEQ ID NO: 3159 - DNA, 20 bp, Artificial Sequence
  Antisense compound
tgtttcagctgaggcaccaa

SEQ ID NO: 3160 - DNA, 20 bp, Artificial Sequence
  Antisense compound
ctgtttcagctgaggcacca

SEQ ID NO: 3161 - DNA, 20 bp, Artificial Sequence
  Antisense compound
actgtttcagctgaggcacc

SEQ ID NO: 3162 - DNA, 20 bp, Artificial Sequence
  Antisense compound
aactgtttcagctgaggcac

SEQ ID NO: 3163 - DNA, 20 bp, Artificial Sequence
  Antisense compound
gaactgtttcagctgaggca

SEQ ID NO: 3164 - DNA, 20 bp, Artificial Sequence
  Antisense compound
cgaactgtttcagctgaggc

SEQ ID NO: 3165 - DNA, 20 bp, Artificial Sequence
  Antisense compound
tcgaactgtttcagctgagg

SEQ ID NO: 3166 - DNA, 20 bp, Artificial Sequence
  Antisense compound
ctcgaactgtttcagctgag

SEQ ID NO: 3167 - DNA, 20 bp, Artificial Sequence
  Antisense compound
actcgaactgtttcagctga

SEQ ID NO: 3168 - DNA, 20 bp, Artificial Sequence
  Antisense compound
aactcgaactgtttcagctg

SEQ ID NO: 3169 - DNA, 20 bp, Artificial Sequence
  Antisense compound
caactcgaactgtttcagct

SEQ ID NO: 3170 - DNA, 20 bp, Artificial Sequence
  Antisense compound
tcaactcgaactgtttcagc

SEQ ID NO: 3171 - DNA, 20 bp, Artificial Sequence
  Antisense compound
ctcaactcgaactgtttcag

SEQ ID NO: 3172 - DNA, 20 bp, Artificial Sequence
  Antisense compound
cctcaactcgaactgtttca

SEQ ID NO: 3173 - DNA, 20 bp, Artificial Sequence
  Antisense compound
tcctcaactcgaactgtttc

SEQ ID NO: 3174 - DNA, 20 bp, Artificial Sequence
  Antisense compound
ttcctcaactcgaactgttt

SEQ ID NO: 3175 - DNA, 20 bp, Artificial Sequence
  Antisense compound
cttcctcaactcgaactgtt

SEQ ID NO: 3176 - DNA, 20 bp, Artificial Sequence
  Antisense compound
tcttcctcaactcgaactgt

SEQ ID NO: 3177 - DNA, 20 bp, Artificial Sequence
  Antisense compound
ttcttcctcaactcgaactg

SEQ ID NO: 3178 - DNA, 20 bp, Artificial Sequence
  Antisense compound
cttcttcctcaactcgaact

SEQ ID NO: 3179 - DNA, 20 bp, Artificial Sequence
  Antisense compound
tcttcttcctcaactcgaac

SEQ ID NO: 3180 - DNA, 20 bp, Artificial Sequence
  Antisense compound
ttcttcttcctcaactcgaa

SEQ ID NO: 3181 - DNA, 20 bp, Artificial Sequence
  Antisense compound
cttcttcttcctcaactcga

SEQ ID NO: 3182 - DNA, 20 bp, Artificial Sequence
  Antisense compound
tcttcttcttcctcaactcg

SEQ ID NO: 3183 - DNA, 20 bp, Artificial Sequence
  Antisense compound
ctcttcttcttcctcaactc

SEQ ID NO: 3184 - DNA, 20 bp, Artificial Sequence
  Antisense compound
cctcttcttcttcctcaact

SEQ ID NO: 3185 - DNA, 20 bp, Artificial Sequence
  Antisense compound
tcctcttcttcttcctcaac

SEQ ID NO: 3186 - DNA, 20 bp, Artificial Sequence
  Antisense compound
ttcctcttcttcttcctcaa

SEQ ID NO: 3187 - DNA, 20 bp, Artificial Sequence
  Antisense compound
cttcctcttcttcttcctca

SEQ ID NO: 3188 - DNA, 20 bp, Artificial Sequence
  Antisense compound
tcttcctcttcttcttcctc

SEQ ID NO: 3189 - DNA, 20 bp, Artificial Sequence
  Antisense compound
gtcttcctcttcttcttcct

SEQ ID NO: 3190 - DNA, 20 bp, Artificial Sequence
  Antisense compound
agtcttcctcttcttcttcc

SEQ ID NO: 3191 - DNA, 20 bp, Artificial Sequence
  Antisense compound
cagtcttcctcttcttcttc

SEQ ID NO: 3192 - DNA, 20 bp, Artificial Sequence
  Antisense compound
ccagtcttcctcttcttctt

SEQ ID NO: 3193 - DNA, 20 bp, Artificial Sequence
  Antisense compound
gccagtcttcctcttcttct

SEQ ID NO: 3194 - DNA, 20 bp, Artificial Sequence
  Antisense compound
agccagtcttcctcttcttc

SEQ ID NO: 3195 - DNA, 20 bp, Artificial Sequence
  Antisense compound
cagccagtcttcctcttctt

SEQ ID NO: 3196 - DNA, 20 bp, Artificial Sequence
  Antisense compound
ccagccagtcttcctcttct

SEQ ID NO: 3197 - DNA, 20 bp, Artificial Sequence
  Antisense compound
tccagccagtcttcctcttc

SEQ ID NO: 3198 - DNA, 20 bp, Artificial Sequence
  Antisense compound
atccagccagtcttcctctt

SEQ ID NO: 3199 - DNA, 20 bp, Artificial Sequence
  Antisense compound
catccagccagtcttcctct

SEQ ID NO: 3200 - DNA, 20 bp, Artificial Sequence
  Antisense compound
tcatccagccagtcttcctc

SEQ ID NO: 3201 - DNA, 20 bp, Artificial Sequence
  Antisense compound
atcatccagccagtcttcct

SEQ ID NO: 3202 - DNA, 20 bp, Artificial Sequence
  Antisense compound
tatcatccagccagtcttcc

SEQ ID NO: 3203 - DNA, 20 bp, Artificial Sequence
  Antisense compound
gtatcatccagccagtcttc

SEQ ID NO: 3204 - DNA, 20 bp, Artificial Sequence
  Antisense compound
agtatcatccagccagtctt

SEQ ID NO: 3205 - DNA, 20 bp, Artificial Sequence
  Antisense compound
tagtatcatccagccagtct

SEQ ID NO: 3206 - DNA, 20 bp, Artificial Sequence
  Antisense compound
gtagtatcatccagccagtc

SEQ ID NO: 3207 - DNA, 20 bp, Artificial Sequence
  Antisense compound
agtagtatcatccagccagt

SEQ ID NO: 3208 - DNA, 20 bp, Artificial Sequence
  Antisense compound
cagtagtatcatccagccag

SEQ ID NO: 3209 - DNA, 20 bp, Artificial Sequence
  Antisense compound
tcagtagtatcatccagcca

SEQ ID NO: 3210 - DNA, 20 bp, Artificial Sequence
  Antisense compound
ctcagtagtatcatccagcc

SEQ ID NO: 3211 - DNA, 20 bp, Artificial Sequence
  Antisense compound
gctcagtagtatcatccagc

SEQ ID NO: 3212 - DNA, 20 bp, Artificial Sequence
  Antisense compound
tgctcagtagtatcatccag

SEQ ID NO: 3213 - DNA, 20 bp, Artificial Sequence
  Antisense compound
ttgctcagtagtatcatcca

SEQ ID NO: 3214 - DNA, 20 bp, Artificial Sequence
  Antisense compound
attgctcagtagtatcatcc

SEQ ID NO: 3215 - DNA, 20 bp, Artificial Sequence
  Antisense compound
gattgctcagtagtatcatc

SEQ ID NO: 3216 - DNA, 20 bp, Artificial Sequence
  Antisense compound
tgattgctcagtagtatcat

SEQ ID NO: 3217 - DNA, 20 bp, Artificial Sequence
  Antisense compound
ctgattgctcagtagtatca

SEQ ID NO: 3218 - DNA, 20 bp, Artificial Sequence
  Antisense compound
tctgattgctcagtagtatc

SEQ ID NO: 3219 - DNA, 20 bp, Artificial Sequence
  Antisense compound
ctctgattgctcagtagtat

SEQ ID NO: 3220 - DNA, 20 bp, Artificial Sequence
  Antisense compound
tctctgattgctcagtagta

SEQ ID NO: 3221 - DNA, 20 bp, Artificial Sequence
  Antisense compound
atctctgattgctcagtagt

SEQ ID NO: 3222 - DNA, 20 bp, Artificial Sequence
  Antisense compound
aatctctgattgctcagtag

SEQ ID NO: 3223 - DNA, 20 bp, Artificial Sequence
  Antisense compound
caatctctgattgctcagta

SEQ ID NO: 3224 - DNA, 20 bp, Artificial Sequence
  Antisense compound
tcaatctctgattgctcagt

SEQ ID NO: 3225 - DNA, 20 bp, Artificial Sequence
  Antisense compound
ctcaatctctgattgctcag

SEQ ID NO: 3226 - DNA, 20 bp, Artificial Sequence
  Antisense compound
gctcaatctctgattgctca

SEQ ID NO: 3227 - DNA, 20 bp, Artificial Sequence
  Antisense compound
ggctcaatctctgattgctc

SEQ ID NO: 3228 - DNA, 20 bp, Artificial Sequence
  Antisense compound
tggctcaatctctgattgct

SEQ ID NO: 3229 - DNA, 20 bp, Artificial Sequence
  Antisense compound
ctggctcaatctctgattgc

SEQ ID NO: 3230 - DNA, 20 bp, Artificial Sequence
  Antisense compound
tctggctcaatctctgattg

SEQ ID NO: 3231 - DNA, 20 bp, Artificial Sequence
  Antisense compound
ttctggctcaatctctgatt

SEQ ID NO: 3232 - DNA, 20 bp, Artificial Sequence
  Antisense compound
gttctggctcaatctctgat

SEQ ID NO: 3233 - DNA, 20 bp, Artificial Sequence
  Antisense compound
ggttctggctcaatctctga

SEQ ID NO: 3234 - DNA, 20 bp, Artificial Sequence
  Antisense compound
tggttctggctcaatctctg

SEQ ID NO: 3235 - DNA, 20 bp, Artificial Sequence
  Antisense compound
ctggttctggctcaatctct

SEQ ID NO: 3236 - DNA, 20 bp, Artificial Sequence
  Antisense compound
tctggttctggctcaatctc

SEQ ID NO: 3237 - DNA, 20 bp, Artificial Sequence
  Antisense compound
ttctggttctggctcaatct

SEQ ID NO: 3238 - DNA, 20 bp, Artificial Sequence
  Antisense compound
gttctggttctggctcaatc

SEQ ID NO: 3239 - DNA, 20 bp, Artificial Sequence
  Antisense compound
ggttctggttctggctcaat

SEQ ID NO: 3240 - DNA, 20 bp, Artificial Sequence
  Antisense compound
aggttctggttctggctcaa

SEQ ID NO: 3241 - DNA, 20 bp, Artificial Sequence
  Antisense compound
taggttctggttctggctca

SEQ ID NO: 3242 - DNA, 20 bp, Artificial Sequence
  Antisense compound
gtaggttctggttctggctc

SEQ ID NO: 3243 - DNA, 20 bp, Artificial Sequence
  Antisense compound
tgtaggttctggttctggct

SEQ ID NO: 3244 - DNA, 20 bp, Artificial Sequence
  Antisense compound
gtgtaggttctggttctggc

SEQ ID NO: 3245 - DNA, 20 bp, Artificial Sequence
  Antisense compound
ggtgtaggttctggttctgg

SEQ ID NO: 3246 - DNA, 20 bp, Artificial Sequence
  Antisense compound
aggtgtaggttctggttctg

SEQ ID NO: 3247 - DNA, 20 bp, Artificial Sequence
  Antisense compound
caggtgtaggttctggttct

SEQ ID NO: 3248 - DNA, 20 bp, Artificial Sequence
  Antisense compound
tcaggtgtaggttctggttc

SEQ ID NO: 3249 - DNA, 20 bp, Artificial Sequence
  Antisense compound
ttcaggtgtaggttctggtt

SEQ ID NO: 3250 - DNA, 20 bp, Artificial Sequence
  Antisense compound
cttcaggtgtaggttctggt

SEQ ID NO: 3251 - DNA, 20 bp, Artificial Sequence
  Antisense compound
tcttcaggtgtaggttctgg

SEQ ID NO: 3252 - DNA, 20 bp, Artificial Sequence
  Antisense compound
ttcttcaggtgtaggttctg

SEQ ID NO: 3253 - DNA, 20 bp, Artificial Sequence
  Antisense compound
gttcttcaggtgtaggttct

SEQ ID NO: 3254 - DNA, 20 bp, Artificial Sequence
  Antisense compound
ggttcttcaggtgtaggttc

SEQ ID NO: 3255 - DNA, 20 bp, Artificial Sequence
  Antisense compound
tggttcttcaggtgtaggtt

SEQ ID NO: 3256 - DNA, 20 bp, Artificial Sequence
  Antisense compound
ctggttcttcaggtgtaggt

SEQ ID NO: 3257 - DNA, 20 bp, Artificial Sequence
  Antisense compound
actggttcttcaggtgtagg

SEQ ID NO: 3258 - DNA, 20 bp, Artificial Sequence
  Antisense compound
aactggttcttcaggtgtag

SEQ ID NO: 3259 - DNA, 20 bp, Artificial Sequence
  Antisense compound
taactggttcttcaggtgta

SEQ ID NO: 3260 - DNA, 20 bp, Artificial Sequence
  Antisense compound
ttaactggttcttcaggtgt

SEQ ID NO: 3261 - DNA, 20 bp, Artificial Sequence
  Antisense compound
attaactggttcttcaggtg

SEQ ID NO: 3262 - DNA, 20 bp, Artificial Sequence
  Antisense compound
gattaactggttcttcaggt

SEQ ID NO: 3263 - DNA, 20 bp, Artificial Sequence
  Antisense compound
tgattaactggttcttcagg

SEQ ID NO: 3264 - DNA, 20 bp, Artificial Sequence
  Antisense compound
ctgattaactggttcttcag

SEQ ID NO: 3265 - DNA, 20 bp, Artificial Sequence
  Antisense compound
actgattaactggttcttca

SEQ ID NO: 3266 - DNA, 20 bp, Artificial Sequence
  Antisense compound
aactgattaactggttcttc

SEQ ID NO: 3267 - DNA, 20 bp, Artificial Sequence
  Antisense compound
aaactgattaactggttctt

SEQ ID NO: 3268 - DNA, 20 bp, Artificial Sequence
  Antisense compound
taaactgattaactggttct

SEQ ID NO: 3269 - DNA, 20 bp, Artificial Sequence
  Antisense compound
gtaaactgattaactggttc

SEQ ID NO: 3270 - DNA, 20 bp, Artificial Sequence
  Antisense compound
agtaaactgattaactggtt

SEQ ID NO: 3271 - DNA, 20 bp, Artificial Sequence
  Antisense compound
cagtaaactgattaactggt

SEQ ID NO: 3272 - DNA, 20 bp, Artificial Sequence
  Antisense compound
ccagtaaactgattaactgg

SEQ ID NO: 3273 - DNA, 20 bp, Artificial Sequence
  Antisense compound
accagtaaactgattaactg

SEQ ID NO: 3274 - DNA, 20 bp, Artificial Sequence
  Antisense compound
aaccagtaaactgattaact

SEQ ID NO: 3275 - DNA, 20 bp, Artificial Sequence
  Antisense compound
taaccagtaaactgattaac

SEQ ID NO: 3276 - DNA, 20 bp, Artificial Sequence
  Antisense compound
ataaccagtaaactgattaa

SEQ ID NO: 3277 - DNA, 20 bp, Artificial Sequence
  Antisense compound
aataaccagtaaactgatta

SEQ ID NO: 3278 - DNA, 20 bp, Artificial Sequence
  Antisense compound
aaataaccagtaaactgatt

SEQ ID NO: 3279 - DNA, 20 bp, Artificial Sequence
  Antisense compound
taaataaccagtaaactgat

SEQ ID NO: 3280 - DNA, 20 bp, Artificial Sequence
  Antisense compound
ttaaataaccagtaaactga

SEQ ID NO: 3281 - DNA, 20 bp, Artificial Sequence
  Antisense compound
tttaaataaccagtaaactg

SEQ ID NO: 3282 - DNA, 20 bp, Artificial Sequence
  Antisense compound
ttttaaataaccagtaaact

SEQ ID NO: 3283 - DNA, 20 bp, Artificial Sequence
  Antisense compound
gttttaaataaccagtaaac

SEQ ID NO: 3284 - DNA, 20 bp, Artificial Sequence
  Antisense compound
agttttaaataaccagtaaa

SEQ ID NO: 3285 - DNA, 20 bp, Artificial Sequence
  Antisense compound
aagttttaaataaccagtaa

SEQ ID NO: 3286 - DNA, 20 bp, Artificial Sequence
  Antisense compound
taagttttaaataaccagta

SEQ ID NO: 3287 - DNA, 20 bp, Artificial Sequence
  Antisense compound
gtaagttttaaataaccagt

SEQ ID NO: 3288 - DNA, 20 bp, Artificial Sequence
  Antisense compound
agtaagttttaaataaccag

SEQ ID NO: 3289 - DNA, 20 bp, Artificial Sequence
  Antisense compound
cagtaagttttaaataacca

SEQ ID NO: 3290 - DNA, 20 bp, Artificial Sequence
  Antisense compound
tcagtaagttttaaataacc

SEQ ID NO: 3291 - DNA, 20 bp, Artificial Sequence
  Antisense compound
gtcagtaagttttaaataac

SEQ ID NO: 3292 - DNA, 20 bp, Artificial Sequence
  Antisense compound
tgtcagtaagttttaaataa

SEQ ID NO: 3293 - DNA, 20 bp, Artificial Sequence
  Antisense compound
ttgtcagtaagttttaaata

SEQ ID NO: 3294 - DNA, 20 bp, Artificial Sequence
  Antisense compound
attgtcagtaagttttaaat

SEQ ID NO: 3295 - DNA, 20 bp, Artificial Sequence
  Antisense compound
cattgtcagtaagttttaaa

SEQ ID NO: 3296 - DNA, 20 bp, Artificial Sequence
  Antisense compound
acattgtcagtaagttttaa

SEQ ID NO: 3297 - DNA, 20 bp, Artificial Sequence
  Antisense compound
aacattgtcagtaagtttta

SEQ ID NO: 3298 - DNA, 20 bp, Artificial Sequence
  Antisense compound
caacattgtcagtaagtttt

SEQ ID NO: 3299 - DNA, 20 bp, Artificial Sequence
  Antisense compound
gcaacattgtcagtaagttt

SEQ ID NO: 3300 - DNA, 20 bp, Artificial Sequence
  Antisense compound
ggcaacattgtcagtaagtt

SEQ ID NO: 3301 - DNA, 20 bp, Artificial Sequence
  Antisense compound
tggcaacattgtcagtaagt

SEQ ID NO: 3302 - DNA, 20 bp, Artificial Sequence
  Antisense compound
atggcaacattgtcagtaag

SEQ ID NO: 3303 - DNA, 20 bp, Artificial Sequence
  Antisense compound
aatggcaacattgtcagtaa

SEQ ID NO: 3304 - DNA, 20 bp, Artificial Sequence
  Antisense compound
taatggcaacattgtcagta

SEQ ID NO: 3305 - DNA, 20 bp, Artificial Sequence
  Antisense compound
ttaatggcaacattgtcagt

SEQ ID NO: 3306 - DNA, 20 bp, Artificial Sequence
  Antisense compound
tttaatggcaacattgtcag

SEQ ID NO: 3307 - DNA, 20 bp, Artificial Sequence
  Antisense compound
atttaatggcaacattgtca

SEQ ID NO: 3308 - DNA, 20 bp, Artificial Sequence
  Antisense compound
catttaatggcaacattgtc

SEQ ID NO: 3309 - DNA, 20 bp, Artificial Sequence
  Antisense compound
acatttaatggcaacattgt

SEQ ID NO: 3310 - DNA, 20 bp, Artificial Sequence
  Antisense compound
cacatttaatggcaacattg

SEQ ID NO: 3311 - DNA, 20 bp, Artificial Sequence
  Antisense compound
acacatttaatggcaacatt

SEQ ID NO: 3312 - DNA, 20 bp, Artificial Sequence
  Antisense compound
aacacatttaatggcaacat

SEQ ID NO: 3313 - DNA, 20 bp, Artificial Sequence
  Antisense compound
caacacatttaatggcaaca

SEQ ID NO: 3314 - DNA, 20 bp, Artificial Sequence
  Antisense compound
tcaacacatttaatggcaac

SEQ ID NO: 3315 - DNA, 20 bp, Artificial Sequence
  Antisense compound
gtcaacacatttaatggcaa

SEQ ID NO: 3316 - DNA, 20 bp, Artificial Sequence
  Antisense compound
tgtcaacacatttaatggca

SEQ ID NO: 3317 - DNA, 20 bp, Artificial Sequence
  Antisense compound
atgtcaacacatttaatggc

SEQ ID NO: 3318 - DNA, 20 bp, Artificial Sequence
  Antisense compound
gatgtcaacacatttaatgg

SEQ ID NO: 3319 - DNA, 20 bp, Artificial Sequence
  Antisense compound
cgatgtcaacacatttaatg

SEQ ID NO: 3320 - DNA, 20 bp, Artificial Sequence
  Antisense compound
acgatgtcaacacatttaat

SEQ ID NO: 3321 - DNA, 20 bp, Artificial Sequence
  Antisense compound
aacgatgtcaacacatttaa

SEQ ID NO: 3322 - DNA, 20 bp, Artificial Sequence
  Antisense compound
taacgatgtcaacacattta

SEQ ID NO: 3323 - DNA, 20 bp, Artificial Sequence
  Antisense compound
ttaacgatgtcaacacattt

SEQ ID NO: 3324 - DNA, 20 bp, Artificial Sequence
  Antisense compound
cttaacgatgtcaacacatt

SEQ ID NO: 3325 - DNA, 20 bp, Artificial Sequence
  Antisense compound
ccttaacgatgtcaacacat

SEQ ID NO: 3326 - DNA, 20 bp, Artificial Sequence
  Antisense compound
tccttaacgatgtcaacaca

SEQ ID NO: 3327 - DNA, 20 bp, Artificial Sequence
  Antisense compound
ctccttaacgatgtcaacac

SEQ ID NO: 3328 - DNA, 20 bp, Artificial Sequence
  Antisense compound
cctccttaacgatgtcaaca

SEQ ID NO: 3329 - DNA, 20 bp, Artificial Sequence
  Antisense compound
gcctccttaacgatgtcaac

SEQ ID NO: 3330 - DNA, 20 bp, Artificial Sequence
  Antisense compound
tgcctccttaacgatgtcaa

SEQ ID NO: 3331 - DNA, 20 bp, Artificial Sequence
  Antisense compound
gtgcctccttaacgatgtca

SEQ ID NO: 3332 - DNA, 20 bp, Artificial Sequence
  Antisense compound
tgtgcctccttaacgatgtc

SEQ ID NO: 3333 - DNA, 20 bp, Artificial Sequence
  Antisense compound
ttgtgcctccttaacgatgt

SEQ ID NO: 3334 - DNA, 20 bp, Artificial Sequence
  Antisense compound
tttgtgcctccttaacgatg

SEQ ID NO: 3335 - DNA, 20 bp, Artificial Sequence
  Antisense compound
ctttgtgcctccttaacgat

SEQ ID NO: 3336 - DNA, 20 bp, Artificial Sequence
  Antisense compound
actttgtgcctccttaacga

SEQ ID NO: 3337 - DNA, 20 bp, Artificial Sequence
  Antisense compound
cactttgtgcctccttaacg

SEQ ID NO: 3338 - DNA, 20 bp, Artificial Sequence
  Antisense compound
gcactttgtgcctccttaac

SEQ ID NO: 3339 - DNA, 20 bp, Artificial Sequence
  Antisense compound
agcactttgtgcctccttaa

SEQ ID NO: 3340 - DNA, 20 bp, Artificial Sequence
  Antisense compound
tagcactttgtgcctcctta

SEQ ID NO: 3341 - DNA, 20 bp, Artificial Sequence
  Antisense compound
ttagcactttgtgcctcctt

SEQ ID NO: 3342 - DNA, 20 bp, Artificial Sequence
  Antisense compound
attagcactttgtgcctcct

SEQ ID NO: 3343 - DNA, 20 bp, Artificial Sequence
  Antisense compound
gattagcactttgtgcctcc

SEQ ID NO: 3344 - DNA, 20 bp, Artificial Sequence
  Antisense compound
ggattagcactttgtgcctc

SEQ ID NO: 3345 - DNA, 20 bp, Artificial Sequence
  Antisense compound
aggattagcactttgtgcct

SEQ ID NO: 3346 - DNA, 20 bp, Artificial Sequence
  Antisense compound
taggattagcactttgtgcc

SEQ ID NO: 3347 - DNA, 20 bp, Artificial Sequence
  Antisense compound
ataggattagcactttgtgc

SEQ ID NO: 3348 - DNA, 20 bp, Artificial Sequence
  Antisense compound
cataggattagcactttgtg

SEQ ID NO: 3349 - DNA, 20 bp, Artificial Sequence
  Antisense compound
ccataggattagcactttgt

SEQ ID NO: 3350 - DNA, 20 bp, Artificial Sequence
  Antisense compound
accataggattagcactttg

SEQ ID NO: 3351 - DNA, 20 bp, Artificial Sequence
  Antisense compound
caccataggattagcacttt

SEQ ID NO: 3352 - DNA, 20 bp, Artificial Sequence
  Antisense compound
tcaccataggattagcactt

SEQ ID NO: 3353 - DNA, 20 bp, Artificial Sequence
  Antisense compound
atcaccataggattagcact

SEQ ID NO: 3354 - DNA, 20 bp, Artificial Sequence
  Antisense compound
aatcaccataggattagcac

SEQ ID NO: 3355 - DNA, 20 bp, Artificial Sequence
  Antisense compound
caatcaccataggattagca

SEQ ID NO: 3356 - DNA, 20 bp, Artificial Sequence
  Antisense compound
acaatcaccataggattagc

SEQ ID NO: 3357 - DNA, 20 bp, Artificial Sequence
  Antisense compound
tacaatcaccataggattag

SEQ ID NO: 3358 - DNA, 20 bp, Artificial Sequence
  Antisense compound
ttacaatcaccataggatta

SEQ ID NO: 3359 - DNA, 20 bp, Artificial Sequence
  Antisense compound
tttacaatcaccataggatt

SEQ ID NO: 3360 - DNA, 20 bp, Artificial Sequence
  Antisense compound
atttacaatcaccataggat

SEQ ID NO: 3361 - DNA, 20 bp, Artificial Sequence
  Antisense compound
catttacaatcaccatagga

SEQ ID NO: 3362 - DNA, 20 bp, Artificial Sequence
  Antisense compound
gcatttacaatcaccatagg

SEQ ID NO: 3363 - DNA, 20 bp, Artificial Sequence
  Antisense compound
agcatttacaatcaccatag

SEQ ID NO: 3364 - DNA, 20 bp, Artificial Sequence
  Antisense compound
cagcatttacaatcaccata

SEQ ID NO: 3365 - DNA, 20 bp, Artificial Sequence
  Antisense compound
gcagcatttacaatcaccat

SEQ ID NO: 3366 - DNA, 20 bp, Artificial Sequence
  Antisense compound
agcagcatttacaatcacca

SEQ ID NO: 3367 - DNA, 20 bp, Artificial Sequence
  Antisense compound
tagcagcatttacaatcacc

SEQ ID NO: 3368 - DNA, 20 bp, Artificial Sequence
  Antisense compound
ttagcagcatttacaatcac

SEQ ID NO: 3369 - DNA, 20 bp, Artificial Sequence
  Antisense compound
gttagcagcatttacaatca

SEQ ID NO: 3370 - DNA, 20 bp, Artificial Sequence
  Antisense compound
tgttagcagcatttacaatc

SEQ ID NO: 3371 - DNA, 20 bp, Artificial Sequence
  Antisense compound
atgttagcagcatttacaat

SEQ ID NO: 3372 - DNA, 20 bp, Artificial Sequence
  Antisense compound
tatgttagcagcatttacaa

SEQ ID NO: 3373 - DNA, 20 bp, Artificial Sequence
  Antisense compound
gtatgttagcagcatttaca

SEQ ID NO: 3374 - DNA, 20 bp, Artificial Sequence
  Antisense compound
tgtatgttagcagcatttac

SEQ ID NO: 3375 - DNA, 20 bp, Artificial Sequence
  Antisense compound
gtgtatgttagcagcattta

SEQ ID NO: 3376 - DNA, 20 bp, Artificial Sequence
  Antisense compound
ggtgtatgttagcagcattt

SEQ ID NO: 3377 - DNA, 20 bp, Artificial Sequence
  Antisense compound
aggtgtatgttagcagcatt

SEQ ID NO: 3378 - DNA, 20 bp, Artificial Sequence
  Antisense compound
caggtgtatgttagcagcat

SEQ ID NO: 3379 - DNA, 20 bp, Artificial Sequence
  Antisense compound
tcaggtgtatgttagcagca

SEQ ID NO: 3380 - DNA, 20 bp, Artificial Sequence
  Antisense compound
ttcaggtgtatgttagcagc

SEQ ID NO: 3381 - DNA, 20 bp, Artificial Sequence
  Antisense compound
tttcaggtgtatgttagcag

SEQ ID NO: 3382 - DNA, 20 bp, Artificial Sequence
  Antisense compound
gtttcaggtgtatgttagca

SEQ ID NO: 3383 - DNA, 20 bp, Artificial Sequence
  Antisense compound
tgtttcaggtgtatgttagc

SEQ ID NO: 3384 - DNA, 20 bp, Artificial Sequence
  Antisense compound
atgtttcaggtgtatgttag

SEQ ID NO: 3385 - DNA, 20 bp, Artificial Sequence
  Antisense compound
catgtttcaggtgtatgtta

SEQ ID NO: 3386 - DNA, 20 bp, Artificial Sequence
  Antisense compound
ccatgtttcaggtgtatgtt

SEQ ID NO: 3387 - DNA, 20 bp, Artificial Sequence
  Antisense compound
accatgtttcaggtgtatgt

SEQ ID NO: 3388 - DNA, 20 bp, Artificial Sequence
  Antisense compound
caccatgtttcaggtgtatg

SEQ ID NO: 3389 - DNA, 20 bp, Artificial Sequence
  Antisense compound
ccaccatgtttcaggtgtat

SEQ ID NO: 3390 - DNA, 20 bp, Artificial Sequence
  Antisense compound
accaccatgtttcaggtgta

SEQ ID NO: 3391 - DNA, 20 bp, Artificial Sequence
  Antisense compound
caccaccatgtttcaggtgt

SEQ ID NO: 3392 - DNA, 20 bp, Artificial Sequence
  Antisense compound
ccaccaccatgtttcaggtg

SEQ ID NO: 3393 - DNA, 20 bp, Artificial Sequence
  Antisense compound
accaccaccatgtttcaggt

SEQ ID NO: 3394 - DNA, 20 bp, Artificial Sequence
  Antisense compound
caccaccaccatgtttcagg

SEQ ID NO: 3395 - DNA, 20 bp, Artificial Sequence
  Antisense compound
acaccaccaccatgtttcag

SEQ ID NO: 3396 - DNA, 20 bp, Artificial Sequence
  Antisense compound
tacaccaccaccatgtttca

SEQ ID NO: 3397 - DNA, 20 bp, Artificial Sequence
  Antisense compound
ctacaccaccaccatgtttc

SEQ ID NO: 3398 - DNA, 20 bp, Artificial Sequence
  Antisense compound
gctacaccaccaccatgttt

SEQ ID NO: 3399 - DNA, 20 bp, Artificial Sequence
  Antisense compound
tgctacaccaccaccatgtt

SEQ ID NO: 3400 - DNA, 20 bp, Artificial Sequence
  Antisense compound
ctgctacaccaccaccatgt

SEQ ID NO: 3401 - DNA, 20 bp, Artificial Sequence
  Antisense compound
cctgctacaccaccaccatg

SEQ ID NO: 3402 - DNA, 20 bp, Artificial Sequence
  Antisense compound
acctgctacaccaccaccat

SEQ ID NO: 3403 - DNA, 20 bp, Artificial Sequence
  Antisense compound
cacctgctacaccaccacca

SEQ ID NO: 3404 - DNA, 20 bp, Artificial Sequence
  Antisense compound
gcacctgctacaccaccacc

SEQ ID NO: 3405 - DNA, 20 bp, Artificial Sequence
  Antisense compound
tgcacctgctacaccaccac

SEQ ID NO: 3406 - DNA, 20 bp, Artificial Sequence
  Antisense compound
gtgcacctgctacaccacca

SEQ ID NO: 3407 - DNA, 20 bp, Artificial Sequence
  Antisense compound
agtgcacctgctacaccacc

SEQ ID NO: 3408 - DNA, 20 bp, Artificial Sequence
  Antisense compound
gagtgcacctgctacaccac

SEQ ID NO: 3409 - DNA, 20 bp, Artificial Sequence
  Antisense compound
tgagtgcacctgctacacca

SEQ ID NO: 3410 - DNA, 20 bp, Artificial Sequence
  Antisense compound
ttgagtgcacctgctacacc

SEQ ID NO: 3411 - DNA, 20 bp, Artificial Sequence
  Antisense compound
gttgagtgcacctgctacac

SEQ ID NO: 3412 - DNA, 20 bp, Artificial Sequence
  Antisense compound
tgttgagtgcacctgctaca

SEQ ID NO: 3413 - DNA, 20 bp, Artificial Sequence
  Antisense compound
ttgttgagtgcacctgctac

SEQ ID NO: 3414 - DNA, 20 bp, Artificial Sequence
  Antisense compound
cttgttgagtgcacctgcta

SEQ ID NO: 3415 - DNA, 20 bp, Artificial Sequence
  Antisense compound
ccttgttgagtgcacctgct

SEQ ID NO: 3416 - DNA, 20 bp, Artificial Sequence
  Antisense compound
gccttgttgagtgcacctgc

SEQ ID NO: 3417 - DNA, 20 bp, Artificial Sequence
  Antisense compound
tgccttgttgagtgcacctg

SEQ ID NO: 3418 - DNA, 20 bp, Artificial Sequence
  Antisense compound
ttgccttgttgagtgcacct

SEQ ID NO: 3419 - DNA, 20 bp, Artificial Sequence
  Antisense compound
gttgccttgttgagtgcacc

SEQ ID NO: 3420 - DNA, 20 bp, Artificial Sequence
  Antisense compound
ggttgccttgttgagtgcac

SEQ ID NO: 3421 - DNA, 20 bp, Artificial Sequence
  Antisense compound
tggttgccttgttgagtgca

SEQ ID NO: 3422 - DNA, 20 bp, Artificial Sequence
  Antisense compound
ttggttgccttgttgagtgc

SEQ ID NO: 3423 - DNA, 20 bp, Artificial Sequence
  Antisense compound
attggttgccttgttgagtg

SEQ ID NO: 3424 - DNA, 20 bp, Artificial Sequence
  Antisense compound
cattggttgccttgttgagt

SEQ ID NO: 3425 - DNA, 20 bp, Artificial Sequence
  Antisense compound
ccattggttgccttgttgag

SEQ ID NO: 3426 - DNA, 20 bp, Artificial Sequence
  Antisense compound
accattggttgccttgttga

SEQ ID NO: 3427 - DNA, 20 bp, Artificial Sequence
  Antisense compound
caccattggttgccttgttg

SEQ ID NO: 3428 - DNA, 20 bp, Artificial Sequence
  Antisense compound
gcaccattggttgccttgtt

SEQ ID NO: 3429 - DNA, 20 bp, Artificial Sequence
  Antisense compound
ggcaccattggttgccttgt

SEQ ID NO: 3430 - DNA, 20 bp, Artificial Sequence
  Antisense compound
tggcaccattggttgccttg

SEQ ID NO: 3431 - DNA, 20 bp, Artificial Sequence
  Antisense compound
atggcaccattggttgcctt

SEQ ID NO: 3432 - DNA, 20 bp, Artificial Sequence
  Antisense compound
catggcaccattggttgcct

SEQ ID NO: 3433 - DNA, 20 bp, Artificial Sequence
  Antisense compound
gcatggcaccattggttgcc

SEQ ID NO: 3434 - DNA, 20 bp, Artificial Sequence
  Antisense compound
tgcatggcaccattggttgc

SEQ ID NO: 3435 - DNA, 20 bp, Artificial Sequence
  Antisense compound
ttgcatggcaccattggttg

SEQ ID NO: 3436 - DNA, 20 bp, Artificial Sequence
  Antisense compound
tttgcatggcaccattggtt

SEQ ID NO: 3437 - DNA, 20 bp, Artificial Sequence
  Antisense compound
ttttgcatggcaccattggt

SEQ ID NO: 3438 - DNA, 20 bp, Artificial Sequence
  Antisense compound
cttttgcatggcaccattgg

SEQ ID NO: 3439 - DNA, 20 bp, Artificial Sequence
  Antisense compound
ccttttgcatggcaccattg

SEQ ID NO: 3440 - DNA, 20 bp, Artificial Sequence
  Antisense compound
tccttttgcatggcaccatt

SEQ ID NO: 3441 - DNA, 20 bp, Artificial Sequence
  Antisense compound
ctccttttgcatggcaccat

SEQ ID NO: 3442 - DNA, 20 bp, Artificial Sequence
  Antisense compound
tctccttttgcatggcacca

SEQ ID NO: 3443 - DNA, 20 bp, Artificial Sequence
  Antisense compound
ctctccttttgcatggcacc

SEQ ID NO: 3444 - DNA, 20 bp, Artificial Sequence
  Antisense compound
actctccttttgcatggcac

SEQ ID NO: 3445 - DNA, 20 bp, Artificial Sequence
  Antisense compound
cactctccttttgcatggca

SEQ ID NO: 3446 - DNA, 20 bp, Artificial Sequence
  Antisense compound
tcactctccttttgcatggc

SEQ ID NO: 3447 - DNA, 20 bp, Artificial Sequence
  Antisense compound
atcactctccttttgcatgg

SEQ ID NO: 3448 - DNA, 20 bp, Artificial Sequence
  Antisense compound
catcactctccttttgcatg

SEQ ID NO: 3449 - DNA, 20 bp, Artificial Sequence
  Antisense compound
tcatcactctccttttgcat

SEQ ID NO: 3450 - DNA, 20 bp, Artificial Sequence
  Antisense compound
atcatcactctccttttgca

SEQ ID NO: 3451 - DNA, 20 bp, Artificial Sequence
  Antisense compound
aatcatcactctccttttgc

SEQ ID NO: 3452 - DNA, 20 bp, Artificial Sequence
  Antisense compound
taatcatcactctccttttg

SEQ ID NO: 3453 - DNA, 20 bp, Artificial Sequence
  Antisense compound
gtaatcatcactctcctttt

SEQ ID NO: 3454 - DNA, 20 bp, Artificial Sequence
  Antisense compound
tgtaatcatcactctccttt

SEQ ID NO: 3455 - DNA, 20 bp, Artificial Sequence
  Antisense compound
atgtaatcatcactctcctt

SEQ ID NO: 3456 - DNA, 20 bp, Artificial Sequence
  Antisense compound
aatgtaatcatcactctcct

SEQ ID NO: 3457 - DNA, 20 bp, Artificial Sequence
  Antisense compound
taatgtaatcatcactctcc

SEQ ID NO: 3458 - DNA, 20 bp, Artificial Sequence
  Antisense compound
ttaatgtaatcatcactctc

SEQ ID NO: 3459 - DNA, 20 bp, Artificial Sequence
  Antisense compound
cttaatgtaatcatcactct

SEQ ID NO: 3460 - DNA, 20 bp, Artificial Sequence
  Antisense compound
gcttaatgtaatcatcactc

SEQ ID NO: 3461 - DNA, 20 bp, Artificial Sequence
  Antisense compound
agcttaatgtaatcatcact

SEQ ID NO: 3462 - DNA, 20 bp, Artificial Sequence
  Antisense compound
tagcttaatgtaatcatcac

SEQ ID NO: 3463 - DNA, 20 bp, Artificial Sequence
  Antisense compound
ttagcttaatgtaatcatca

SEQ ID NO: 3464 - DNA, 20 bp, Artificial Sequence
  Antisense compound
tttagcttaatgtaatcatc

SEQ ID NO: 3465 - DNA, 20 bp, Artificial Sequence
  Antisense compound
atttagcttaatgtaatcat

SEQ ID NO: 3466 - DNA, 20 bp, Artificial Sequence
  Antisense compound
catttagcttaatgtaatca

SEQ ID NO: 3467 - DNA, 20 bp, Artificial Sequence
  Antisense compound
ccatttagcttaatgtaatc

SEQ ID NO: 3468 - DNA, 20 bp, Artificial Sequence
  Antisense compound
gccatttagcttaatgtaat

SEQ ID NO: 3469 - DNA, 20 bp, Artificial Sequence
  Antisense compound
ggccatttagcttaatgtaa

SEQ ID NO: 3470 - DNA, 20 bp, Artificial Sequence
  Antisense compound
gggccatttagcttaatgta

SEQ ID NO: 3471 - DNA, 20 bp, Artificial Sequence
  Antisense compound
agggccatttagcttaatgt

SEQ ID NO: 3472 - DNA, 20 bp, Artificial Sequence
  Antisense compound
gagggccatttagcttaatg

SEQ ID NO: 3473 - DNA, 20 bp, Artificial Sequence
  Antisense compound
agagggccatttagcttaat

SEQ ID NO: 3474 - DNA, 20 bp, Artificial Sequence
  Antisense compound
aagagggccatttagcttaa

SEQ ID NO: 3475 - DNA, 20 bp, Artificial Sequence
  Antisense compound
taagagggccatttagctta

SEQ ID NO: 3476 - DNA, 20 bp, Artificial Sequence
  Antisense compound
gtaagagggccatttagctt

SEQ ID NO: 3477 - DNA, 20 bp, Artificial Sequence
  Antisense compound
tgtaagagggccatttagct

SEQ ID NO: 3478 - DNA, 20 bp, Artificial Sequence
  Antisense compound
ctgtaagagggccatttagc

SEQ ID NO: 3479 - DNA, 20 bp, Artificial Sequence
  Antisense compound
actgtaagagggccatttag

SEQ ID NO: 3480 - DNA, 20 bp, Artificial Sequence
  Antisense compound
tactgtaagagggccattta

SEQ ID NO: 3481 - DNA, 20 bp, Artificial Sequence
  Antisense compound
ctactgtaagagggccattt

SEQ ID NO: 3482 - DNA, 20 bp, Artificial Sequence
  Antisense compound
cctactgtaagagggccatt

SEQ ID NO: 3483 - DNA, 20 bp, Artificial Sequence
  Antisense compound
tcctactgtaagagggccat

SEQ ID NO: 3484 - DNA, 20 bp, Artificial Sequence
  Antisense compound
ctcctactgtaagagggcca

SEQ ID NO: 3485 - DNA, 20 bp, Artificial Sequence
  Antisense compound
cctcctactgtaagagggcc

SEQ ID NO: 3486 - DNA, 20 bp, Artificial Sequence
  Antisense compound
ccctcctactgtaagagggc

SEQ ID NO: 3487 - DNA, 20 bp, Artificial Sequence
  Antisense compound
accctcctactgtaagaggg

SEQ ID NO: 3488 - DNA, 20 bp, Artificial Sequence
  Antisense compound
gaccctcctactgtaagagg

SEQ ID NO: 3489 - DNA, 20 bp, Artificial Sequence
  Antisense compound
agaccctcctactgtaagag

SEQ ID NO: 3490 - DNA, 20 bp, Artificial Sequence
  Antisense compound
aagaccctcctactgtaaga

SEQ ID NO: 3491 - DNA, 20 bp, Artificial Sequence
  Antisense compound
caagaccctcctactgtaag

SEQ ID NO: 3492 - DNA, 20 bp, Artificial Sequence
  Antisense compound
acaagaccctcctactgtaa

SEQ ID NO: 3493 - DNA, 20 bp, Artificial Sequence
  Antisense compound
aacaagaccctcctactgta

SEQ ID NO: 3494 - DNA, 20 bp, Artificial Sequence
  Antisense compound
aaacaagaccctcctactgt

SEQ ID NO: 3495 - DNA, 20 bp, Artificial Sequence
  Antisense compound
caaacaagaccctcctactg

SEQ ID NO: 3496 - DNA, 20 bp, Artificial Sequence
  Antisense compound
gcaaacaagaccctcctact

SEQ ID NO: 3497 - DNA, 20 bp, Artificial Sequence
  Antisense compound
agcaaacaagaccctcctac

SEQ ID NO: 3498 - DNA, 20 bp, Artificial Sequence
  Antisense compound
aagcaaacaagaccctccta

SEQ ID NO: 3499 - DNA, 20 bp, Artificial Sequence
  Antisense compound
aaagcaaacaagaccctcct

SEQ ID NO: 3500 - DNA, 20 bp, Artificial Sequence
  Antisense compound
gaaagcaaacaagaccctcc

SEQ ID NO: 3501 - DNA, 20 bp, Artificial Sequence
  Antisense compound
agaaagcaaacaagaccctc

SEQ ID NO: 3502 - DNA, 20 bp, Artificial Sequence
  Antisense compound
cagaaagcaaacaagaccct

SEQ ID NO: 3503 - DNA, 20 bp, Artificial Sequence
  Antisense compound
ccagaaagcaaacaagaccc

SEQ ID NO: 3504 - DNA, 20 bp, Artificial Sequence
  Antisense compound
tccagaaagcaaacaagacc

SEQ ID NO: 3505 - DNA, 20 bp, Artificial Sequence
  Antisense compound
gtccagaaagcaaacaagac

SEQ ID NO: 3506 - DNA, 20 bp, Artificial Sequence
  Antisense compound
tgtccagaaagcaaacaaga

SEQ ID NO: 3507 - DNA, 20 bp, Artificial Sequence
  Antisense compound
atgtccagaaagcaaacaag

SEQ ID NO: 3508 - DNA, 20 bp, Artificial Sequence
  Antisense compound
tatgtccagaaagcaaacaa

SEQ ID NO: 3509 - DNA, 20 bp, Artificial Sequence
  Antisense compound
ttatgtccagaaagcaaaca

SEQ ID NO: 3510 - DNA, 20 bp, Artificial Sequence
  Antisense compound
attatgtccagaaagcaaac

SEQ ID NO: 3511 - DNA, 20 bp, Artificial Sequence
  Antisense compound
gattatgtccagaaagcaaa

SEQ ID NO: 3512 - DNA, 20 bp, Artificial Sequence
  Antisense compound
agattatgtccagaaagcaa

SEQ ID NO: 3513 - DNA, 20 bp, Artificial Sequence
  Antisense compound
aagattatgtccagaaagca

SEQ ID NO: 3514 - DNA, 20 bp, Artificial Sequence
  Antisense compound
caagattatgtccagaaagc

SEQ ID NO: 3515 - DNA, 20 bp, Artificial Sequence
  Antisense compound
gcaagattatgtccagaaag

SEQ ID NO: 3516 - DNA, 20 bp, Artificial Sequence
  Antisense compound
agcaagattatgtccagaaa

SEQ ID NO: 3517 - DNA, 20 bp, Artificial Sequence
  Antisense compound
tagcaagattatgtccagaa

SEQ ID NO: 3518 - DNA, 20 bp, Artificial Sequence
  Antisense compound
ttagcaagattatgtccaga

SEQ ID NO: 3519 - DNA, 20 bp, Artificial Sequence
  Antisense compound
cttagcaagattatgtccag

SEQ ID NO: 3520 - DNA, 20 bp, Artificial Sequence
  Antisense compound
tcttagcaagattatgtcca

SEQ ID NO: 3521 - DNA, 20 bp, Artificial Sequence
  Antisense compound
ttcttagcaagattatgtcc

SEQ ID NO: 3522 - DNA, 20 bp, Artificial Sequence
  Antisense compound
cttcttagcaagattatgtc

SEQ ID NO: 3523 - DNA, 20 bp, Artificial Sequence
  Antisense compound
acttcttagcaagattatgt

SEQ ID NO: 3524 - DNA, 20 bp, Artificial Sequence
  Antisense compound
cacttcttagcaagattatg

SEQ ID NO: 3525 - DNA, 20 bp, Artificial Sequence
  Antisense compound
acacttcttagcaagattat

SEQ ID NO: 3526 - DNA, 20 bp, Artificial Sequence
  Antisense compound
gacacttcttagcaagatta

SEQ ID NO: 3527 - DNA, 20 bp, Artificial Sequence
  Antisense compound
agacacttcttagcaagatt

SEQ ID NO: 3528 - DNA, 20 bp, Artificial Sequence
  Antisense compound
cagacacttcttagcaagat

SEQ ID NO: 3529 - DNA, 20 bp, Artificial Sequence
  Antisense compound
gcagacacttcttagcaaga

SEQ ID NO: 3530 - DNA, 20 bp, Artificial Sequence
  Antisense compound
tgcagacacttcttagcaag

SEQ ID NO: 3531 - DNA, 20 bp, Artificial Sequence
  Antisense compound
atgcagacacttcttagcaa

SEQ ID NO: 3532 - DNA, 20 bp, Artificial Sequence
  Antisense compound
catgcagacacttcttagca

SEQ ID NO: 3533 - DNA, 20 bp, Artificial Sequence
  Antisense compound
acatgcagacacttcttagc

SEQ ID NO: 3534 - DNA, 20 bp, Artificial Sequence
  Antisense compound
aacatgcagacacttcttag

SEQ ID NO: 3535 - DNA, 20 bp, Artificial Sequence
  Antisense compound
caacatgcagacacttctta

SEQ ID NO: 3536 - DNA, 20 bp, Artificial Sequence
  Antisense compound
acaacatgcagacacttctt

SEQ ID NO: 3537 - DNA, 20 bp, Artificial Sequence
  Antisense compound
aacaacatgcagacacttct

SEQ ID NO: 3538 - DNA, 20 bp, Artificial Sequence
  Antisense compound
caacaacatgcagacacttc

SEQ ID NO: 3539 - DNA, 20 bp, Artificial Sequence
  Antisense compound
ccaacaacatgcagacactt

SEQ ID NO: 3540 - DNA, 20 bp, Artificial Sequence
  Antisense compound
tccaacaacatgcagacact

SEQ ID NO: 3541 - DNA, 20 bp, Artificial Sequence
  Antisense compound
gtccaacaacatgcagacac

SEQ ID NO: 3542 - DNA, 20 bp, Artificial Sequence
  Antisense compound
ggtccaacaacatgcagaca

SEQ ID NO: 3543 - DNA, 20 bp, Artificial Sequence
  Antisense compound
aggtccaacaacatgcagac

SEQ ID NO: 3544 - DNA, 20 bp, Artificial Sequence
  Antisense compound
taggtccaacaacatgcaga

SEQ ID NO: 3545 - DNA, 20 bp, Artificial Sequence
  Antisense compound
ttaggtccaacaacatgcag

SEQ ID NO: 3546 - DNA, 20 bp, Artificial Sequence
  Antisense compound
gttaggtccaacaacatgca

SEQ ID NO: 3547 - DNA, 20 bp, Artificial Sequence
  Antisense compound
ggttaggtccaacaacatgc

SEQ ID NO: 3548 - DNA, 20 bp, Artificial Sequence
  Antisense compound
aggttaggtccaacaacatg

SEQ ID NO: 3549 - DNA, 20 bp, Artificial Sequence
  Antisense compound
taggttaggtccaacaacat

SEQ ID NO: 3550 - DNA, 20 bp, Artificial Sequence
  Antisense compound
ttaggttaggtccaacaaca

SEQ ID NO: 3551 - DNA, 20 bp, Artificial Sequence
  Antisense compound
tttaggttaggtccaacaac

SEQ ID NO: 3552 - DNA, 20 bp, Artificial Sequence
  Antisense compound
atttaggttaggtccaacaa

SEQ ID NO: 3553 - DNA, 20 bp, Artificial Sequence
  Antisense compound
catttaggttaggtccaaca

SEQ ID NO: 3554 - DNA, 20 bp, Artificial Sequence
  Antisense compound
gcatttaggttaggtccaac

SEQ ID NO: 3555 - DNA, 20 bp, Artificial Sequence
  Antisense compound
tgcatttaggttaggtccaa

SEQ ID NO: 3556 - DNA, 20 bp, Artificial Sequence
  Antisense compound
ctgcatttaggttaggtcca

SEQ ID NO: 3557 - DNA, 20 bp, Artificial Sequence
  Antisense compound
cctgcatttaggttaggtcc

SEQ ID NO: 3558 - DNA, 20 bp, Artificial Sequence
  Antisense compound
acctgcatttaggttaggtc

SEQ ID NO: 3559 - DNA, 20 bp, Artificial Sequence
  Antisense compound
cacctgcatttaggttaggt

SEQ ID NO: 3560 - DNA, 20 bp, Artificial Sequence
  Antisense compound
tcacctgcatttaggttagg

SEQ ID NO: 3561 - DNA, 20 bp, Artificial Sequence
  Antisense compound
ctcacctgcatttaggttag

SEQ ID NO: 3562 - DNA, 20 bp, Artificial Sequence
  Antisense compound
cctcacctgcatttaggtta

SEQ ID NO: 3563 - DNA, 20 bp, Artificial Sequence
  Antisense compound
tcctcacctgcatttaggtt

SEQ ID NO: 3564 - DNA, 20 bp, Artificial Sequence
  Antisense compound
gtcctcacctgcatttaggt

SEQ ID NO: 3565 - DNA, 20 bp, Artificial Sequence
  Antisense compound
tgtcctcacctgcatttagg

SEQ ID NO: 3566 - DNA, 20 bp, Artificial Sequence
  Antisense compound
atgtcctcacctgcatttag

SEQ ID NO: 3567 - DNA, 20 bp, Artificial Sequence
  Antisense compound
gatgtcctcacctgcattta

SEQ ID NO: 3568 - DNA, 20 bp, Artificial Sequence
  Antisense compound
ggatgtcctcacctgcattt

SEQ ID NO: 3569 - DNA, 20 bp, Artificial Sequence
  Antisense compound
tggatgtcctcacctgcatt

SEQ ID NO: 3570 - DNA, 20 bp, Artificial Sequence
  Antisense compound
ctggatgtcctcacctgcat

SEQ ID NO: 3571 - DNA, 20 bp, Artificial Sequence
  Antisense compound
gctggatgtcctcacctgca

SEQ ID NO: 3572 - DNA, 20 bp, Artificial Sequence
  Antisense compound
agctggatgtcctcacctgc

SEQ ID NO: 3573 - DNA, 20 bp, Artificial Sequence
  Antisense compound
aagctggatgtcctcacctg

SEQ ID NO: 3574 - DNA, 20 bp, Artificial Sequence
  Antisense compound
gaagctggatgtcctcacct

SEQ ID NO: 3575 - DNA, 20 bp, Artificial Sequence
  Antisense compound
agaagctggatgtcctcacc

SEQ ID NO: 3576 - DNA, 20 bp, Artificial Sequence
  Antisense compound
aagaagctggatgtcctcac

SEQ ID NO: 3577 - DNA, 20 bp, Artificial Sequence
  Antisense compound
taagaagctggatgtcctca

SEQ ID NO: 3578 - DNA, 20 bp, Artificial Sequence
  Antisense compound
ttaagaagctggatgtcctc

SEQ ID NO: 3579 - DNA, 20 bp, Artificial Sequence
  Antisense compound
cttaagaagctggatgtcct

SEQ ID NO: 3580 - DNA, 20 bp, Artificial Sequence
  Antisense compound
ccttaagaagctggatgtcc

SEQ ID NO: 3581 - DNA, 20 bp, Artificial Sequence
  Antisense compound
gccttaagaagctggatgtc

SEQ ID NO: 3582 - DNA, 20 bp, Artificial Sequence
  Antisense compound
tgccttaagaagctggatgt

SEQ ID NO: 3583 - DNA, 20 bp, Artificial Sequence
  Antisense compound
ctgccttaagaagctggatg

SEQ ID NO: 3584 - DNA, 20 bp, Artificial Sequence
  Antisense compound
gctgccttaagaagctggat

SEQ ID NO: 3585 - DNA, 20 bp, Artificial Sequence
  Antisense compound
tgctgccttaagaagctgga

SEQ ID NO: 3586 - DNA, 20 bp, Artificial Sequence
  Antisense compound
atgctgccttaagaagctgg

SEQ ID NO: 3587 - DNA, 20 bp, Artificial Sequence
  Antisense compound
tatgctgccttaagaagctg

SEQ ID NO: 3588 - DNA, 20 bp, Artificial Sequence
  Antisense compound
atatgctgccttaagaagct

SEQ ID NO: 3589 - DNA, 20 bp, Artificial Sequence
  Antisense compound
catatgctgccttaagaagc

SEQ ID NO: 3590 - DNA, 20 bp, Artificial Sequence
  Antisense compound
tcatatgctgccttaagaag

SEQ ID NO: 3591 - DNA, 20 bp, Artificial Sequence
  Antisense compound
ttcatatgctgccttaagaa

SEQ ID NO: 3592 - DNA, 20 bp, Artificial Sequence
  Antisense compound
tttcatatgctgccttaaga

SEQ ID NO: 3593 - DNA, 20 bp, Artificial Sequence
  Antisense compound
ttttcatatgctgccttaag

SEQ ID NO: 3594 - DNA, 20 bp, Artificial Sequence
  Antisense compound
attttcatatgctgccttaa

SEQ ID NO: 3595 - DNA, 20 bp, Artificial Sequence
  Antisense compound
aattttcatatgctgcctta

SEQ ID NO: 3596 - DNA, 20 bp, Artificial Sequence
  Antisense compound
aaattttcatatgctgcctt

SEQ ID NO: 3597 - DNA, 20 bp, Artificial Sequence
  Antisense compound
gaaattttcatatgctgcct

SEQ ID NO: 3598 - DNA, 20 bp, Artificial Sequence
  Antisense compound
tgaaattttcatatgctgcc

SEQ ID NO: 3599 - DNA, 20 bp, Artificial Sequence
  Antisense compound
ttgaaattttcatatgctgc

SEQ ID NO: 3600 - DNA, 20 bp, Artificial Sequence
  Antisense compound
attgaaattttcatatgctg

SEQ ID NO: 3601 - DNA, 20 bp, Artificial Sequence
  Antisense compound
aattgaaattttcatatgct

SEQ ID NO: 3602 - DNA, 20 bp, Artificial Sequence
  Antisense compound
gaattgaaattttcatatgc

SEQ ID NO: 3603 - DNA, 20 bp, Artificial Sequence
  Antisense compound
tgaattgaaattttcatatg

SEQ ID NO: 3604 - DNA, 20 bp, Artificial Sequence
  Antisense compound
gtgaattgaaattttcatat

SEQ ID NO: 3605 - DNA, 20 bp, Artificial Sequence
  Antisense compound
tgtgaattgaaattttcata

SEQ ID NO: 3606 - DNA, 20 bp, Artificial Sequence
  Antisense compound
ctgtgaattgaaattttcat

SEQ ID NO: 3607 - DNA, 20 bp, Artificial Sequence
  Antisense compound
cctgtgaattgaaattttca

SEQ ID NO: 3608 - DNA, 20 bp, Artificial Sequence
  Antisense compound
tcctgtgaattgaaattttc

SEQ ID NO: 3609 - DNA, 20 bp, Artificial Sequence
  Antisense compound
gtcctgtgaattgaaatttt

SEQ ID NO: 3610 - DNA, 20 bp, Artificial Sequence
  Antisense compound
tgtcctgtgaattgaaattt

SEQ ID NO: 3611 - DNA, 20 bp, Artificial Sequence
  Antisense compound
atgtcctgtgaattgaaatt

SEQ ID NO: 3612 - DNA, 20 bp, Artificial Sequence
  Antisense compound
gatgtcctgtgaattgaaat

SEQ ID NO: 3613 - DNA, 20 bp, Artificial Sequence
  Antisense compound
agatgtcctgtgaattgaaa

SEQ ID NO: 3614 - DNA, 20 bp, Artificial Sequence
  Antisense compound
aagatgtcctgtgaattgaa

SEQ ID NO: 3615 - DNA, 20 bp, Artificial Sequence
  Antisense compound
taagatgtcctgtgaattga

SEQ ID NO: 3616 - DNA, 20 bp, Artificial Sequence
  Antisense compound
gtaagatgtcctgtgaattg

SEQ ID NO: 3617 - DNA, 20 bp, Artificial Sequence
  Antisense compound
agtaagatgtcctgtgaatt

SEQ ID NO: 3618 - DNA, 20 bp, Artificial Sequence
  Antisense compound
aagtaagatgtcctgtgaat

SEQ ID NO: 3619 - DNA, 20 bp, Artificial Sequence
  Antisense compound
caagtaagatgtcctgtgaa

SEQ ID NO: 3620 - DNA, 20 bp, Artificial Sequence
  Antisense compound
gcaagtaagatgtcctgtga

SEQ ID NO: 3621 - DNA, 20 bp, Artificial Sequence
  Antisense compound
tgcaagtaagatgtcctgtg

SEQ ID NO: 3622 - DNA, 20 bp, Artificial Sequence
  Antisense compound
gtgcaagtaagatgtcctgt

SEQ ID NO: 3623 - DNA, 20 bp, Artificial Sequence
  Antisense compound
ggtgcaagtaagatgtcctg

SEQ ID NO: 3624 - DNA, 20 bp, Artificial Sequence
  Antisense compound
tggtgcaagtaagatgtcct

SEQ ID NO: 3625 - DNA, 20 bp, Artificial Sequence
  Antisense compound
atggtgcaagtaagatgtcc

SEQ ID NO: 3626 - DNA, 20 bp, Artificial Sequence
  Antisense compound
aatggtgcaagtaagatgtc

SEQ ID NO: 3627 - DNA, 20 bp, Artificial Sequence
  Antisense compound
caatggtgcaagtaagatgt

SEQ ID NO: 3628 - DNA, 20 bp, Artificial Sequence
  Antisense compound
acaatggtgcaagtaagatg

SEQ ID NO: 3629 - DNA, 20 bp, Artificial Sequence
  Antisense compound
aacaatggtgcaagtaagat

SEQ ID NO: 3630 - DNA, 20 bp, Artificial Sequence
  Antisense compound
caacaatggtgcaagtaaga

SEQ ID NO: 3631 - DNA, 20 bp, Artificial Sequence
  Antisense compound
acaacaatggtgcaagtaag

SEQ ID NO: 3632 - DNA, 20 bp, Artificial Sequence
  Antisense compound
gacaacaatggtgcaagtaa

SEQ ID NO: 3633 - DNA, 20 bp, Artificial Sequence
  Antisense compound
tgacaacaatggtgcaagta

SEQ ID NO: 3634 - DNA, 20 bp, Artificial Sequence
  Antisense compound
ctgacaacaatggtgcaagt

SEQ ID NO: 3635 - DNA, 20 bp, Artificial Sequence
  Antisense compound
gctgacaacaatggtgcaag

SEQ ID NO: 3636 - DNA, 20 bp, Artificial Sequence
  Antisense compound
tgctgacaacaatggtgcaa

SEQ ID NO: 3637 - DNA, 20 bp, Artificial Sequence
  Antisense compound
ctgctgacaacaatggtgca

SEQ ID NO: 3638 - DNA, 20 bp, Artificial Sequence
  Antisense compound
cctgctgacaacaatggtgc

SEQ ID NO: 3639 - DNA, 20 bp, Artificial Sequence
  Antisense compound
gcctgctgacaacaatggtg

SEQ ID NO: 3640 - DNA, 20 bp, Artificial Sequence
  Antisense compound
tgcctgctgacaacaatggt

SEQ ID NO: 3641 - DNA, 20 bp, Artificial Sequence
  Antisense compound
atgcctgctgacaacaatgg

SEQ ID NO: 3642 - DNA, 20 bp, Artificial Sequence
  Antisense compound
tatgcctgctgacaacaatg

SEQ ID NO: 3643 - DNA, 20 bp, Artificial Sequence
  Antisense compound
atatgcctgctgacaacaat

SEQ ID NO: 3644 - DNA, 20 bp, Artificial Sequence
  Antisense compound
aatatgcctgctgacaacaa

SEQ ID NO: 3645 - DNA, 20 bp, Artificial Sequence
  Antisense compound
aaatatgcctgctgacaaca

SEQ ID NO: 3646 - DNA, 20 bp, Artificial Sequence
  Antisense compound
caaatatgcctgctgacaac

SEQ ID NO: 3647 - DNA, 20 bp, Artificial Sequence
  Antisense compound
ccaaatatgcctgctgacaa

SEQ ID NO: 3648 - DNA, 20 bp, Artificial Sequence
  Antisense compound
accaaatatgcctgctgaca

SEQ ID NO: 3649 - DNA, 20 bp, Artificial Sequence
  Antisense compound
caccaaatatgcctgctgac

SEQ ID NO: 3650 - DNA, 20 bp, Artificial Sequence
  Antisense compound
gcaccaaatatgcctgctga

SEQ ID NO: 3651 - DNA, 20 bp, Artificial Sequence
  Antisense compound
agcaccaaatatgcctgctg

SEQ ID NO: 3652 - DNA, 20 bp, Artificial Sequence
  Antisense compound
tagcaccaaatatgcctgct

SEQ ID NO: 3653 - DNA, 20 bp, Artificial Sequence
  Antisense compound
ttagcaccaaatatgcctgc

SEQ ID NO: 3654 - DNA, 20 bp, Artificial Sequence
  Antisense compound
tttagcaccaaatatgcctg

SEQ ID NO: 3655 - DNA, 20 bp, Artificial Sequence
  Antisense compound
gtttagcaccaaatatgcct

SEQ ID NO: 3656 - DNA, 20 bp, Artificial Sequence
  Antisense compound
ggtttagcaccaaatatgcc

SEQ ID NO: 3657 - DNA, 20 bp, Artificial Sequence
  Antisense compound
tggtttagcaccaaatatgc

SEQ ID NO: 3658 - DNA, 20 bp, Artificial Sequence
  Antisense compound
gtggtttagcaccaaatatg

SEQ ID NO: 3659 - DNA, 20 bp, Artificial Sequence
  Antisense compound
agtggtttagcaccaaatat

SEQ ID NO: 3660 - DNA, 20 bp, Artificial Sequence
  Antisense compound
aagtggtttagcaccaaata

SEQ ID NO: 3661 - DNA, 20 bp, Artificial Sequence
  Antisense compound
gaagtggtttagcaccaaat

SEQ ID NO: 3662 - DNA, 20 bp, Artificial Sequence
  Antisense compound
tgaagtggtttagcaccaaa

SEQ ID NO: 3663 - DNA, 20 bp, Artificial Sequence
  Antisense compound
ctgaagtggtttagcaccaa

SEQ ID NO: 3664 - DNA, 20 bp, Artificial Sequence
  Antisense compound
actgaagtggtttagcacca

SEQ ID NO: 3665 - DNA, 20 bp, Artificial Sequence
  Antisense compound
gactgaagtggtttagcacc

SEQ ID NO: 3666 - DNA, 20 bp, Artificial Sequence
  Antisense compound
agactgaagtggtttagcac

SEQ ID NO: 3667 - DNA, 20 bp, Artificial Sequence
  Antisense compound
aagactgaagtggtttagca

SEQ ID NO: 3668 - DNA, 20 bp, Artificial Sequence
  Antisense compound
aaagactgaagtggtttagc

SEQ ID NO: 3669 - DNA, 20 bp, Artificial Sequence
  Antisense compound
taaagactgaagtggtttag

SEQ ID NO: 3670 - DNA, 20 bp, Artificial Sequence
  Antisense compound
gtaaagactgaagtggttta

SEQ ID NO: 3671 - DNA, 20 bp, Artificial Sequence
  Antisense compound
tgtaaagactgaagtggttt

SEQ ID NO: 3672 - DNA, 20 bp, Artificial Sequence
  Antisense compound
ttgtaaagactgaagtggtt

SEQ ID NO: 3673 - DNA, 20 bp, Artificial Sequence
  Antisense compound
cttgtaaagactgaagtggt

SEQ ID NO: 3674 - DNA, 20 bp, Artificial Sequence
  Antisense compound
acttgtaaagactgaagtgg

SEQ ID NO: 3675 - DNA, 20 bp, Artificial Sequence
  Antisense compound
cacttgtaaagactgaagtg

SEQ ID NO: 3676 - DNA, 20 bp, Artificial Sequence
  Antisense compound
acacttgtaaagactgaagt

SEQ ID NO: 3677 - DNA, 20 bp, Artificial Sequence
  Antisense compound
cacacttgtaaagactgaag

SEQ ID NO: 3678 - DNA, 20 bp, Artificial Sequence
  Antisense compound
gcacacttgtaaagactgaa

SEQ ID NO: 3679 - DNA, 20 bp, Artificial Sequence
  Antisense compound
cgcacacttgtaaagactga

SEQ ID NO: 3680 - DNA, 20 bp, Artificial Sequence
  Antisense compound
acgcacacttgtaaagactg

SEQ ID NO: 3681 - DNA, 20 bp, Artificial Sequence
  Antisense compound
cacgcacacttgtaaagact

SEQ ID NO: 3682 - DNA, 20 bp, Artificial Sequence
  Antisense compound
gcacgcacacttgtaaagac

SEQ ID NO: 3683 - DNA, 20 bp, Artificial Sequence
  Antisense compound
tgcacgcacacttgtaaaga

SEQ ID NO: 3684 - DNA, 20 bp, Artificial Sequence
  Antisense compound
ctgcacgcacacttgtaaag

SEQ ID NO: 3685 - DNA, 20 bp, Artificial Sequence
  Antisense compound
tctgcacgcacacttgtaaa

SEQ ID NO: 3686 - DNA, 20 bp, Artificial Sequence
  Antisense compound
gtctgcacgcacacttgtaa

SEQ ID NO: 3687 - DNA, 20 bp, Artificial Sequence
  Antisense compound
cgtctgcacgcacacttgta

SEQ ID NO: 3688 - DNA, 20 bp, Artificial Sequence
  Antisense compound
ccgtctgcacgcacacttgt

SEQ ID NO: 3689 - DNA, 20 bp, Artificial Sequence
  Antisense compound
accgtctgcacgcacacttg

SEQ ID NO: 3690 - DNA, 20 bp, Artificial Sequence
  Antisense compound
aaccgtctgcacgcacactt

SEQ ID NO: 3691 - DNA, 20 bp, Artificial Sequence
  Antisense compound
gaaccgtctgcacgcacact

SEQ ID NO: 3692 - DNA, 20 bp, Artificial Sequence
  Antisense compound
cgaaccgtctgcacgcacac

SEQ ID NO: 3693 - DNA, 20 bp, Artificial Sequence
  Antisense compound
acgaaccgtctgcacgcaca

SEQ ID NO: 3694 - DNA, 20 bp, Artificial Sequence
  Antisense compound
tacgaaccgtctgcacgcac

SEQ ID NO: 3695 - DNA, 20 bp, Artificial Sequence
  Antisense compound
gtacgaaccgtctgcacgca

SEQ ID NO: 3696 - DNA, 20 bp, Artificial Sequence
  Antisense compound
tgtacgaaccgtctgcacgc

SEQ ID NO: 3697 - DNA, 20 bp, Artificial Sequence
  Antisense compound
gtgtacgaaccgtctgcacg

SEQ ID NO: 3698 - DNA, 20 bp, Artificial Sequence
  Antisense compound
tgtgtacgaaccgtctgcac

SEQ ID NO: 3699 - DNA, 20 bp, Artificial Sequence
  Antisense compound
ctgtgtacgaaccgtctgca

SEQ ID NO: 3700 - DNA, 20 bp, Artificial Sequence
  Antisense compound
cctgtgtacgaaccgtctgc

SEQ ID NO: 3701 - DNA, 20 bp, Artificial Sequence
  Antisense compound
acctgtgtacgaaccgtctg

SEQ ID NO: 3702 - DNA, 20 bp, Artificial Sequence
  Antisense compound
aacctgtgtacgaaccgtct

SEQ ID NO: 3703 - DNA, 20 bp, Artificial Sequence
  Antisense compound
aaacctgtgtacgaaccgtc

SEQ ID NO: 3704 - DNA, 20 bp, Artificial Sequence
  Antisense compound
taaacctgtgtacgaaccgt

SEQ ID NO: 3705 - DNA, 20 bp, Artificial Sequence
  Antisense compound
ataaacctgtgtacgaaccg

SEQ ID NO: 3706 - DNA, 20 bp, Artificial Sequence
  Antisense compound
tataaacctgtgtacgaacc

SEQ ID NO: 3707 - DNA, 20 bp, Artificial Sequence
  Antisense compound
atataaacctgtgtacgaac

SEQ ID NO: 3708 - DNA, 20 bp, Artificial Sequence
  Antisense compound
aatataaacctgtgtacgaa

SEQ ID NO: 3709 - DNA, 20 bp, Artificial Sequence
  Antisense compound
caatataaacctgtgtacga

SEQ ID NO: 3710 - DNA, 20 bp, Artificial Sequence
  Antisense compound
gcaatataaacctgtgtacg

SEQ ID NO: 3711 - DNA, 20 bp, Artificial Sequence
  Antisense compound
tgcaatataaacctgtgtac

SEQ ID NO: 3712 - DNA, 20 bp, Artificial Sequence
  Antisense compound
ctgcaatataaacctgtgta

SEQ ID NO: 3713 - DNA, 20 bp, Artificial Sequence
  Antisense compound
actgcaatataaacctgtgt

SEQ ID NO: 3714 - DNA, 20 bp, Artificial Sequence
  Antisense compound
gactgcaatataaacctgtg

SEQ ID NO: 3715 - DNA, 20 bp, Artificial Sequence
  Antisense compound
tgactgcaatataaacctgt

SEQ ID NO: 3716 - DNA, 20 bp, Artificial Sequence
  Antisense compound
ttgactgcaatataaacctg

SEQ ID NO: 3717 - DNA, 20 bp, Artificial Sequence
  Antisense compound
attgactgcaatataaacct

SEQ ID NO: 3718 - DNA, 20 bp, Artificial Sequence
  Antisense compound
cattgactgcaatataaacc

SEQ ID NO: 3719 - DNA, 20 bp, Artificial Sequence
  Antisense compound
tcattgactgcaatataaac

SEQ ID NO: 3720 - DNA, 20 bp, Artificial Sequence
  Antisense compound
gtcattgactgcaatataaa

SEQ ID NO: 3721 - DNA, 20 bp, Artificial Sequence
  Antisense compound
tgtcattgactgcaatataa

SEQ ID NO: 3722 - DNA, 20 bp, Artificial Sequence
  Antisense compound
ttgtcattgactgcaatata

SEQ ID NO: 3723 - DNA, 20 bp, Artificial Sequence
  Antisense compound
tttgtcattgactgcaatat

SEQ ID NO: 3724 - DNA, 20 bp, Artificial Sequence
  Antisense compound
ctttgtcattgactgcaata

SEQ ID NO: 3725 - DNA, 20 bp, Artificial Sequence
  Antisense compound
gctttgtcattgactgcaat

SEQ ID NO: 3726 - DNA, 20 bp, Artificial Sequence
  Antisense compound
agctttgtcattgactgcaa

SEQ ID NO: 3727 - DNA, 20 bp, Artificial Sequence
  Antisense compound
gagctttgtcattgactgca

SEQ ID NO: 3728 - DNA, 20 bp, Artificial Sequence
  Antisense compound
agagctttgtcattgactgc

SEQ ID NO: 3729 - DNA, 20 bp, Artificial Sequence
  Antisense compound
aagagctttgtcattgactg

SEQ ID NO: 3730 - DNA, 20 bp, Artificial Sequence
  Antisense compound
aaagagctttgtcattgact

SEQ ID NO: 3731 - DNA, 20 bp, Artificial Sequence
  Antisense compound
taaagagctttgtcattgac

SEQ ID NO: 3732 - DNA, 20 bp, Artificial Sequence
  Antisense compound
ataaagagctttgtcattga

SEQ ID NO: 3733 - DNA, 20 bp, Artificial Sequence
  Antisense compound
cataaagagctttgtcattg

SEQ ID NO: 3734 - DNA, 20 bp, Artificial Sequence
  Antisense compound
tcataaagagctttgtcatt

SEQ ID NO: 3735 - DNA, 20 bp, Artificial Sequence
  Antisense compound
ctcataaagagctttgtcat

SEQ ID NO: 3736 - DNA, 20 bp, Artificial Sequence
  Antisense compound
gctcataaagagctttgtca

SEQ ID NO: 3737 - DNA, 20 bp, Artificial Sequence
  Antisense compound
tgctcataaagagctttgtc

SEQ ID NO: 3738 - DNA, 20 bp, Artificial Sequence
  Antisense compound
ctgctcataaagagctttgt

SEQ ID NO: 3739 - DNA, 20 bp, Artificial Sequence
  Antisense compound
cctgctcataaagagctttg

SEQ ID NO: 3740 - DNA, 20 bp, Artificial Sequence
  Antisense compound
acctgctcataaagagcttt

SEQ ID NO: 3741 - DNA, 20 bp, Artificial Sequence
  Antisense compound
aacctgctcataaagagctt

SEQ ID NO: 3742 - DNA, 20 bp, Artificial Sequence
  Antisense compound
caacctgctcataaagagct

SEQ ID NO: 3743 - DNA, 20 bp, Artificial Sequence
  Antisense compound
acaacctgctcataaagagc

SEQ ID NO: 3744 - DNA, 20 bp, Artificial Sequence
  Antisense compound
gacaacctgctcataaagag

SEQ ID NO: 3745 - DNA, 20 bp, Artificial Sequence
  Antisense compound
tgacaacctgctcataaaga

SEQ ID NO: 3746 - DNA, 20 bp, Artificial Sequence
  Antisense compound
atgacaacctgctcataaag

SEQ ID NO: 3747 - DNA, 20 bp, Artificial Sequence
  Antisense compound
catgacaacctgctcataaa

SEQ ID NO: 3748 - DNA, 20 bp, Artificial Sequence
  Antisense compound
ccatgacaacctgctcataa

SEQ ID NO: 3749 - DNA, 20 bp, Artificial Sequence
  Antisense compound
tccatgacaacctgctcata

SEQ ID NO: 3750 - DNA, 20 bp, Artificial Sequence
  Antisense compound
atccatgacaacctgctcat

SEQ ID NO: 3751 - DNA, 20 bp, Artificial Sequence
  Antisense compound
aatccatgacaacctgctca

SEQ ID NO: 3752 - DNA, 20 bp, Artificial Sequence
  Antisense compound
taatccatgacaacctgctc

SEQ ID NO: 3753 - DNA, 20 bp, Artificial Sequence
  Antisense compound
ataatccatgacaacctgct

SEQ ID NO: 3754 - DNA, 20 bp, Artificial Sequence
  Antisense compound
gataatccatgacaacctgc

SEQ ID NO: 3755 - DNA, 20 bp, Artificial Sequence
  Antisense compound
agataatccatgacaacctg

SEQ ID NO: 3756 - DNA, 20 bp, Artificial Sequence
  Antisense compound
aagataatccatgacaacct

SEQ ID NO: 3757 - DNA, 20 bp, Artificial Sequence
  Antisense compound
caagataatccatgacaacc

SEQ ID NO: 3758 - DNA, 20 bp, Artificial Sequence
  Antisense compound
tcaagataatccatgacaac

SEQ ID NO: 3759 - DNA, 20 bp, Artificial Sequence
  Antisense compound
atcaagataatccatgacaa

SEQ ID NO: 3760 - DNA, 20 bp, Artificial Sequence
  Antisense compound
tatcaagataatccatgaca

SEQ ID NO: 3761 - DNA, 20 bp, Artificial Sequence
  Antisense compound
ttatcaagataatccatgac

SEQ ID NO: 3762 - DNA, 20 bp, Artificial Sequence
  Antisense compound
gttatcaagataatccatga

SEQ ID NO: 3763 - DNA, 20 bp, Artificial Sequence
  Antisense compound
ggttatcaagataatccatg

SEQ ID NO: 3764 - DNA, 20 bp, Artificial Sequence
  Antisense compound
aggttatcaagataatccat

SEQ ID NO: 3765 - DNA, 20 bp, Artificial Sequence
  Antisense compound
caggttatcaagataatcca

SEQ ID NO: 3766 - DNA, 20 bp, Artificial Sequence
  Antisense compound
tcaggttatcaagataatcc

SEQ ID NO: 3767 - DNA, 20 bp, Artificial Sequence
  Antisense compound
ttcaggttatcaagataatc

SEQ ID NO: 3768 - DNA, 20 bp, Artificial Sequence
  Antisense compound
cttcaggttatcaagataat

SEQ ID NO: 3769 - DNA, 20 bp, Artificial Sequence
  Antisense compound
gcttcaggttatcaagataa

SEQ ID NO: 3770 - DNA, 20 bp, Artificial Sequence
  Antisense compound
ggcttcaggttatcaagata

SEQ ID NO: 3771 - DNA, 20 bp, Artificial Sequence
  Antisense compound
aggcttcaggttatcaagat

SEQ ID NO: 3772 - DNA, 20 bp, Artificial Sequence
  Antisense compound
taggcttcaggttatcaaga

SEQ ID NO: 3773 - DNA, 20 bp, Artificial Sequence
  Antisense compound
ctaggcttcaggttatcaag

SEQ ID NO: 3774 - DNA, 20 bp, Artificial Sequence
  Antisense compound
tctaggcttcaggttatcaa

SEQ ID NO: 3775 - DNA, 20 bp, Artificial Sequence
  Antisense compound
ctctaggcttcaggttatca

SEQ ID NO: 3776 - DNA, 20 bp, Artificial Sequence
  Antisense compound
actctaggcttcaggttatc

SEQ ID NO: 3777 - DNA, 20 bp, Artificial Sequence
  Antisense compound
cactctaggcttcaggttat

SEQ ID NO: 3778 - DNA, 20 bp, Artificial Sequence
  Antisense compound
ccactctaggcttcaggtta

SEQ ID NO: 3779 - DNA, 20 bp, Artificial Sequence
  Antisense compound
tccactctaggcttcaggtt

SEQ ID NO: 3780 - DNA, 20 bp, Artificial Sequence
  Antisense compound
ttccactctaggcttcaggt

SEQ ID NO: 3781 - DNA, 20 bp, Artificial Sequence
  Antisense compound
cttccactctaggcttcagg

SEQ ID NO: 3782 - DNA, 20 bp, Artificial Sequence
  Antisense compound
gcttccactctaggcttcag

SEQ ID NO: 3783 - DNA, 20 bp, Artificial Sequence
  Antisense compound
tgcttccactctaggcttca

SEQ ID NO: 3784 - DNA, 20 bp, Artificial Sequence
  Antisense compound
gtgcttccactctaggcttc

SEQ ID NO: 3785 - DNA, 20 bp, Artificial Sequence
  Antisense compound
ggtgcttccactctaggctt

SEQ ID NO: 3786 - DNA, 20 bp, Artificial Sequence
  Antisense compound
aggtgcttccactctaggct

SEQ ID NO: 3787 - DNA, 20 bp, Artificial Sequence
  Antisense compound
taggtgcttccactctaggc

SEQ ID NO: 3788 - DNA, 20 bp, Artificial Sequence
  Antisense compound
ttaggtgcttccactctagg

SEQ ID NO: 3789 - DNA, 20 bp, Artificial Sequence
  Antisense compound
tttaggtgcttccactctag

SEQ ID NO: 3790 - DNA, 20 bp, Artificial Sequence
  Antisense compound
gtttaggtgcttccactcta

SEQ ID NO: 3791 - DNA, 20 bp, Artificial Sequence
  Antisense compound
tgtttaggtgcttccactct

SEQ ID NO: 3792 - DNA, 20 bp, Artificial Sequence
  Antisense compound
ttgtttaggtgcttccactc

SEQ ID NO: 3793 - DNA, 20 bp, Artificial Sequence
  Antisense compound
cttgtttaggtgcttccact

SEQ ID NO: 3794 - DNA, 20 bp, Artificial Sequence
  Antisense compound
tcttgtttaggtgcttccac

SEQ ID NO: 3795 - DNA, 20 bp, Artificial Sequence
  Antisense compound
ctcttgtttaggtgcttcca

SEQ ID NO: 3796 - DNA, 20 bp, Artificial Sequence
  Antisense compound
cctcttgtttaggtgcttcc

SEQ ID NO: 3797 - DNA, 20 bp, Artificial Sequence
  Antisense compound
tcctcttgtttaggtgcttc

SEQ ID NO: 3798 - DNA, 20 bp, Artificial Sequence
  Antisense compound
ctcctcttgtttaggtgctt

SEQ ID NO: 3799 - DNA, 20 bp, Artificial Sequence
  Antisense compound
gctcctcttgtttaggtgct

SEQ ID NO: 3800 - DNA, 20 bp, Artificial Sequence
  Antisense compound
ggctcctcttgtttaggtgc

SEQ ID NO: 3801 - DNA, 20 bp, Artificial Sequence
  Antisense compound
tggctcctcttgtttaggtg

SEQ ID NO: 3802 - DNA, 20 bp, Artificial Sequence
  Antisense compound
gtggctcctcttgtttaggt

SEQ ID NO: 3803 - DNA, 20 bp, Artificial Sequence
  Antisense compound
ggtggctcctcttgtttagg

SEQ ID NO: 3804 - DNA, 20 bp, Artificial Sequence
  Antisense compound
tggtggctcctcttgtttag

SEQ ID NO: 3805 - DNA, 20 bp, Artificial Sequence
  Antisense compound
ttggtggctcctcttgttta

SEQ ID NO: 3806 - DNA, 20 bp, Artificial Sequence
  Antisense compound
tttggtggctcctcttgttt

SEQ ID NO: 3807 - DNA, 20 bp, Artificial Sequence
  Antisense compound
gtttggtggctcctcttgtt

SEQ ID NO: 3808 - DNA, 20 bp, Artificial Sequence
  Antisense compound
tgtttggtggctcctcttgt

SEQ ID NO: 3809 - DNA, 20 bp, Artificial Sequence
  Antisense compound
gtgtttggtggctcctcttg

SEQ ID NO: 3810 - DNA, 20 bp, Artificial Sequence
  Antisense compound
tgtgtttggtggctcctctt

SEQ ID NO: 3811 - DNA, 20 bp, Artificial Sequence
  Antisense compound
ctgtgtttggtggctcctct

SEQ ID NO: 3812 - DNA, 20 bp, Artificial Sequence
  Antisense compound
tctgtgtttggtggctcctc

SEQ ID NO: 3813 - DNA, 20 bp, Artificial Sequence
  Antisense compound
ttctgtgtttggtggctcct

SEQ ID NO: 3814 - DNA, 20 bp, Artificial Sequence
  Antisense compound
cttctgtgtttggtggctcc

SEQ ID NO: 3815 - DNA, 20 bp, Artificial Sequence
  Antisense compound
tcttctgtgtttggtggctc

SEQ ID NO: 3816 - DNA, 20 bp, Artificial Sequence
  Antisense compound
atcttctgtgtttggtggct

SEQ ID NO: 3817 - DNA, 20 bp, Artificial Sequence
  Antisense compound
aatcttctgtgtttggtggc

SEQ ID NO: 3818 - DNA, 20 bp, Artificial Sequence
  Antisense compound
gaatcttctgtgtttggtgg

SEQ ID NO: 3819 - DNA, 20 bp, Artificial Sequence
  Antisense compound
ggaatcttctgtgtttggtg

SEQ ID NO: 3820 - DNA, 20 bp, Artificial Sequence
  Antisense compound
tggaatcttctgtgtttggt

SEQ ID NO: 3821 - DNA, 20 bp, Artificial Sequence
  Antisense compound
ttggaatcttctgtgtttgg

SEQ ID NO: 3822 - DNA, 20 bp, Artificial Sequence
  Antisense compound
tttggaatcttctgtgtttg

SEQ ID NO: 3823 - DNA, 20 bp, Artificial Sequence
  Antisense compound
ttttggaatcttctgtgttt

SEQ ID NO: 3824 - DNA, 20 bp, Artificial Sequence
  Antisense compound
gttttggaatcttctgtgtt

SEQ ID NO: 3825 - DNA, 20 bp, Artificial Sequence
  Antisense compound
agttttggaatcttctgtgt

SEQ ID NO: 3826 - DNA, 20 bp, Artificial Sequence
  Antisense compound
cagttttggaatcttctgtg

SEQ ID NO: 3827 - DNA, 20 bp, Artificial Sequence
  Antisense compound
tcagttttggaatcttctgt

SEQ ID NO: 3828 - DNA, 20 bp, Artificial Sequence
  Antisense compound
ctcagttttggaatcttctg

SEQ ID NO: 3829 - DNA, 20 bp, Artificial Sequence
  Antisense compound
cctcagttttggaatcttct

SEQ ID NO: 3830 - DNA, 20 bp, Artificial Sequence
  Antisense compound
tcctcagttttggaatcttc

SEQ ID NO: 3831 - DNA, 20 bp, Artificial Sequence
  Antisense compound
ctcctcagttttggaatctt

SEQ ID NO: 3832 - DNA, 20 bp, Artificial Sequence
  Antisense compound
tctcctcagttttggaatct

SEQ ID NO: 3833 - DNA, 20 bp, Artificial Sequence
  Antisense compound
ttctcctcagttttggaatc

SEQ ID NO: 3834 - DNA, 20 bp, Artificial Sequence
  Antisense compound
tttctcctcagttttggaat

SEQ ID NO: 3835 - DNA, 20 bp, Artificial Sequence
  Antisense compound
atttctcctcagttttggaa

SEQ ID NO: 3836 - DNA, 20 bp, Artificial Sequence
  Antisense compound
gatttctcctcagttttgga

SEQ ID NO: 3837 - DNA, 20 bp, Artificial Sequence
  Antisense compound
agatttctcctcagttttgg

SEQ ID NO: 3838 - DNA, 20 bp, Artificial Sequence
  Antisense compound
cagatttctcctcagttttg

SEQ ID NO: 3839 - DNA, 20 bp, Artificial Sequence
  Antisense compound
acagatttctcctcagtttt

SEQ ID NO: 3840 - DNA, 20 bp, Artificial Sequence
  Antisense compound
gacagatttctcctcagttt

SEQ ID NO: 3841 - DNA, 20 bp, Artificial Sequence
  Antisense compound
cgacagatttctcctcagtt

SEQ ID NO: 3842 - DNA, 20 bp, Artificial Sequence
  Antisense compound
acgacagatttctcctcagt

SEQ ID NO: 3843 - DNA, 20 bp, Artificial Sequence
  Antisense compound
tacgacagatttctcctcag

SEQ ID NO: 3844 - DNA, 20 bp, Artificial Sequence
  Antisense compound
gtacgacagatttctcctca

SEQ ID NO: 3845 - DNA, 20 bp, Artificial Sequence
  Antisense compound
tgtacgacagatttctcctc

SEQ ID NO: 3846 - DNA, 20 bp, Artificial Sequence
  Antisense compound
ctgtacgacagatttctcct

SEQ ID NO: 3847 - DNA, 20 bp, Artificial Sequence
  Antisense compound
tctgtacgacagatttctcc

SEQ ID NO: 3848 - DNA, 20 bp, Artificial Sequence
  Antisense compound
ttctgtacgacagatttctc

SEQ ID NO: 3849 - DNA, 20 bp, Artificial Sequence
  Antisense compound
cttctgtacgacagatttct

SEQ ID NO: 3850 - DNA, 20 bp, Artificial Sequence
  Antisense compound
gcttctgtacgacagatttc

SEQ ID NO: 3851 - DNA, 20 bp, Artificial Sequence
  Antisense compound
ggcttctgtacgacagattt

SEQ ID NO: 3852 - DNA, 20 bp, Artificial Sequence
  Antisense compound
aggcttctgtacgacagatt

SEQ ID NO: 3853 - DNA, 20 bp, Artificial Sequence
  Antisense compound
caggcttctgtacgacagat

SEQ ID NO: 3854 - DNA, 20 bp, Artificial Sequence
  Antisense compound
acaggcttctgtacgacaga

SEQ ID NO: 3855 - DNA, 20 bp, Artificial Sequence
  Antisense compound
gacaggcttctgtacgacag

SEQ ID NO: 3856 - DNA, 20 bp, Artificial Sequence
  Antisense compound
cgacaggcttctgtacgaca

SEQ ID NO: 3857 - DNA, 20 bp, Artificial Sequence
  Antisense compound
tcgacaggcttctgtacgac

SEQ ID NO: 3858 - DNA, 20 bp, Artificial Sequence
  Antisense compound
atcgacaggcttctgtacga

SEQ ID NO: 3859 - DNA, 20 bp, Artificial Sequence
  Antisense compound
catcgacaggcttctgtacg

SEQ ID NO: 3860 - DNA, 20 bp, Artificial Sequence
  Antisense compound
acatcgacaggcttctgtac

SEQ ID NO: 3861 - DNA, 20 bp, Artificial Sequence
  Antisense compound
cacatcgacaggcttctgta

SEQ ID NO: 3862 - DNA, 20 bp, Artificial Sequence
  Antisense compound
tcacatcgacaggcttctgt

SEQ ID NO: 3863 - DNA, 20 bp, Artificial Sequence
  Antisense compound
ttcacatcgacaggcttctg

SEQ ID NO: 3864 - DNA, 20 bp, Artificial Sequence
  Antisense compound
cttcacatcgacaggcttct

SEQ ID NO: 3865 - DNA, 20 bp, Artificial Sequence
  Antisense compound
gcttcacatcgacaggcttc

SEQ ID NO: 3866 - DNA, 20 bp, Artificial Sequence
  Antisense compound
ggcttcacatcgacaggctt

SEQ ID NO: 3867 - DNA, 20 bp, Artificial Sequence
  Antisense compound
tggcttcacatcgacaggct

SEQ ID NO: 3868 - DNA, 20 bp, Artificial Sequence
  Antisense compound
ttggcttcacatcgacaggc

SEQ ID NO: 3869 - DNA, 20 bp, Artificial Sequence
  Antisense compound
tttggcttcacatcgacagg

SEQ ID NO: 3870 - DNA, 20 bp, Artificial Sequence
  Antisense compound
ttttggcttcacatcgacag

SEQ ID NO: 3871 - DNA, 20 bp, Artificial Sequence
  Antisense compound
tttttggcttcacatcgaca

SEQ ID NO: 3872 - DNA, 20 bp, Artificial Sequence
  Antisense compound
atttttggcttcacatcgac

SEQ ID NO: 3873 - DNA, 20 bp, Artificial Sequence
  Antisense compound
aatttttggcttcacatcga

SEQ ID NO: 3874 - DNA, 20 bp, Artificial Sequence
  Antisense compound
taatttttggcttcacatcg

SEQ ID NO: 3875 - DNA, 20 bp, Artificial Sequence
  Antisense compound
ttaatttttggcttcacatc

SEQ ID NO: 3876 - DNA, 20 bp, Artificial Sequence
  Antisense compound
cttaatttttggcttcacat

SEQ ID NO: 3877 - DNA, 20 bp, Artificial Sequence
  Antisense compound
ccttaatttttggcttcaca

SEQ ID NO: 3878 - DNA, 20 bp, Artificial Sequence
  Antisense compound
gccttaatttttggcttcac

SEQ ID NO: 3879 - DNA, 20 bp, Artificial Sequence
  Antisense compound
ggccttaatttttggcttca

SEQ ID NO: 3880 - DNA, 20 bp, Artificial Sequence
  Antisense compound
aggccttaatttttggcttc

SEQ ID NO: 3881 - DNA, 20 bp, Artificial Sequence
  Antisense compound
caggccttaatttttggctt

SEQ ID NO: 3882 - DNA, 20 bp, Artificial Sequence
  Antisense compound
gcaggccttaatttttggct

SEQ ID NO: 3883 - DNA, 20 bp, Artificial Sequence
  Antisense compound
tgcaggccttaatttttggc

SEQ ID NO: 3884 - DNA, 20 bp, Artificial Sequence
  Antisense compound
atgcaggccttaatttttgg

SEQ ID NO: 3885 - DNA, 20 bp, Artificial Sequence
  Antisense compound
aatgcaggccttaatttttg

SEQ ID NO: 3886 - DNA, 20 bp, Artificial Sequence
  Antisense compound
caatgcaggccttaattttt

SEQ ID NO: 3887 - DNA, 20 bp, Artificial Sequence
  Antisense compound
tcaatgcaggccttaatttt

SEQ ID NO: 3888 - DNA, 20 bp, Artificial Sequence
  Antisense compound
atcaatgcaggccttaattt

SEQ ID NO: 3889 - DNA, 20 bp, Artificial Sequence
  Antisense compound
catcaatgcaggccttaatt

SEQ ID NO: 3890 - DNA, 20 bp, Artificial Sequence
  Antisense compound
tcatcaatgcaggccttaat

SEQ ID NO: 3891 - DNA, 20 bp, Artificial Sequence
  Antisense compound
ctcatcaatgcaggccttaa

SEQ ID NO: 3892 - DNA, 20 bp, Artificial Sequence
  Antisense compound
cctcatcaatgcaggcctta

SEQ ID NO: 3893 - DNA, 20 bp, Artificial Sequence
  Antisense compound
acctcatcaatgcaggcctt

SEQ ID NO: 3894 - DNA, 20 bp, Artificial Sequence
  Antisense compound
aacctcatcaatgcaggcct

SEQ ID NO: 3895 - DNA, 20 bp, Artificial Sequence
  Antisense compound
taacctcatcaatgcaggcc

SEQ ID NO: 3896 - DNA, 20 bp, Artificial Sequence
  Antisense compound
gtaacctcatcaatgcaggc

SEQ ID NO: 3897 - DNA, 20 bp, Artificial Sequence
  Antisense compound
ggtaacctcatcaatgcagg

SEQ ID NO: 3898 - DNA, 20 bp, Artificial Sequence
  Antisense compound
tggtaacctcatcaatgcag

SEQ ID NO: 3899 - DNA, 20 bp, Artificial Sequence
  Antisense compound
gtggtaacctcatcaatgca

SEQ ID NO: 3900 - DNA, 20 bp, Artificial Sequence
  Antisense compound
tgtggtaacctcatcaatgc

SEQ ID NO: 3901 - DNA, 20 bp, Artificial Sequence
  Antisense compound
ttgtggtaacctcatcaatg

SEQ ID NO: 3902 - DNA, 20 bp, Artificial Sequence
  Antisense compound
gttgtggtaacctcatcaat

SEQ ID NO: 3903 - DNA, 20 bp, Artificial Sequence
  Antisense compound
tgttgtggtaacctcatcaa

SEQ ID NO: 3904 - DNA, 20 bp, Artificial Sequence
  Antisense compound
gtgttgtggtaacctcatca

SEQ ID NO: 3905 - DNA, 20 bp, Artificial Sequence
  Antisense compound
agtgttgtggtaacctcatc

SEQ ID NO: 3906 - DNA, 20 bp, Artificial Sequence
  Antisense compound
cagtgttgtggtaacctcat

SEQ ID NO: 3907 - DNA, 20 bp, Artificial Sequence
  Antisense compound
ccagtgttgtggtaacctca

SEQ ID NO: 3908 - DNA, 20 bp, Artificial Sequence
  Antisense compound
tccagtgttgtggtaacctc

SEQ ID NO: 3909 - DNA, 20 bp, Artificial Sequence
  Antisense compound
ttccagtgttgtggtaacct

SEQ ID NO: 3910 - DNA, 20 bp, Artificial Sequence
  Antisense compound
cttccagtgttgtggtaacc

SEQ ID NO: 3911 - DNA, 20 bp, Artificial Sequence
  Antisense compound
tcttccagtgttgtggtaac

SEQ ID NO: 3912 - DNA, 20 bp, Artificial Sequence
  Antisense compound
ttcttccagtgttgtggtaa

SEQ ID NO: 3913 - DNA, 20 bp, Artificial Sequence
  Antisense compound
tttcttccagtgttgtggta

SEQ ID NO: 3914 - DNA, 20 bp, Artificial Sequence
  Antisense compound
gtttcttccagtgttgtggt

SEQ ID NO: 3915 - DNA, 20 bp, Artificial Sequence
  Antisense compound
agtttcttccagtgttgtgg

SEQ ID NO: 3916 - DNA, 20 bp, Artificial Sequence
  Antisense compound
tagtttcttccagtgttgtg

SEQ ID NO: 3917 - DNA, 20 bp, Artificial Sequence
  Antisense compound
ttagtttcttccagtgttgt

SEQ ID NO: 3918 - DNA, 20 bp, Artificial Sequence
  Antisense compound
cttagtttcttccagtgttg

SEQ ID NO: 3919 - DNA, 20 bp, Artificial Sequence
  Antisense compound
acttagtttcttccagtgtt

SEQ ID NO: 3920 - DNA, 20 bp, Artificial Sequence
  Antisense compound
aacttagtttcttccagtgt

SEQ ID NO: 3921 - DNA, 20 bp, Artificial Sequence
  Antisense compound
aaacttagtttcttccagtg

SEQ ID NO: 3922 - DNA, 20 bp, Artificial Sequence
  Antisense compound
gaaacttagtttcttccagt

SEQ ID NO: 3923 - DNA, 20 bp, Artificial Sequence
  Antisense compound
agaaacttagtttcttccag

SEQ ID NO: 3924 - DNA, 20 bp, Artificial Sequence
  Antisense compound
aagaaacttagtttcttcca

SEQ ID NO: 3925 - DNA, 20 bp, Artificial Sequence
  Antisense compound
taagaaacttagtttcttcc

SEQ ID NO: 3926 - DNA, 20 bp, Artificial Sequence
  Antisense compound
gtaagaaacttagtttcttc

SEQ ID NO: 3927 - DNA, 20 bp, Artificial Sequence
  Antisense compound
ggtaagaaacttagtttctt

SEQ ID NO: 3928 - DNA, 20 bp, Artificial Sequence
  Antisense compound
tggtaagaaacttagtttct

SEQ ID NO: 3929 - DNA, 20 bp, Artificial Sequence
  Antisense compound
ttggtaagaaacttagtttc

SEQ ID NO: 3930 - DNA, 20 bp, Artificial Sequence
  Antisense compound
attggtaagaaacttagttt

SEQ ID NO: 3931 - DNA, 20 bp, Artificial Sequence
  Antisense compound
tattggtaagaaacttagtt

SEQ ID NO: 3932 - DNA, 20 bp, Artificial Sequence
  Antisense compound
ttattggtaagaaacttagt

SEQ ID NO: 3933 - DNA, 20 bp, Artificial Sequence
  Antisense compound
cttattggtaagaaacttag

SEQ ID NO: 3934 - DNA, 20 bp, Artificial Sequence
  Antisense compound
acttattggtaagaaactta

SEQ ID NO: 3935 - DNA, 20 bp, Artificial Sequence
  Antisense compound
aacttattggtaagaaactt

SEQ ID NO: 3936 - DNA, 20 bp, Artificial Sequence
  Antisense compound
taacttattggtaagaaact

SEQ ID NO: 3937 - DNA, 20 bp, Artificial Sequence
  Antisense compound
gtaacttattggtaagaaac

SEQ ID NO: 3938 - DNA, 20 bp, Artificial Sequence
  Antisense compound
agtaacttattggtaagaaa

SEQ ID NO: 3939 - DNA, 20 bp, Artificial Sequence
  Antisense compound
gagtaacttattggtaagaa

SEQ ID NO: 3940 - DNA, 20 bp, Artificial Sequence
  Antisense compound
agagtaacttattggtaaga

SEQ ID NO: 3941 - DNA, 20 bp, Artificial Sequence
  Antisense compound
aagagtaacttattggtaag

SEQ ID NO: 3942 - DNA, 20 bp, Artificial Sequence
  Antisense compound
caagagtaacttattggtaa

SEQ ID NO: 3943 - DNA, 20 bp, Artificial Sequence
  Antisense compound
acaagagtaacttattggta

SEQ ID NO: 3944 - DNA, 20 bp, Artificial Sequence
  Antisense compound
aacaagagtaacttattggt

SEQ ID NO: 3945 - DNA, 20 bp, Artificial Sequence
  Antisense compound
aaacaagagtaacttattgg

SEQ ID NO: 3946 - DNA, 20 bp, Artificial Sequence
  Antisense compound
caaacaagagtaacttattg

SEQ ID NO: 3947 - DNA, 20 bp, Artificial Sequence
  Antisense compound
gcaaacaagagtaacttatt

SEQ ID NO: 3948 - DNA, 20 bp, Artificial Sequence
  Antisense compound
agcaaacaagagtaacttat

SEQ ID NO: 3949 - DNA, 20 bp, Artificial Sequence
  Antisense compound
cagcaaacaagagtaactta

SEQ ID NO: 3950 - DNA, 20 bp, Artificial Sequence
  Antisense compound
tcagcaaacaagagtaactt

SEQ ID NO: 3951 - DNA, 20 bp, Artificial Sequence
  Antisense compound
atcagcaaacaagagtaact

SEQ ID NO: 3952 - DNA, 20 bp, Artificial Sequence
  Antisense compound
tatcagcaaacaagagtaac

SEQ ID NO: 3953 - DNA, 20 bp, Artificial Sequence
  Antisense compound
atatcagcaaacaagagtaa

SEQ ID NO: 3954 - DNA, 20 bp, Artificial Sequence
  Antisense compound
gatatcagcaaacaagagta

SEQ ID NO: 3955 - DNA, 20 bp, Artificial Sequence
  Antisense compound
tgatatcagcaaacaagagt

SEQ ID NO: 3956 - DNA, 20 bp, Artificial Sequence
  Antisense compound
ttgatatcagcaaacaagag

SEQ ID NO: 3957 - DNA, 20 bp, Artificial Sequence
  Antisense compound
attgatatcagcaaacaaga

SEQ ID NO: 3958 - DNA, 20 bp, Artificial Sequence
  Antisense compound
cattgatatcagcaaacaag

SEQ ID NO: 3959 - DNA, 20 bp, Artificial Sequence
  Antisense compound
ccattgatatcagcaaacaa

SEQ ID NO: 3960 - DNA, 20 bp, Artificial Sequence
  Antisense compound
accattgatatcagcaaaca

SEQ ID NO: 3961 - DNA, 20 bp, Artificial Sequence
  Antisense compound
taccattgatatcagcaaac

SEQ ID NO: 3962 - DNA, 20 bp, Artificial Sequence
  Antisense compound
ttaccattgatatcagcaaa

SEQ ID NO: 3963 - DNA, 20 bp, Artificial Sequence
  Antisense compound
cttaccattgatatcagcaa

SEQ ID NO: 3964 - DNA, 20 bp, Artificial Sequence
  Antisense compound
gcttaccattgatatcagca

SEQ ID NO: 3965 - DNA, 20 bp, Artificial Sequence
  Antisense compound
agcttaccattgatatcagc

SEQ ID NO: 3966 - DNA, 20 bp, Artificial Sequence
  Antisense compound
aagcttaccattgatatcag

SEQ ID NO: 3967 - DNA, 20 bp, Artificial Sequence
  Antisense compound
aaagcttaccattgatatca

SEQ ID NO: 3968 - DNA, 20 bp, Artificial Sequence
  Antisense compound
taaagcttaccattgatatc

SEQ ID NO: 3969 - DNA, 20 bp, Artificial Sequence
  Antisense compound
gtaaagcttaccattgatat

SEQ ID NO: 3970 - DNA, 20 bp, Artificial Sequence
  Antisense compound
ggtaaagcttaccattgata

SEQ ID NO: 3971 - DNA, 20 bp, Artificial Sequence
  Antisense compound
tggtaaagcttaccattgat

SEQ ID NO: 3972 - DNA, 20 bp, Artificial Sequence
  Antisense compound
atggtaaagcttaccattga

SEQ ID NO: 3973 - DNA, 20 bp, Artificial Sequence
  Antisense compound
catggtaaagcttaccattg

SEQ ID NO: 3974 - DNA, 20 bp, Artificial Sequence
  Antisense compound
tcatggtaaagcttaccatt

SEQ ID NO: 3975 - DNA, 20 bp, Artificial Sequence
  Antisense compound
atcatggtaaagcttaccat

SEQ ID NO: 3976 - DNA, 20 bp, Artificial Sequence
  Antisense compound
aatcatggtaaagcttacca

SEQ ID NO: 3977 - DNA, 20 bp, Artificial Sequence
  Antisense compound
gaatcatggtaaagcttacc

SEQ ID NO: 3978 - DNA, 20 bp, Artificial Sequence
  Antisense compound
agaatcatggtaaagcttac

SEQ ID NO: 3979 - DNA, 20 bp, Artificial Sequence
  Antisense compound
gagaatcatggtaaagctta

SEQ ID NO: 3980 - DNA, 20 bp, Artificial Sequence
  Antisense compound
tgagaatcatggtaaagctt

SEQ ID NO: 3981 - DNA, 20 bp, Artificial Sequence
  Antisense compound
ctgagaatcatggtaaagct

SEQ ID NO: 3982 - DNA, 20 bp, Artificial Sequence
  Antisense compound
tctgagaatcatggtaaagc

SEQ ID NO: 3983 - DNA, 20 bp, Artificial Sequence
  Antisense compound
ttctgagaatcatggtaaag

SEQ ID NO: 3984 - DNA, 20 bp, Artificial Sequence
  Antisense compound
gttctgagaatcatggtaaa

SEQ ID NO: 3985 - DNA, 20 bp, Artificial Sequence
  Antisense compound
tgttctgagaatcatggtaa

SEQ ID NO: 3986 - DNA, 20 bp, Artificial Sequence
  Antisense compound
atgttctgagaatcatggta

SEQ ID NO: 3987 - DNA, 20 bp, Artificial Sequence
  Antisense compound
catgttctgagaatcatggt

SEQ ID NO: 3988 - DNA, 20 bp, Artificial Sequence
  Antisense compound
gcatgttctgagaatcatgg

SEQ ID NO: 3989 - DNA, 20 bp, Artificial Sequence
  Antisense compound
agcatgttctgagaatcatg

SEQ ID NO: 3990 - DNA, 20 bp, Artificial Sequence
  Antisense compound
aagcatgttctgagaatcat

SEQ ID NO: 3991 - DNA, 20 bp, Artificial Sequence
  Antisense compound
taagcatgttctgagaatca

SEQ ID NO: 3992 - DNA, 20 bp, Artificial Sequence
  Antisense compound
ctaagcatgttctgagaatc

SEQ ID NO: 3993 - DNA, 20 bp, Artificial Sequence
  Antisense compound
tctaagcatgttctgagaat

SEQ ID NO: 3994 - DNA, 20 bp, Artificial Sequence
  Antisense compound
ctctaagcatgttctgagaa

SEQ ID NO: 3995 - DNA, 20 bp, Artificial Sequence
  Antisense compound
cctctaagcatgttctgaga

SEQ ID NO: 3996 - DNA, 20 bp, Artificial Sequence
  Antisense compound
acctctaagcatgttctgag

SEQ ID NO: 3997 - DNA, 20 bp, Artificial Sequence
  Antisense compound
cacctctaagcatgttctga

SEQ ID NO: 3998 - DNA, 20 bp, Artificial Sequence
  Antisense compound
tcacctctaagcatgttctg

SEQ ID NO: 3999 - DNA, 20 bp, Artificial Sequence
  Antisense compound
ttcacctctaagcatgttct

SEQ ID NO: 4000 - DNA, 20 bp, Artificial Sequence
  Antisense compound
cttcacctctaagcatgttc

SEQ ID NO: 4001 - DNA, 20 bp, Artificial Sequence
  Antisense compound
tcttcacctctaagcatgtt

SEQ ID NO: 4002 - DNA, 20 bp, Artificial Sequence
  Antisense compound
atcttcacctctaagcatgt

SEQ ID NO: 4003 - DNA, 20 bp, Artificial Sequence
  Antisense compound
tatcttcacctctaagcatg

SEQ ID NO: 4004 - DNA, 20 bp, Artificial Sequence
  Antisense compound
atatcttcacctctaagcat

SEQ ID NO: 4005 - DNA, 20 bp, Artificial Sequence
  Antisense compound
catatcttcacctctaagca

SEQ ID NO: 4006 - DNA, 20 bp, Artificial Sequence
  Antisense compound
acatatcttcacctctaagc

SEQ ID NO: 4007 - DNA, 20 bp, Artificial Sequence
  Antisense compound
gacatatcttcacctctaag

SEQ ID NO: 4008 - DNA, 20 bp, Artificial Sequence
  Antisense compound
agacatatcttcacctctaa

SEQ ID NO: 4009 - DNA, 20 bp, Artificial Sequence
  Antisense compound
aagacatatcttcacctcta

SEQ ID NO: 4010 - DNA, 20 bp, Artificial Sequence
  Antisense compound
aaagacatatcttcacctct

SEQ ID NO: 4011 - DNA, 20 bp, Artificial Sequence
  Antisense compound
gaaagacatatcttcacctc

SEQ ID NO: 4012 - DNA, 20 bp, Artificial Sequence
  Antisense compound
ggaaagacatatcttcacct

SEQ ID NO: 4013 - DNA, 20 bp, Artificial Sequence
  Antisense compound
aggaaagacatatcttcacc

SEQ ID NO: 4014 - DNA, 20 bp, Artificial Sequence
  Antisense compound
aaggaaagacatatcttcac

SEQ ID NO: 4015 - DNA, 20 bp, Artificial Sequence
  Antisense compound
caaggaaagacatatcttca

SEQ ID NO: 4016 - DNA, 20 bp, Artificial Sequence
  Antisense compound
tcaaggaaagacatatcttc

SEQ ID NO: 4017 - DNA, 20 bp, Artificial Sequence
  Antisense compound
ctcaaggaaagacatatctt

SEQ ID NO: 4018 - DNA, 20 bp, Artificial Sequence
  Antisense compound
tctcaaggaaagacatatct

SEQ ID NO: 4019 - DNA, 20 bp, Artificial Sequence
  Antisense compound
ttctcaaggaaagacatatc

SEQ ID NO: 4020 - DNA, 20 bp, Artificial Sequence
  Antisense compound
cttctcaaggaaagacatat

SEQ ID NO: 4021 - DNA, 20 bp, Artificial Sequence
  Antisense compound
ccttctcaaggaaagacata

SEQ ID NO: 4022 - DNA, 20 bp, Artificial Sequence
  Antisense compound
tccttctcaaggaaagacat

SEQ ID NO: 4023 - DNA, 20 bp, Artificial Sequence
  Antisense compound
atccttctcaaggaaagaca

SEQ ID NO: 4024 - DNA, 20 bp, Artificial Sequence
  Antisense compound
catccttctcaaggaaagac

SEQ ID NO: 4025 - DNA, 20 bp, Artificial Sequence
  Antisense compound
gcatccttctcaaggaaaga

SEQ ID NO: 4026 - DNA, 20 bp, Artificial Sequence
  Antisense compound
tgcatccttctcaaggaaag

SEQ ID NO: 4027 - DNA, 20 bp, Artificial Sequence
  Antisense compound
gtgcatccttctcaaggaaa

SEQ ID NO: 4028 - DNA, 20 bp, Artificial Sequence
  Antisense compound
ggtgcatccttctcaaggaa

SEQ ID NO: 4029 - DNA, 20 bp, Artificial Sequence
  Antisense compound
aggtgcatccttctcaagga

SEQ ID NO: 4030 - DNA, 20 bp, Artificial Sequence
  Antisense compound
aaggtgcatccttctcaagg

SEQ ID NO: 4031 - DNA, 20 bp, Artificial Sequence
  Antisense compound
taaggtgcatccttctcaag

SEQ ID NO: 4032 - DNA, 20 bp, Artificial Sequence
  Antisense compound
gtaaggtgcatccttctcaa

SEQ ID NO: 4033 - DNA, 20 bp, Artificial Sequence
  Antisense compound
tgtaaggtgcatccttctca

SEQ ID NO: 4034 - DNA, 20 bp, Artificial Sequence
  Antisense compound
atgtaaggtgcatccttctc

SEQ ID NO: 4035 - DNA, 20 bp, Artificial Sequence
  Antisense compound
catgtaaggtgcatccttct

SEQ ID NO: 4036 - DNA, 20 bp, Artificial Sequence
  Antisense compound
ccatgtaaggtgcatccttc

SEQ ID NO: 4037 - DNA, 20 bp, Artificial Sequence
  Antisense compound
accatgtaaggtgcatcctt

SEQ ID NO: 4038 - DNA, 20 bp, Artificial Sequence
  Antisense compound
taccatgtaaggtgcatcct

SEQ ID NO: 4039 - DNA, 20 bp, Artificial Sequence
  Antisense compound
ctaccatgtaaggtgcatcc

SEQ ID NO: 4040 - DNA, 20 bp, Artificial Sequence
  Antisense compound
cctaccatgtaaggtgcatc

SEQ ID NO: 4041 - DNA, 20 bp, Artificial Sequence
  Antisense compound
acctaccatgtaaggtgcat

SEQ ID NO: 4042 - DNA, 20 bp, Artificial Sequence
  Antisense compound
cacctaccatgtaaggtgca

SEQ ID NO: 4043 - DNA, 20 bp, Artificial Sequence
  Antisense compound
tcacctaccatgtaaggtgc

SEQ ID NO: 4044 - DNA, 20 bp, Artificial Sequence
  Antisense compound
atcacctaccatgtaaggtg

SEQ ID NO: 4045 - DNA, 20 bp, Artificial Sequence
  Antisense compound
catcacctaccatgtaaggt

SEQ ID NO: 4046 - DNA, 20 bp, Artificial Sequence
  Antisense compound
acatcacctaccatgtaagg

SEQ ID NO: 4047 - DNA, 20 bp, Artificial Sequence
  Antisense compound
aacatcacctaccatgtaag

SEQ ID NO: 4048 - DNA, 20 bp, Artificial Sequence
  Antisense compound
taacatcacctaccatgtaa

SEQ ID NO: 4049 - DNA, 20 bp, Artificial Sequence
  Antisense compound
ataacatcacctaccatgta

SEQ ID NO: 4050 - DNA, 20 bp, Artificial Sequence
  Antisense compound
gataacatcacctaccatgt

SEQ ID NO: 4051 - DNA, 20 bp, Artificial Sequence
  Antisense compound
tgataacatcacctaccatg

SEQ ID NO: 4052 - DNA, 20 bp, Artificial Sequence
  Antisense compound
gtgataacatcacctaccat

SEQ ID NO: 4053 - DNA, 20 bp, Artificial Sequence
  Antisense compound
agtgataacatcacctacca

SEQ ID NO: 4054 - DNA, 20 bp, Artificial Sequence
  Antisense compound
tagtgataacatcacctacc

SEQ ID NO: 4055 - DNA, 20 bp, Artificial Sequence
  Antisense compound
ctagtgataacatcacctac

SEQ ID NO: 4056 - DNA, 20 bp, Artificial Sequence
  Antisense compound
actagtgataacatcaccta

SEQ ID NO: 4057 - DNA, 20 bp, Artificial Sequence
  Antisense compound
cactagtgataacatcacct

SEQ ID NO: 4058 - DNA, 20 bp, Artificial Sequence
  Antisense compound
ccactagtgataacatcacc

SEQ ID NO: 4059 - DNA, 20 bp, Artificial Sequence
  Antisense compound
accactagtgataacatcac

SEQ ID NO: 4060 - DNA, 20 bp, Artificial Sequence
  Antisense compound
caccactagtgataacatca

SEQ ID NO: 4061 - DNA, 20 bp, Artificial Sequence
  Antisense compound
tcaccactagtgataacatc

SEQ ID NO: 4062 - DNA, 20 bp, Artificial Sequence
  Antisense compound
atcaccactagtgataacat

SEQ ID NO: 4063 - DNA, 20 bp, Artificial Sequence
  Antisense compound
tatcaccactagtgataaca

SEQ ID NO: 4064 - DNA, 20 bp, Artificial Sequence
  Antisense compound
atatcaccactagtgataac

SEQ ID NO: 4065 - DNA, 20 bp, Artificial Sequence
  Antisense compound
gatatcaccactagtgataa

SEQ ID NO: 4066 - DNA, 20 bp, Artificial Sequence
  Antisense compound
tgatatcaccactagtgata

SEQ ID NO: 4067 - DNA, 20 bp, Artificial Sequence
  Antisense compound
gtgatatcaccactagtgat

SEQ ID NO: 4068 - DNA, 20 bp, Artificial Sequence
  Antisense compound
agtgatatcaccactagtga

SEQ ID NO: 4069 - DNA, 20 bp, Artificial Sequence
  Antisense compound
aagtgatatcaccactagtg

SEQ ID NO: 4070 - DNA, 20 bp, Artificial Sequence
  Antisense compound
caagtgatatcaccactagt

SEQ ID NO: 4071 - DNA, 20 bp, Artificial Sequence
  Antisense compound
acaagtgatatcaccactag

SEQ ID NO: 4072 - DNA, 20 bp, Artificial Sequence
  Antisense compound
cacaagtgatatcaccacta

SEQ ID NO: 4073 - DNA, 20 bp, Artificial Sequence
  Antisense compound
acacaagtgatatcaccact

SEQ ID NO: 4074 - DNA, 20 bp, Artificial Sequence
  Antisense compound
aacacaagtgatatcaccac

SEQ ID NO: 4075 - DNA, 20 bp, Artificial Sequence
  Antisense compound
caacacaagtgatatcacca

SEQ ID NO: 4076 - DNA, 20 bp, Artificial Sequence
  Antisense compound
acaacacaagtgatatcacc

SEQ ID NO: 4077 - DNA, 20 bp, Artificial Sequence
  Antisense compound
tacaacacaagtgatatcac

SEQ ID NO: 4078 - DNA, 20 bp, Artificial Sequence
  Antisense compound
ttacaacacaagtgatatca

SEQ ID NO: 4079 - DNA, 20 bp, Artificial Sequence
  Antisense compound
attacaacacaagtgatatc

SEQ ID NO: 4080 - DNA, 20 bp, Artificial Sequence
  Antisense compound
tattacaacacaagtgatat

SEQ ID NO: 4081 - DNA, 20 bp, Artificial Sequence
  Antisense compound
gtattacaacacaagtgata

SEQ ID NO: 4082 - DNA, 20 bp, Artificial Sequence
  Antisense compound
ggtattacaacacaagtgat

SEQ ID NO: 4083 - DNA, 20 bp, Artificial Sequence
  Antisense compound
gggtattacaacacaagtga

SEQ ID NO: 4084 - DNA, 20 bp, Artificial Sequence
  Antisense compound
agggtattacaacacaagtg

SEQ ID NO: 4085 - DNA, 20 bp, Artificial Sequence
  Antisense compound
gagggtattacaacacaagt

SEQ ID NO: 4086 - DNA, 20 bp, Artificial Sequence
  Antisense compound
ggagggtattacaacacaag

SEQ ID NO: 4087 - DNA, 20 bp, Artificial Sequence
  Antisense compound
tggagggtattacaacacaa

SEQ ID NO: 4088 - DNA, 20 bp, Artificial Sequence
  Antisense compound
ttggagggtattacaacaca

SEQ ID NO: 4089 - DNA, 20 bp, Artificial Sequence
  Antisense compound
tttggagggtattacaacac

SEQ ID NO: 4090 - DNA, 20 bp, Artificial Sequence
  Antisense compound
ttttggagggtattacaaca

SEQ ID NO: 4091 - DNA, 20 bp, Artificial Sequence
  Antisense compound
tttttggagggtattacaac

SEQ ID NO: 4092 - DNA, 20 bp, Artificial Sequence
  Antisense compound
ctttttggagggtattacaa

SEQ ID NO: 4093 - DNA, 20 bp, Artificial Sequence
  Antisense compound
cctttttggagggtattaca

SEQ ID NO: 4094 - DNA, 20 bp, Artificial Sequence
  Antisense compound
gcctttttggagggtattac

SEQ ID NO: 4095 - DNA, 20 bp, Artificial Sequence
  Antisense compound
agcctttttggagggtatta

SEQ ID NO: 4096 - DNA, 20 bp, Artificial Sequence
  Antisense compound
cagcctttttggagggtatt

SEQ ID NO: 4097 - DNA, 20 bp, Artificial Sequence
  Antisense compound
ccagcctttttggagggtat

SEQ ID NO: 4098 - DNA, 20 bp, Artificial Sequence
  Antisense compound
accagcctttttggagggta

SEQ ID NO: 4099 - DNA, 20 bp, Artificial Sequence
  Antisense compound
caccagcctttttggagggt

SEQ ID NO: 4100 - DNA, 20 bp, Artificial Sequence
  Antisense compound
ccaccagcctttttggaggg

SEQ ID NO: 4101 - DNA, 20 bp, Artificial Sequence
  Antisense compound
gccaccagcctttttggagg

SEQ ID NO: 4102 - DNA, 20 bp, Artificial Sequence
  Antisense compound
tgccaccagcctttttggag

SEQ ID NO: 4103 - DNA, 20 bp, Artificial Sequence
  Antisense compound
gtgccaccagcctttttgga

SEQ ID NO: 4104 - DNA, 20 bp, Artificial Sequence
  Antisense compound
agtgccaccagcctttttgg

SEQ ID NO: 4105 - DNA, 20 bp, Artificial Sequence
  Antisense compound
tagtgccaccagcctttttg

SEQ ID NO: 4106 - DNA, 20 bp, Artificial Sequence
  Antisense compound
gtagtgccaccagccttttt

SEQ ID NO: 4107 - DNA, 20 bp, Artificial Sequence
  Antisense compound
agtagtgccaccagcctttt

SEQ ID NO: 4108 - DNA, 20 bp, Artificial Sequence
  Antisense compound
cagtagtgccaccagccttt

SEQ ID NO: 4109 - DNA, 20 bp, Artificial Sequence
  Antisense compound
tcagtagtgccaccagcctt

SEQ ID NO: 4110 - DNA, 20 bp, Artificial Sequence
  Antisense compound
ctcagtagtgccaccagcct

SEQ ID NO: 4111 - DNA, 20 bp, Artificial Sequence
  Antisense compound
tctcagtagtgccaccagcc

SEQ ID NO: 4112 - DNA, 20 bp, Artificial Sequence
  Antisense compound
atctcagtagtgccaccagc

SEQ ID NO: 4113 - DNA, 20 bp, Artificial Sequence
  Antisense compound
catctcagtagtgccaccag

SEQ ID NO: 4114 - DNA, 20 bp, Artificial Sequence
  Antisense compound
gcatctcagtagtgccacca

SEQ ID NO: 4115 - DNA, 20 bp, Artificial Sequence
  Antisense compound
agcatctcagtagtgccacc

SEQ ID NO: 4116 - DNA, 20 bp, Artificial Sequence
  Antisense compound
gagcatctcagtagtgccac

SEQ ID NO: 4117 - DNA, 20 bp, Artificial Sequence
  Antisense compound
agagcatctcagtagtgcca

SEQ ID NO: 4118 - DNA, 20 bp, Artificial Sequence
  Antisense compound
gagagcatctcagtagtgcc

SEQ ID NO: 4119 - DNA, 20 bp, Artificial Sequence
  Antisense compound
tgagagcatctcagtagtgc

SEQ ID NO: 4120 - DNA, 20 bp, Artificial Sequence
  Antisense compound
ttgagagcatctcagtagtg

SEQ ID NO: 4121 - DNA, 20 bp, Artificial Sequence
  Antisense compound
cttgagagcatctcagtagt

SEQ ID NO: 4122 - DNA, 20 bp, Artificial Sequence
  Antisense compound
tcttgagagcatctcagtag

SEQ ID NO: 4123 - DNA, 20 bp, Artificial Sequence
  Antisense compound
ctcttgagagcatctcagta

SEQ ID NO: 4124 - DNA, 20 bp, Artificial Sequence
  Antisense compound
gctcttgagagcatctcagt

SEQ ID NO: 4125 - DNA, 20 bp, Artificial Sequence
  Antisense compound
agctcttgagagcatctcag

SEQ ID NO: 4126 - DNA, 20 bp, Artificial Sequence
  Antisense compound
aagctcttgagagcatctca

SEQ ID NO: 4127 - DNA, 20 bp, Artificial Sequence
  Antisense compound
aaagctcttgagagcatctc

SEQ ID NO: 4128 - DNA, 20 bp, Artificial Sequence
  Antisense compound
caaagctcttgagagcatct

SEQ ID NO: 4129 - DNA, 20 bp, Artificial Sequence
  Antisense compound
tcaaagctcttgagagcatc

SEQ ID NO: 4130 - DNA, 20 bp, Artificial Sequence
  Antisense compound
ttcaaagctcttgagagcat

SEQ ID NO: 4131 - DNA, 20 bp, Artificial Sequence
  Antisense compound
cttcaaagctcttgagagca

SEQ ID NO: 4132 - DNA, 20 bp, Artificial Sequence
  Antisense compound
tcttcaaagctcttgagagc

SEQ ID NO: 4133 - DNA, 20 bp, Artificial Sequence
  Antisense compound
ttcttcaaagctcttgagag

SEQ ID NO: 4134 - DNA, 20 bp, Artificial Sequence
  Antisense compound
tttcttcaaagctcttgaga

SEQ ID NO: 4135 - DNA, 20 bp, Artificial Sequence
  Antisense compound
ctttcttcaaagctcttgag

SEQ ID NO: 4136 - DNA, 20 bp, Artificial Sequence
  Antisense compound
actttcttcaaagctcttga

SEQ ID NO: 4137 - DNA, 20 bp, Artificial Sequence
  Antisense compound
cactttcttcaaagctcttg

SEQ ID NO: 4138 - DNA, 20 bp, Artificial Sequence
  Antisense compound
gcactttcttcaaagctctt

SEQ ID NO: 4139 - DNA, 20 bp, Artificial Sequence
  Antisense compound
ggcactttcttcaaagctct

SEQ ID NO: 4140 - DNA, 20 bp, Artificial Sequence
  Antisense compound
tggcactttcttcaaagctc

SEQ ID NO: 4141 - DNA, 20 bp, Artificial Sequence
  Antisense compound
ctggcactttcttcaaagct

SEQ ID NO: 4142 - DNA, 20 bp, Artificial Sequence
  Antisense compound
actggcactttcttcaaagc

SEQ ID NO: 4143 - DNA, 20 bp, Artificial Sequence
  Antisense compound
aactggcactttcttcaaag

SEQ ID NO: 4144 - DNA, 20 bp, Artificial Sequence
  Antisense compound
caactggcactttcttcaaa

SEQ ID NO: 4145 - DNA, 20 bp, Artificial Sequence
  Antisense compound
tcaactggcactttcttcaa

SEQ ID NO: 4146 - DNA, 20 bp, Artificial Sequence
  Antisense compound
atcaactggcactttcttca

SEQ ID NO: 4147 - DNA, 20 bp, Artificial Sequence
  Antisense compound
catcaactggcactttcttc

SEQ ID NO: 4148 - DNA, 20 bp, Artificial Sequence
  Antisense compound
tcatcaactggcactttctt

SEQ ID NO: 4149 - DNA, 20 bp, Artificial Sequence
  Antisense compound
ctcatcaactggcactttct

SEQ ID NO: 4150 - DNA, 20 bp, Artificial Sequence
  Antisense compound
actcatcaactggcactttc

SEQ ID NO: 4151 - DNA, 20 bp, Artificial Sequence
  Antisense compound
tactcatcaactggcacttt

SEQ ID NO: 4152 - DNA, 20 bp, Artificial Sequence
  Antisense compound
atactcatcaactggcactt

SEQ ID NO: 4153 - DNA, 20 bp, Artificial Sequence
  Antisense compound
tatactcatcaactggcact

SEQ ID NO: 4154 - DNA, 20 bp, Artificial Sequence
  Antisense compound
atatactcatcaactggcac

SEQ ID NO: 4155 - DNA, 20 bp, Artificial Sequence
  Antisense compound
tatatactcatcaactggca

SEQ ID NO: 4156 - DNA, 20 bp, Artificial Sequence
  Antisense compound
ttatatactcatcaactggc

SEQ ID NO: 4157 - DNA, 20 bp, Artificial Sequence
  Antisense compound
gttatatactcatcaactgg

SEQ ID NO: 4158 - DNA, 20 bp, Artificial Sequence
  Antisense compound
ggttatatactcatcaactg

SEQ ID NO: 4159 - DNA, 20 bp, Artificial Sequence
  Antisense compound
tggttatatactcatcaact

SEQ ID NO: 4160 - DNA, 20 bp, Artificial Sequence
  Antisense compound
gtggttatatactcatcaac

SEQ ID NO: 4161 - DNA, 20 bp, Artificial Sequence
  Antisense compound
cgtggttatatactcatcaa

SEQ ID NO: 4162 - DNA, 20 bp, Artificial Sequence
  Antisense compound
acgtggttatatactcatca

SEQ ID NO: 4163 - DNA, 20 bp, Artificial Sequence
  Antisense compound
tacgtggttatatactcatc

SEQ ID NO: 4164 - DNA, 20 bp, Artificial Sequence
  Antisense compound
gtacgtggttatatactcat

SEQ ID NO: 4165 - DNA, 20 bp, Artificial Sequence
  Antisense compound
ggtacgtggttatatactca

SEQ ID NO: 4166 - DNA, 20 bp, Artificial Sequence
  Antisense compound
gggtacgtggttatatactc

SEQ ID NO: 4167 - DNA, 20 bp, Artificial Sequence
  Antisense compound
agggtacgtggttatatact

SEQ ID NO: 4168 - DNA, 20 bp, Artificial Sequence
  Antisense compound
cagggtacgtggttatatac

SEQ ID NO: 4169 - DNA, 20 bp, Artificial Sequence
  Antisense compound
ccagggtacgtggttatata

SEQ ID NO: 4170 - DNA, 20 bp, Artificial Sequence
  Antisense compound
tccagggtacgtggttatat

SEQ ID NO: 4171 - DNA, 20 bp, Artificial Sequence
  Antisense compound
gtccagggtacgtggttata

SEQ ID NO: 4172 - DNA, 20 bp, Artificial Sequence
  Antisense compound
tgtccagggtacgtggttat

SEQ ID NO: 4173 - DNA, 20 bp, Artificial Sequence
  Antisense compound
ttgtccagggtacgtggtta

SEQ ID NO: 4174 - DNA, 20 bp, Artificial Sequence
  Antisense compound
cttgtccagggtacgtggtt

SEQ ID NO: 4175 - DNA, 20 bp, Artificial Sequence
  Antisense compound
ccttgtccagggtacgtggt

SEQ ID NO: 4176 - DNA, 20 bp, Artificial Sequence
  Antisense compound
tccttgtccagggtacgtgg

SEQ ID NO: 4177 - DNA, 20 bp, Artificial Sequence
  Antisense compound
atccttgtccagggtacgtg

SEQ ID NO: 4178 - DNA, 20 bp, Artificial Sequence
  Antisense compound
catccttgtccagggtacgt

SEQ ID NO: 4179 - DNA, 20 bp, Artificial Sequence
  Antisense compound
acatccttgtccagggtacg

SEQ ID NO: 4180 - DNA, 20 bp, Artificial Sequence
  Antisense compound
cacatccttgtccagggtac

SEQ ID NO: 4181 - DNA, 20 bp, Artificial Sequence
  Antisense compound
gcacatccttgtccagggta

SEQ ID NO: 4182 - DNA, 20 bp, Artificial Sequence
  Antisense compound
agcacatccttgtccagggt

SEQ ID NO: 4183 - DNA, 20 bp, Artificial Sequence
  Antisense compound
cagcacatccttgtccaggg

SEQ ID NO: 4184 - DNA, 20 bp, Artificial Sequence
  Antisense compound
ccagcacatccttgtccagg

SEQ ID NO: 4185 - DNA, 20 bp, Artificial Sequence
  Antisense compound
accagcacatccttgtccag

SEQ ID NO: 4186 - DNA, 20 bp, Artificial Sequence
  Antisense compound
aaccagcacatccttgtcca

SEQ ID NO: 4187 - DNA, 20 bp, Artificial Sequence
  Antisense compound
taaccagcacatccttgtcc

SEQ ID NO: 4188 - DNA, 20 bp, Artificial Sequence
  Antisense compound
ataaccagcacatccttgtc

SEQ ID NO: 4189 - DNA, 20 bp, Artificial Sequence
  Antisense compound
tataaccagcacatccttgt

SEQ ID NO: 4190 - DNA, 20 bp, Artificial Sequence
  Antisense compound
gtataaccagcacatccttg

SEQ ID NO: 4191 - DNA, 20 bp, Artificial Sequence
  Antisense compound
tgtataaccagcacatcctt

SEQ ID NO: 4192 - DNA, 20 bp, Artificial Sequence
  Antisense compound
gtgtataaccagcacatcct

SEQ ID NO: 4193 - DNA, 20 bp, Artificial Sequence
  Antisense compound
agtgtataaccagcacatcc

SEQ ID NO: 4194 - DNA, 20 bp, Artificial Sequence
  Antisense compound
aagtgtataaccagcacatc

SEQ ID NO: 4195 - DNA, 20 bp, Artificial Sequence
  Antisense compound
caagtgtataaccagcacat

SEQ ID NO: 4196 - DNA, 20 bp, Artificial Sequence
  Antisense compound
tcaagtgtataaccagcaca

SEQ ID NO: 4197 - DNA, 20 bp, Artificial Sequence
  Antisense compound
ctcaagtgtataaccagcac

SEQ ID NO: 4198 - DNA, 20 bp, Artificial Sequence
  Antisense compound
cctcaagtgtataaccagca

SEQ ID NO: 4199 - DNA, 20 bp, Artificial Sequence
  Antisense compound
tcctcaagtgtataaccagc

SEQ ID NO: 4200 - DNA, 20 bp, Artificial Sequence
  Antisense compound
ttcctcaagtgtataaccag

SEQ ID NO: 4201 - DNA, 20 bp, Artificial Sequence
  Antisense compound
cttcctcaagtgtataacca

SEQ ID NO: 4202 - DNA, 20 bp, Artificial Sequence
  Antisense compound
gcttcctcaagtgtataacc

SEQ ID NO: 4203 - DNA, 20 bp, Artificial Sequence
  Antisense compound
agcttcctcaagtgtataac

SEQ ID NO: 4204 - DNA, 20 bp, Artificial Sequence
  Antisense compound
tagcttcctcaagtgtataa

SEQ ID NO: 4205 - DNA, 20 bp, Artificial Sequence
  Antisense compound
ttagcttcctcaagtgtata

SEQ ID NO: 4206 - DNA, 20 bp, Artificial Sequence
  Antisense compound
cttagcttcctcaagtgtat

SEQ ID NO: 4207 - DNA, 20 bp, Artificial Sequence
  Antisense compound
tcttagcttcctcaagtgta

SEQ ID NO: 4208 - DNA, 20 bp, Artificial Sequence
  Antisense compound
gtcttagcttcctcaagtgt

SEQ ID NO: 4209 - DNA, 20 bp, Artificial Sequence
  Antisense compound
agtcttagcttcctcaagtg

SEQ ID NO: 4210 - DNA, 20 bp, Artificial Sequence
  Antisense compound
cagtcttagcttcctcaagt

SEQ ID NO: 4211 - DNA, 20 bp, Artificial Sequence
  Antisense compound
gcagtcttagcttcctcaag

SEQ ID NO: 4212 - DNA, 20 bp, Artificial Sequence
  Antisense compound
agcagtcttagcttcctcaa

SEQ ID NO: 4213 - DNA, 20 bp, Artificial Sequence
  Antisense compound
gagcagtcttagcttcctca

SEQ ID NO: 4214 - DNA, 20 bp, Artificial Sequence
  Antisense compound
agagcagtcttagcttcctc

SEQ ID NO: 4215 - DNA, 20 bp, Artificial Sequence
  Antisense compound
aagagcagtcttagcttcct

SEQ ID NO: 4216 - DNA, 20 bp, Artificial Sequence
  Antisense compound
taagagcagtcttagcttcc

SEQ ID NO: 4217 - DNA, 20 bp, Artificial Sequence
  Antisense compound
ttaagagcagtcttagcttc

SEQ ID NO: 4218 - DNA, 20 bp, Artificial Sequence
  Antisense compound
cttaagagcagtcttagctt

SEQ ID NO: 4219 - DNA, 20 bp, Artificial Sequence
  Antisense compound
tcttaagagcagtcttagct

SEQ ID NO: 4220 - DNA, 20 bp, Artificial Sequence
  Antisense compound
ttcttaagagcagtcttagc

SEQ ID NO: 4221 - DNA, 20 bp, Artificial Sequence
  Antisense compound
tttcttaagagcagtcttag

SEQ ID NO: 4222 - DNA, 20 bp, Artificial Sequence
  Antisense compound
atttcttaagagcagtctta

SEQ ID NO: 4223 - DNA, 20 bp, Artificial Sequence
  Antisense compound
catttcttaagagcagtctt

SEQ ID NO: 4224 - DNA, 20 bp, Artificial Sequence
  Antisense compound
gcatttcttaagagcagtct

SEQ ID NO: 4225 - DNA, 20 bp, Artificial Sequence
  Antisense compound
tgcatttcttaagagcagtc

SEQ ID NO: 4226 - DNA, 20 bp, Artificial Sequence
  Antisense compound
ttgcatttcttaagagcagt

SEQ ID NO: 4227 - DNA, 20 bp, Artificial Sequence
  Antisense compound
tttgcatttcttaagagcag

SEQ ID NO: 4228 - DNA, 20 bp, Artificial Sequence
  Antisense compound
atttgcatttcttaagagca

SEQ ID NO: 4229 - DNA, 20 bp, Artificial Sequence
  Antisense compound
gatttgcatttcttaagagc

SEQ ID NO: 4230 - DNA, 20 bp, Artificial Sequence
  Antisense compound
agatttgcatttcttaagag

SEQ ID NO: 4231 - DNA, 20 bp, Artificial Sequence
  Antisense compound
cagatttgcatttcttaaga

SEQ ID NO: 4232 - DNA, 20 bp, Artificial Sequence
  Antisense compound
gcagatttgcatttcttaag

SEQ ID NO: 4233 - DNA, 20 bp, Artificial Sequence
  Antisense compound
tgcagatttgcatttcttaa

SEQ ID NO: 4234 - DNA, 20 bp, Artificial Sequence
  Antisense compound
atgcagatttgcatttctta

SEQ ID NO: 4235 - DNA, 20 bp, Artificial Sequence
  Antisense compound
aatgcagatttgcatttctt

SEQ ID NO: 4236 - DNA, 20 bp, Artificial Sequence
  Antisense compound
aaatgcagatttgcatttct

SEQ ID NO: 4237 - DNA, 20 bp, Artificial Sequence
  Antisense compound
aaaatgcagatttgcatttc

SEQ ID NO: 4238 - DNA, 20 bp, Artificial Sequence
  Antisense compound
taaaatgcagatttgcattt

SEQ ID NO: 4239 - DNA, 20 bp, Artificial Sequence
  Antisense compound
ataaaatgcagatttgcatt

SEQ ID NO: 4240 - DNA, 20 bp, Artificial Sequence
  Antisense compound
cataaaatgcagatttgcat

SEQ ID NO: 4241 - DNA, 20 bp, Artificial Sequence
  Antisense compound
acataaaatgcagatttgca

SEQ ID NO: 4242 - DNA, 20 bp, Artificial Sequence
  Antisense compound
tacataaaatgcagatttgc

SEQ ID NO: 4243 - DNA, 20 bp, Artificial Sequence
  Antisense compound
gtacataaaatgcagatttg

SEQ ID NO: 4244 - DNA, 20 bp, Artificial Sequence
  Antisense compound
agtacataaaatgcagattt

SEQ ID NO: 4245 - DNA, 20 bp, Artificial Sequence
  Antisense compound
tagtacataaaatgcagatt

SEQ ID NO: 4246 - DNA, 20 bp, Artificial Sequence
  Antisense compound
gtagtacataaaatgcagat

SEQ ID NO: 4247 - DNA, 20 bp, Artificial Sequence
  Antisense compound
ggtagtacataaaatgcaga

SEQ ID NO: 4248 - DNA, 20 bp, Artificial Sequence
  Antisense compound
aggtagtacataaaatgcag

SEQ ID NO: 4249 - DNA, 20 bp, Artificial Sequence
  Antisense compound
aaggtagtacataaaatgca

SEQ ID NO: 4250 - DNA, 20 bp, Artificial Sequence
  Antisense compound
gaaggtagtacataaaatgc

SEQ ID NO: 4251 - DNA, 20 bp, Artificial Sequence
  Antisense compound
tgaaggtagtacataaaatg

SEQ ID NO: 4252 - DNA, 20 bp, Artificial Sequence
  Antisense compound
ctgaaggtagtacataaaat

SEQ ID NO: 4253 - DNA, 20 bp, Artificial Sequence
  Antisense compound
tctgaaggtagtacataaaa

SEQ ID NO: 4254 - DNA, 20 bp, Artificial Sequence
  Antisense compound
ttctgaaggtagtacataaa

SEQ ID NO: 4255 - DNA, 20 bp, Artificial Sequence
  Antisense compound
cttctgaaggtagtacataa

SEQ ID NO: 4256 - DNA, 20 bp, Artificial Sequence
  Antisense compound
gcttctgaaggtagtacata

SEQ ID NO: 4257 - DNA, 20 bp, Artificial Sequence
  Antisense compound
tgcttctgaaggtagtacat

SEQ ID NO: 4258 - DNA, 20 bp, Artificial Sequence
  Antisense compound
gtgcttctgaaggtagtaca

SEQ ID NO: 4259 - DNA, 20 bp, Artificial Sequence
  Antisense compound
ggtgcttctgaaggtagtac

SEQ ID NO: 4260 - DNA, 20 bp, Artificial Sequence
  Antisense compound
aggtgcttctgaaggtagta

SEQ ID NO: 4261 - DNA, 20 bp, Artificial Sequence
  Antisense compound
taggtgcttctgaaggtagt

SEQ ID NO: 4262 - DNA, 20 bp, Artificial Sequence
  Antisense compound
ttaggtgcttctgaaggtag

SEQ ID NO: 4263 - DNA, 20 bp, Artificial Sequence
  Antisense compound
attaggtgcttctgaaggta

SEQ ID NO: 4264 - DNA, 20 bp, Artificial Sequence
  Antisense compound
cattaggtgcttctgaaggt

SEQ ID NO: 4265 - DNA, 20 bp, Artificial Sequence
  Antisense compound
gcattaggtgcttctgaagg

SEQ ID NO: 4266 - DNA, 20 bp, Artificial Sequence
  Antisense compound
agcattaggtgcttctgaag

SEQ ID NO: 4267 - DNA, 20 bp, Artificial Sequence
  Antisense compound
tagcattaggtgcttctgaa

SEQ ID NO: 4268 - DNA, 20 bp, Artificial Sequence
  Antisense compound
ttagcattaggtgcttctga

SEQ ID NO: 4269 - DNA, 20 bp, Artificial Sequence
  Antisense compound
cttagcattaggtgcttctg

SEQ ID NO: 4270 - DNA, 20 bp, Artificial Sequence
  Antisense compound
ccttagcattaggtgcttct

SEQ ID NO: 4271 - DNA, 20 bp, Artificial Sequence
  Antisense compound
tccttagcattaggtgcttc

SEQ ID NO: 4272 - DNA, 20 bp, Artificial Sequence
  Antisense compound
ttccttagcattaggtgctt

SEQ ID NO: 4273 - DNA, 20 bp, Artificial Sequence
  Antisense compound
cttccttagcattaggtgct

SEQ ID NO: 4274 - DNA, 20 bp, Artificial Sequence
  Antisense compound
tcttccttagcattaggtgc

SEQ ID NO: 4275 - DNA, 20 bp, Artificial Sequence
  Antisense compound
ctcttccttagcattaggtg

SEQ ID NO: 4276 - DNA, 20 bp, Artificial Sequence
  Antisense compound
tctcttccttagcattaggt

SEQ ID NO: 4277 - DNA, 20 bp, Artificial Sequence
  Antisense compound
atctcttccttagcattagg

SEQ ID NO: 4278 - DNA, 20 bp, Artificial Sequence
  Antisense compound
aatctcttccttagcattag

SEQ ID NO: 4279 - DNA, 20 bp, Artificial Sequence
  Antisense compound
gaatctcttccttagcatta

SEQ ID NO: 4280 - DNA, 20 bp, Artificial Sequence
  Antisense compound
agaatctcttccttagcatt

SEQ ID NO: 4281 - DNA, 20 bp, Artificial Sequence
  Antisense compound
tagaatctcttccttagcat

SEQ ID NO: 4282 - DNA, 20 bp, Artificial Sequence
  Antisense compound
ctagaatctcttccttagca

SEQ ID NO: 4283 - DNA, 20 bp, Artificial Sequence
  Antisense compound
cctagaatctcttccttagc

SEQ ID NO: 4284 - DNA, 20 bp, Artificial Sequence
  Antisense compound
tcctagaatctcttccttag

SEQ ID NO: 4285 - DNA, 20 bp, Artificial Sequence
  Antisense compound
ttcctagaatctcttcctta

SEQ ID NO: 4286 - DNA, 20 bp, Artificial Sequence
  Antisense compound
gttcctagaatctcttcctt

SEQ ID NO: 4287 - DNA, 20 bp, Artificial Sequence
  Antisense compound
agttcctagaatctcttcct

SEQ ID NO: 4288 - DNA, 20 bp, Artificial Sequence
  Antisense compound
cagttcctagaatctcttcc

SEQ ID NO: 4289 - DNA, 20 bp, Artificial Sequence
  Antisense compound
acagttcctagaatctcttc

SEQ ID NO: 4290 - DNA, 20 bp, Artificial Sequence
  Antisense compound
tacagttcctagaatctctt

SEQ ID NO: 4291 - DNA, 20 bp, Artificial Sequence
  Antisense compound
atacagttcctagaatctct

SEQ ID NO: 4292 - DNA, 20 bp, Artificial Sequence
  Antisense compound
gatacagttcctagaatctc

SEQ ID NO: 4293 - DNA, 20 bp, Artificial Sequence
  Antisense compound
ggatacagttcctagaatct

SEQ ID NO: 4294 - DNA, 20 bp, Artificial Sequence
  Antisense compound
aggatacagttcctagaatc

SEQ ID NO: 4295 - DNA, 20 bp, Artificial Sequence
  Antisense compound
caggatacagttcctagaat

SEQ ID NO: 4296 - DNA, 20 bp, Artificial Sequence
  Antisense compound
ccaggatacagttcctagaa

SEQ ID NO: 4297 - DNA, 20 bp, Artificial Sequence
  Antisense compound
tccaggatacagttcctaga

SEQ ID NO: 4298 - DNA, 20 bp, Artificial Sequence
  Antisense compound
ttccaggatacagttcctag

SEQ ID NO: 4299 - DNA, 20 bp, Artificial Sequence
  Antisense compound
attccaggatacagttccta

SEQ ID NO: 4300 - DNA, 20 bp, Artificial Sequence
  Antisense compound
aattccaggatacagttcct

SEQ ID NO: 4301 - DNA, 20 bp, Artificial Sequence
  Antisense compound
aaattccaggatacagttcc

SEQ ID NO: 4302 - DNA, 20 bp, Artificial Sequence
  Antisense compound
caaattccaggatacagttc

SEQ ID NO: 4303 - DNA, 20 bp, Artificial Sequence
  Antisense compound
tcaaattccaggatacagtt

SEQ ID NO: 4304 - DNA, 20 bp, Artificial Sequence
  Antisense compound
ctcaaattccaggatacagt

SEQ ID NO: 4305 - DNA, 20 bp, Artificial Sequence
  Antisense compound
tctcaaattccaggatacag

SEQ ID NO: 4306 - DNA, 20 bp, Artificial Sequence
  Antisense compound
ctctcaaattccaggataca

SEQ ID NO: 4307 - DNA, 20 bp, Artificial Sequence
  Antisense compound
tctctcaaattccaggatac

SEQ ID NO: 4308 - DNA, 20 bp, Artificial Sequence
  Antisense compound
ttctctcaaattccaggata

SEQ ID NO: 4309 - DNA, 20 bp, Artificial Sequence
  Antisense compound
tttctctcaaattccaggat

SEQ ID NO: 4310 - DNA, 20 bp, Artificial Sequence
  Antisense compound
atttctctcaaattccagga

SEQ ID NO: 4311 - DNA, 20 bp, Artificial Sequence
  Antisense compound
catttctctcaaattccagg

SEQ ID NO: 4312 - DNA, 20 bp, Artificial Sequence
  Antisense compound
gcatttctctcaaattccag

SEQ ID NO: 4313 - DNA, 20 bp, Artificial Sequence
  Antisense compound
agcatttctctcaaattcca

SEQ ID NO: 4314 - DNA, 20 bp, Artificial Sequence
  Antisense compound
aagcatttctctcaaattcc

SEQ ID NO: 4315 - DNA, 20 bp, Artificial Sequence
  Antisense compound
caagcatttctctcaaattc

SEQ ID NO: 4316 - DNA, 20 bp, Artificial Sequence
  Antisense compound
gcaagcatttctctcaaatt

SEQ ID NO: 4317 - DNA, 20 bp, Artificial Sequence
  Antisense compound
agcaagcatttctctcaaat

SEQ ID NO: 4318 - DNA, 20 bp, Artificial Sequence
  Antisense compound
gagcaagcatttctctcaaa

SEQ ID NO: 4319 - DNA, 20 bp, Artificial Sequence
  Antisense compound
tgagcaagcatttctctcaa

SEQ ID NO: 4320 - DNA, 20 bp, Artificial Sequence
  Antisense compound
atgagcaagcatttctctca

SEQ ID NO: 4321 - DNA, 20 bp, Artificial Sequence
  Antisense compound
catgagcaagcatttctctc

SEQ ID NO: 4322 - DNA, 20 bp, Artificial Sequence
  Antisense compound
gcatgagcaagcatttctct

SEQ ID NO: 4323 - DNA, 20 bp, Artificial Sequence
  Antisense compound
agcatgagcaagcatttctc

SEQ ID NO: 4324 - DNA, 20 bp, Artificial Sequence
  Antisense compound
cagcatgagcaagcatttct

SEQ ID NO: 4325 - DNA, 20 bp, Artificial Sequence
  Antisense compound
tcagcatgagcaagcatttc

SEQ ID NO: 4326 - DNA, 20 bp, Artificial Sequence
  Antisense compound
ttcagcatgagcaagcattt

SEQ ID NO: 4327 - DNA, 20 bp, Artificial Sequence
  Antisense compound
cttcagcatgagcaagcatt

SEQ ID NO: 4328 - DNA, 20 bp, Artificial Sequence
  Antisense compound
tcttcagcatgagcaagcat

SEQ ID NO: 4329 - DNA, 20 bp, Artificial Sequence
  Antisense compound
ctcttcagcatgagcaagca

SEQ ID NO: 4330 - DNA, 20 bp, Artificial Sequence
  Antisense compound
tctcttcagcatgagcaagc

SEQ ID NO: 4331 - DNA, 20 bp, Artificial Sequence
  Antisense compound
gtctcttcagcatgagcaag

SEQ ID NO: 4332 - DNA, 20 bp, Artificial Sequence
  Antisense compound
tgtctcttcagcatgagcaa

SEQ ID NO: 4333 - DNA, 20 bp, Artificial Sequence
  Antisense compound
ttgtctcttcagcatgagca

SEQ ID NO: 4334 - DNA, 20 bp, Artificial Sequence
  Antisense compound
cttgtctcttcagcatgagc

SEQ ID NO: 4335 - DNA, 20 bp, Artificial Sequence
  Antisense compound
tcttgtctcttcagcatgag

SEQ ID NO: 4336 - DNA, 20 bp, Artificial Sequence
  Antisense compound
ttcttgtctcttcagcatga

SEQ ID NO: 4337 - DNA, 20 bp, Artificial Sequence
  Antisense compound
tttcttgtctcttcagcatg

SEQ ID NO: 4338 - DNA, 20 bp, Artificial Sequence
  Antisense compound
ttttcttgtctcttcagcat

SEQ ID NO: 4339 - DNA, 20 bp, Artificial Sequence
  Antisense compound
attttcttgtctcttcagca

SEQ ID NO: 4340 - DNA, 20 bp, Artificial Sequence
  Antisense compound
aattttcttgtctcttcagc

SEQ ID NO: 4341 - DNA, 20 bp, Artificial Sequence
  Antisense compound
taattttcttgtctcttcag

SEQ ID NO: 4342 - DNA, 20 bp, Artificial Sequence
  Antisense compound
ttaattttcttgtctcttca

SEQ ID NO: 4343 - DNA, 20 bp, Artificial Sequence
  Antisense compound
attaattttcttgtctcttc

SEQ ID NO: 4344 - DNA, 20 bp, Artificial Sequence
  Antisense compound
cattaattttcttgtctctt

SEQ ID NO: 4345 - DNA, 20 bp, Artificial Sequence
  Antisense compound
gcattaattttcttgtctct

SEQ ID NO: 4346 - DNA, 20 bp, Artificial Sequence
  Antisense compound
ggcattaattttcttgtctc

SEQ ID NO: 4347 - DNA, 20 bp, Artificial Sequence
  Antisense compound
aggcattaattttcttgtct

SEQ ID NO: 4348 - DNA, 20 bp, Artificial Sequence
  Antisense compound
taggcattaattttcttgtc

SEQ ID NO: 4349 - DNA, 20 bp, Artificial Sequence
  Antisense compound
ataggcattaattttcttgt

SEQ ID NO: 4350 - DNA, 20 bp, Artificial Sequence
  Antisense compound
tataggcattaattttcttg

SEQ ID NO: 4351 - DNA, 20 bp, Artificial Sequence
  Antisense compound
atataggcattaattttctt

SEQ ID NO: 4352 - DNA, 20 bp, Artificial Sequence
  Antisense compound
catataggcattaattttct

SEQ ID NO: 4353 - DNA, 20 bp, Artificial Sequence
  Antisense compound
gcatataggcattaattttc

SEQ ID NO: 4354 - DNA, 20 bp, Artificial Sequence
  Antisense compound
tgcatataggcattaatttt

SEQ ID NO: 4355 - DNA, 20 bp, Artificial Sequence
  Antisense compound
atgcatataggcattaattt

SEQ ID NO: 4356 - DNA, 20 bp, Artificial Sequence
  Antisense compound
catgcatataggcattaatt

SEQ ID NO: 4357 - DNA, 20 bp, Artificial Sequence
  Antisense compound
ccatgcatataggcattaat

SEQ ID NO: 4358 - DNA, 20 bp, Artificial Sequence
  Antisense compound
tccatgcatataggcattaa

SEQ ID NO: 4359 - DNA, 20 bp, Artificial Sequence
  Antisense compound
atccatgcatataggcatta

SEQ ID NO: 4360 - DNA, 20 bp, Artificial Sequence
  Antisense compound
catccatgcatataggcatt

SEQ ID NO: 4361 - DNA, 20 bp, Artificial Sequence
  Antisense compound
acatccatgcatataggcat

SEQ ID NO: 4362 - DNA, 20 bp, Artificial Sequence
  Antisense compound
aacatccatgcatataggca

SEQ ID NO: 4363 - DNA, 20 bp, Artificial Sequence
  Antisense compound
taacatccatgcatataggc

SEQ ID NO: 4364 - DNA, 20 bp, Artificial Sequence
  Antisense compound
ctaacatccatgcatatagg

SEQ ID NO: 4365 - DNA, 20 bp, Artificial Sequence
  Antisense compound
tctaacatccatgcatatag

SEQ ID NO: 4366 - DNA, 20 bp, Artificial Sequence
  Antisense compound
ctctaacatccatgcatata

SEQ ID NO: 4367 - DNA, 20 bp, Artificial Sequence
  Antisense compound
gctctaacatccatgcatat

SEQ ID NO: 4368 - DNA, 20 bp, Artificial Sequence
  Antisense compound
ggctctaacatccatgcata

SEQ ID NO: 4369 - DNA, 20 bp, Artificial Sequence
  Antisense compound
tggctctaacatccatgcat

SEQ ID NO: 4370 - DNA, 20 bp, Artificial Sequence
  Antisense compound
atggctctaacatccatgca

SEQ ID NO: 4371 - DNA, 20 bp, Artificial Sequence
  Antisense compound
tatggctctaacatccatgc

SEQ ID NO: 4372 - DNA, 20 bp, Artificial Sequence
  Antisense compound
ttatggctctaacatccatg

SEQ ID NO: 4373 - DNA, 20 bp, Artificial Sequence
  Antisense compound
attatggctctaacatccat

SEQ ID NO: 4374 - DNA, 20 bp, Artificial Sequence
  Antisense compound
cattatggctctaacatcca

SEQ ID NO: 4375 - DNA, 20 bp, Artificial Sequence
  Antisense compound
ccattatggctctaacatcc

SEQ ID NO: 4376 - DNA, 20 bp, Artificial Sequence
  Antisense compound
gccattatggctctaacatc

SEQ ID NO: 4377 - DNA, 20 bp, Artificial Sequence
  Antisense compound
tgccattatggctctaacat

SEQ ID NO: 4378 - DNA, 20 bp, Artificial Sequence
  Antisense compound
ttgccattatggctctaaca

SEQ ID NO: 4379 - DNA, 20 bp, Artificial Sequence
  Antisense compound
gttgccattatggctctaac

SEQ ID NO: 4380 - DNA, 20 bp, Artificial Sequence
  Antisense compound
ggttgccattatggctctaa

SEQ ID NO: 4381 - DNA, 20 bp, Artificial Sequence
  Antisense compound
tggttgccattatggctcta

SEQ ID NO: 4382 - DNA, 20 bp, Artificial Sequence
  Antisense compound
atggttgccattatggctct

SEQ ID NO: 4383 - DNA, 20 bp, Artificial Sequence
  Antisense compound
gatggttgccattatggctc

SEQ ID NO: 4384 - DNA, 20 bp, Artificial Sequence
  Antisense compound
ggatggttgccattatggct

SEQ ID NO: 4385 - DNA, 20 bp, Artificial Sequence
  Antisense compound
tggatggttgccattatggc

SEQ ID NO: 4386 - DNA, 20 bp, Artificial Sequence
  Antisense compound
ttggatggttgccattatgg

SEQ ID NO: 4387 - DNA, 20 bp, Artificial Sequence
  Antisense compound
gttggatggttgccattatg

SEQ ID NO: 4388 - DNA, 20 bp, Artificial Sequence
  Antisense compound
cgttggatggttgccattat

SEQ ID NO: 4389 - DNA, 20 bp, Artificial Sequence
  Antisense compound
acgttggatggttgccatta

SEQ ID NO: 4390 - DNA, 20 bp, Artificial Sequence
  Antisense compound
tacgttggatggttgccatt

SEQ ID NO: 4391 - DNA, 20 bp, Artificial Sequence
  Antisense compound
ttacgttggatggttgccat

SEQ ID NO: 4392 - DNA, 20 bp, Artificial Sequence
  Antisense compound
cttacgttggatggttgcca

SEQ ID NO: 4393 - DNA, 20 bp, Artificial Sequence
  Antisense compound
acttacgttggatggttgcc

SEQ ID NO: 4394 - DNA, 20 bp, Artificial Sequence
  Antisense compound
tacttacgttggatggttgc

SEQ ID NO: 4395 - DNA, 20 bp, Artificial Sequence
  Antisense compound
atacttacgttggatggttg

SEQ ID NO: 4396 - DNA, 20 bp, Artificial Sequence
  Antisense compound
tatacttacgttggatggtt

SEQ ID NO: 4397 - DNA, 20 bp, Artificial Sequence
  Antisense compound
ttatacttacgttggatggt

SEQ ID NO: 4398 - DNA, 20 bp, Artificial Sequence
  Antisense compound
tttatacttacgttggatgg

SEQ ID NO: 4399 - DNA, 20 bp, Artificial Sequence
  Antisense compound
ctttatacttacgttggatg

SEQ ID NO: 4400 - DNA, 20 bp, Artificial Sequence
  Antisense compound
cctttatacttacgttggat

SEQ ID NO: 4401 - DNA, 20 bp, Artificial Sequence
  Antisense compound
tcctttatacttacgttgga

SEQ ID NO: 4402 - DNA, 20 bp, Artificial Sequence
  Antisense compound
ttcctttatacttacgttgg

SEQ ID NO: 4403 - DNA, 20 bp, Artificial Sequence
  Antisense compound
attcctttatacttacgttg

SEQ ID NO: 4404 - DNA, 20 bp, Artificial Sequence
  Antisense compound
aattcctttatacttacgtt

SEQ ID NO: 4405 - DNA, 20 bp, Artificial Sequence
  Antisense compound
taattcctttatacttacgt

SEQ ID NO: 4406 - DNA, 20 bp, Artificial Sequence
  Antisense compound
ttaattcctttatacttacg

SEQ ID NO: 4407 - DNA, 20 bp, Artificial Sequence
  Antisense compound
tttaattcctttatacttac

SEQ ID NO: 4408 - DNA, 20 bp, Artificial Sequence
  Antisense compound
ttttaattcctttatactta

SEQ ID NO: 4409 - DNA, 20 bp, Artificial Sequence
  Antisense compound
attttaattcctttatactt

SEQ ID NO: 4410 - DNA, 20 bp, Artificial Sequence
  Antisense compound
aattttaattcctttatact

SEQ ID NO: 4411 - DNA, 20 bp, Artificial Sequence
  Antisense compound
gaattttaattcctttatac

SEQ ID NO: 4412 - DNA, 20 bp, Artificial Sequence
  Antisense compound
tgaattttaattcctttata

SEQ ID NO: 4413 - DNA, 20 bp, Artificial Sequence
  Antisense compound
ttgaattttaattcctttat

SEQ ID NO: 4414 - DNA, 20 bp, Artificial Sequence
  Antisense compound
cttgaattttaattccttta

SEQ ID NO: 4415 - DNA, 20 bp, Artificial Sequence
  Antisense compound
tcttgaattttaattccttt

SEQ ID NO: 4416 - DNA, 20 bp, Artificial Sequence
  Antisense compound
ctcttgaattttaattcctt

SEQ ID NO: 4417 - DNA, 20 bp, Artificial Sequence
  Antisense compound
cctcttgaattttaattcct

SEQ ID NO: 4418 - DNA, 20 bp, Artificial Sequence
  Antisense compound
ccctcttgaattttaattcc

SEQ ID NO: 4419 - DNA, 20 bp, Artificial Sequence
  Antisense compound
gccctcttgaattttaattc

SEQ ID NO: 4420 - DNA, 20 bp, Artificial Sequence
  Antisense compound
tgccctcttgaattttaatt

SEQ ID NO: 4421 - DNA, 20 bp, Artificial Sequence
  Antisense compound
atgccctcttgaattttaat

SEQ ID NO: 4422 - DNA, 20 bp, Artificial Sequence
  Antisense compound
gatgccctcttgaattttaa

SEQ ID NO: 4423 - DNA, 20 bp, Artificial Sequence
  Antisense compound
cgatgccctcttgaatttta

SEQ ID NO: 4424 - DNA, 20 bp, Artificial Sequence
  Antisense compound
acgatgccctcttgaatttt

SEQ ID NO: 4425 - DNA, 20 bp, Artificial Sequence
  Antisense compound
aacgatgccctcttgaattt

SEQ ID NO: 4426 - DNA, 20 bp, Artificial Sequence
  Antisense compound
caacgatgccctcttgaatt

SEQ ID NO: 4427 - DNA, 20 bp, Artificial Sequence
  Antisense compound
tcaacgatgccctcttgaat

SEQ ID NO: 4428 - DNA, 20 bp, Artificial Sequence
  Antisense compound
gtcaacgatgccctcttgaa

SEQ ID NO: 4429 - DNA, 20 bp, Artificial Sequence
  Antisense compound
agtcaacgatgccctcttga

SEQ ID NO: 4430 - DNA, 20 bp, Artificial Sequence
  Antisense compound
tagtcaacgatgccctcttg

SEQ ID NO: 4431 - DNA, 20 bp, Artificial Sequence
  Antisense compound
atagtcaacgatgccctctt

SEQ ID NO: 4432 - DNA, 20 bp, Artificial Sequence
  Antisense compound
catagtcaacgatgccctct

SEQ ID NO: 4433 - DNA, 20 bp, Artificial Sequence
  Antisense compound
ccatagtcaacgatgccctc

SEQ ID NO: 4434 - DNA, 20 bp, Artificial Sequence
  Antisense compound
accatagtcaacgatgccct

SEQ ID NO: 4435 - DNA, 20 bp, Artificial Sequence
  Antisense compound
caccatagtcaacgatgccc

SEQ ID NO: 4436 - DNA, 20 bp, Artificial Sequence
  Antisense compound
acaccatagtcaacgatgcc

SEQ ID NO: 4437 - DNA, 20 bp, Artificial Sequence
  Antisense compound
gacaccatagtcaacgatgc

SEQ ID NO: 4438 - DNA, 20 bp, Artificial Sequence
  Antisense compound
ggacaccatagtcaacgatg

SEQ ID NO: 4439 - DNA, 20 bp, Artificial Sequence
  Antisense compound
cggacaccatagtcaacgat

SEQ ID NO: 4440 - DNA, 20 bp, Artificial Sequence
  Antisense compound
tcggacaccatagtcaacga

SEQ ID NO: 4441 - DNA, 20 bp, Artificial Sequence
  Antisense compound
atcggacaccatagtcaacg

SEQ ID NO: 4442 - DNA, 20 bp, Artificial Sequence
  Antisense compound
aatcggacaccatagtcaac

SEQ ID NO: 4443 - DNA, 20 bp, Artificial Sequence
  Antisense compound
gaatcggacaccatagtcaa

SEQ ID NO: 4444 - DNA, 20 bp, Artificial Sequence
  Antisense compound
agaatcggacaccatagtca

SEQ ID NO: 4445 - DNA, 20 bp, Artificial Sequence
  Antisense compound
aagaatcggacaccatagtc

SEQ ID NO: 4446 - DNA, 20 bp, Artificial Sequence
  Antisense compound
gaagaatcggacaccatagt

SEQ ID NO: 4447 - DNA, 20 bp, Artificial Sequence
  Antisense compound
agaagaatcggacaccatag

SEQ ID NO: 4448 - DNA, 20 bp, Artificial Sequence
  Antisense compound
aagaagaatcggacaccata

SEQ ID NO: 4449 - DNA, 20 bp, Artificial Sequence
  Antisense compound
aaagaagaatcggacaccat

SEQ ID NO: 4450 - DNA, 20 bp, Artificial Sequence
  Antisense compound
aaaagaagaatcggacacca

SEQ ID NO: 4451 - DNA, 20 bp, Artificial Sequence
  Antisense compound
taaaagaagaatcggacacc

SEQ ID NO: 4452 - DNA, 20 bp, Artificial Sequence
  Antisense compound
ataaaagaagaatcggacac

SEQ ID NO: 4453 - DNA, 20 bp, Artificial Sequence
  Antisense compound
tataaaagaagaatcggaca

SEQ ID NO: 4454 - DNA, 20 bp, Artificial Sequence
  Antisense compound
gtataaaagaagaatcggac

SEQ ID NO: 4455 - DNA, 20 bp, Artificial Sequence
  Antisense compound
agtataaaagaagaatcgga

SEQ ID NO: 4456 - DNA, 20 bp, Artificial Sequence
  Antisense compound
tagtataaaagaagaatcgg

SEQ ID NO: 4457 - DNA, 20 bp, Artificial Sequence
  Antisense compound
ctagtataaaagaagaatcg

SEQ ID NO: 4458 - DNA, 20 bp, Artificial Sequence
  Antisense compound
actagtataaaagaagaatc

SEQ ID NO: 4459 - DNA, 20 bp, Artificial Sequence
  Antisense compound
tactagtataaaagaagaat

SEQ ID NO: 4460 - DNA, 20 bp, Artificial Sequence
  Antisense compound
ttactagtataaaagaagaa

SEQ ID NO: 4461 - DNA, 20 bp, Artificial Sequence
  Antisense compound
tttactagtataaaagaaga

SEQ ID NO: 4462 - DNA, 20 bp, Artificial Sequence
  Antisense compound
ctttactagtataaaagaag

SEQ ID NO: 4463 - DNA, 20 bp, Artificial Sequence
  Antisense compound
tctttactagtataaaagaa

SEQ ID NO: 4464 - DNA, 20 bp, Artificial Sequence
  Antisense compound
ctctttactagtataaaaga

SEQ ID NO: 4465 - DNA, 20 bp, Artificial Sequence
  Antisense compound
gctctttactagtataaaag

SEQ ID NO: 4466 - DNA, 20 bp, Artificial Sequence
  Antisense compound
ggctctttactagtataaaa

SEQ ID NO: 4467 - DNA, 20 bp, Artificial Sequence
  Antisense compound
aggctctttactagtataaa

SEQ ID NO: 4468 - DNA, 20 bp, Artificial Sequence
  Antisense compound
caggctctttactagtataa

SEQ ID NO: 4469 - DNA, 20 bp, Artificial Sequence
  Antisense compound
acaggctctttactagtata

SEQ ID NO: 4470 - DNA, 20 bp, Artificial Sequence
  Antisense compound
tacaggctctttactagtat

SEQ ID NO: 4471 - DNA, 20 bp, Artificial Sequence
  Antisense compound
ctacaggctctttactagta

SEQ ID NO: 4472 - DNA, 20 bp, Artificial Sequence
  Antisense compound
gctacaggctctttactagt

SEQ ID NO: 4473 - DNA, 20 bp, Artificial Sequence
  Antisense compound
agctacaggctctttactag

SEQ ID NO: 4474 - DNA, 20 bp, Artificial Sequence
  Antisense compound
aagctacaggctctttacta

SEQ ID NO: 4475 - DNA, 20 bp, Artificial Sequence
  Antisense compound
gaagctacaggctctttact

SEQ ID NO: 4476 - DNA, 20 bp, Artificial Sequence
  Antisense compound
agaagctacaggctctttac

SEQ ID NO: 4477 - DNA, 20 bp, Artificial Sequence
  Antisense compound
tagaagctacaggctcttta

SEQ ID NO: 4478 - DNA, 20 bp, Artificial Sequence
  Antisense compound
atagaagctacaggctcttt

SEQ ID NO: 4479 - DNA, 20 bp, Artificial Sequence
  Antisense compound
aatagaagctacaggctctt

SEQ ID NO: 4480 - DNA, 20 bp, Artificial Sequence
  Antisense compound
taatagaagctacaggctct

SEQ ID NO: 4481 - DNA, 20 bp, Artificial Sequence
  Antisense compound
ataatagaagctacaggctc

SEQ ID NO: 4482 - DNA, 20 bp, Artificial Sequence
  Antisense compound
aataatagaagctacaggct

SEQ ID NO: 4483 - DNA, 20 bp, Artificial Sequence
  Antisense compound
taataatagaagctacaggc

SEQ ID NO: 4484 - DNA, 20 bp, Artificial Sequence
  Antisense compound
gtaataatagaagctacagg

SEQ ID NO: 4485 - DNA, 20 bp, Artificial Sequence
  Antisense compound
cgtaataatagaagctacag

SEQ ID NO: 4486 - DNA, 20 bp, Artificial Sequence
  Antisense compound
tcgtaataatagaagctaca

SEQ ID NO: 4487 - DNA, 20 bp, Artificial Sequence
  Antisense compound
ttcgtaataatagaagctac

SEQ ID NO: 4488 - DNA, 20 bp, Artificial Sequence
  Antisense compound
cttcgtaataatagaagcta

SEQ ID NO: 4489 - DNA, 20 bp, Artificial Sequence
  Antisense compound
gcttcgtaataatagaagct

SEQ ID NO: 4490 - DNA, 20 bp, Artificial Sequence
  Antisense compound
agcttcgtaataatagaagc

SEQ ID NO: 4491 - DNA, 20 bp, Artificial Sequence
  Antisense compound
cagcttcgtaataatagaag

SEQ ID NO: 4492 - DNA, 20 bp, Artificial Sequence
  Antisense compound
tcagcttcgtaataatagaa

SEQ ID NO: 4493 - DNA, 20 bp, Artificial Sequence
  Antisense compound
ttcagcttcgtaataataga

SEQ ID NO: 4494 - DNA, 20 bp, Artificial Sequence
  Antisense compound
gttcagcttcgtaataatag

SEQ ID NO: 4495 - DNA, 20 bp, Artificial Sequence
  Antisense compound
agttcagcttcgtaataata

SEQ ID NO: 4496 - DNA, 20 bp, Artificial Sequence
  Antisense compound
gagttcagcttcgtaataat

SEQ ID NO: 4497 - DNA, 20 bp, Artificial Sequence
  Antisense compound
agagttcagcttcgtaataa

SEQ ID NO: 4498 - DNA, 20 bp, Artificial Sequence
  Antisense compound
gagagttcagcttcgtaata

SEQ ID NO: 4499 - DNA, 20 bp, Artificial Sequence
  Antisense compound
agagagttcagcttcgtaat

SEQ ID NO: 4500 - DNA, 20 bp, Artificial Sequence
  Antisense compound
tagagagttcagcttcgtaa

SEQ ID NO: 4501 - DNA, 20 bp, Artificial Sequence
  Antisense compound
ttagagagttcagcttcgta

SEQ ID NO: 4502 - DNA, 20 bp, Artificial Sequence
  Antisense compound
tttagagagttcagcttcgt

SEQ ID NO: 4503 - DNA, 20 bp, Artificial Sequence
  Antisense compound
atttagagagttcagcttcg

SEQ ID NO: 4504 - DNA, 20 bp, Artificial Sequence
  Antisense compound
catttagagagttcagcttc

SEQ ID NO: 4505 - DNA, 20 bp, Artificial Sequence
  Antisense compound
tcatttagagagttcagctt

SEQ ID NO: 4506 - DNA, 20 bp, Artificial Sequence
  Antisense compound
ctcatttagagagttcagct

SEQ ID NO: 4507 - DNA, 20 bp, Artificial Sequence
  Antisense compound
gctcatttagagagttcagc

SEQ ID NO: 4508 - DNA, 20 bp, Artificial Sequence
  Antisense compound
ggctcatttagagagttcag

SEQ ID NO: 4509 - DNA, 20 bp, Artificial Sequence
  Antisense compound
cggctcatttagagagttca

SEQ ID NO: 4510 - DNA, 20 bp, Artificial Sequence
  Antisense compound
gcggctcatttagagagttc

SEQ ID NO: 4511 - DNA, 20 bp, Artificial Sequence
  Antisense compound
agcggctcatttagagagtt

SEQ ID NO: 4512 - DNA, 20 bp, Artificial Sequence
  Antisense compound
aagcggctcatttagagagt

SEQ ID NO: 4513 - DNA, 20 bp, Artificial Sequence
  Antisense compound
caagcggctcatttagagag

SEQ ID NO: 4514 - DNA, 20 bp, Artificial Sequence
  Antisense compound
acaagcggctcatttagaga

SEQ ID NO: 4515 - DNA, 20 bp, Artificial Sequence
  Antisense compound
gacaagcggctcatttagag

SEQ ID NO: 4516 - DNA, 20 bp, Artificial Sequence
  Antisense compound
tgacaagcggctcatttaga

SEQ ID NO: 4517 - DNA, 20 bp, Artificial Sequence
  Antisense compound
gtgacaagcggctcatttag

SEQ ID NO: 4518 - DNA, 20 bp, Artificial Sequence
  Antisense compound
tgtgacaagcggctcattta

SEQ ID NO: 4519 - DNA, 20 bp, Artificial Sequence
  Antisense compound
ttgtgacaagcggctcattt

SEQ ID NO: 4520 - DNA, 20 bp, Artificial Sequence
  Antisense compound
attgtgacaagcggctcatt

SEQ ID NO: 4521 - DNA, 20 bp, Artificial Sequence
  Antisense compound
cattgtgacaagcggctcat

SEQ ID NO: 4522 - DNA, 20 bp, Artificial Sequence
  Antisense compound
gcattgtgacaagcggctca

SEQ ID NO: 4523 - DNA, 20 bp, Artificial Sequence
  Antisense compound
ggcattgtgacaagcggctc

SEQ ID NO: 4524 - DNA, 20 bp, Artificial Sequence
  Antisense compound
tggcattgtgacaagcggct

SEQ ID NO: 4525 - DNA, 20 bp, Artificial Sequence
  Antisense compound
ttggcattgtgacaagcggc

SEQ ID NO: 4526 - DNA, 20 bp, Artificial Sequence
  Antisense compound
attggcattgtgacaagcgg

SEQ ID NO: 4527 - DNA, 20 bp, Artificial Sequence
  Antisense compound
aattggcattgtgacaagcg

SEQ ID NO: 4528 - DNA, 20 bp, Artificial Sequence
  Antisense compound
caattggcattgtgacaagc

SEQ ID NO: 4529 - DNA, 20 bp, Artificial Sequence
  Antisense compound
ccaattggcattgtgacaag

SEQ ID NO: 4530 - DNA, 20 bp, Artificial Sequence
  Antisense compound
accaattggcattgtgacaa

SEQ ID NO: 4531 - DNA, 20 bp, Artificial Sequence
  Antisense compound
aaccaattggcattgtgaca

SEQ ID NO: 4532 - DNA, 20 bp, Artificial Sequence
  Antisense compound
taaccaattggcattgtgac

SEQ ID NO: 4533 - DNA, 20 bp, Artificial Sequence
  Antisense compound
ataaccaattggcattgtga

SEQ ID NO: 4534 - DNA, 20 bp, Artificial Sequence
  Antisense compound
cataaccaattggcattgtg

SEQ ID NO: 4535 - DNA, 20 bp, Artificial Sequence
  Antisense compound
acataaccaattggcattgt

SEQ ID NO: 4536 - DNA, 20 bp, Artificial Sequence
  Antisense compound
cacataaccaattggcattg

SEQ ID NO: 4537 - DNA, 20 bp, Artificial Sequence
  Antisense compound
tcacataaccaattggcatt

SEQ ID NO: 4538 - DNA, 20 bp, Artificial Sequence
  Antisense compound
gtcacataaccaattggcat

SEQ ID NO: 4539 - DNA, 20 bp, Artificial Sequence
  Antisense compound
tgtcacataaccaattggca

SEQ ID NO: 4540 - DNA, 20 bp, Artificial Sequence
  Antisense compound
gtgtcacataaccaattggc

SEQ ID NO: 4541 - DNA, 20 bp, Artificial Sequence
  Antisense compound
tgtgtcacataaccaattgg

SEQ ID NO: 4542 - DNA, 20 bp, Artificial Sequence
  Antisense compound
atgtgtcacataaccaattg

SEQ ID NO: 4543 - DNA, 20 bp, Artificial Sequence
  Antisense compound
catgtgtcacataaccaatt

SEQ ID NO: 4544 - DNA, 20 bp, Artificial Sequence
  Antisense compound
ccatgtgtcacataaccaat

SEQ ID NO: 4545 - DNA, 20 bp, Artificial Sequence
  Antisense compound
accatgtgtcacataaccaa

SEQ ID NO: 4546 - DNA, 20 bp, Artificial Sequence
  Antisense compound
aaccatgtgtcacataacca

SEQ ID NO: 4547 - DNA, 20 bp, Artificial Sequence
  Antisense compound
aaaccatgtgtcacataacc

SEQ ID NO: 4548 - DNA, 20 bp, Artificial Sequence
  Antisense compound
aaaaccatgtgtcacataac

SEQ ID NO: 4549 - DNA, 20 bp, Artificial Sequence
  Antisense compound
taaaaccatgtgtcacataa

SEQ ID NO: 4550 - DNA, 20 bp, Artificial Sequence
  Antisense compound
ttaaaaccatgtgtcacata

SEQ ID NO: 4551 - DNA, 20 bp, Artificial Sequence
  Antisense compound
attaaaaccatgtgtcacat

SEQ ID NO: 4552 - DNA, 20 bp, Artificial Sequence
  Antisense compound
gattaaaaccatgtgtcaca

SEQ ID NO: 4553 - DNA, 20 bp, Artificial Sequence
  Antisense compound
agattaaaaccatgtgtcac

SEQ ID NO: 4554 - DNA, 20 bp, Artificial Sequence
  Antisense compound
aagattaaaaccatgtgtca

SEQ ID NO: 4555 - DNA, 20 bp, Artificial Sequence
  Antisense compound
caagattaaaaccatgtgtc

SEQ ID NO: 4556 - DNA, 20 bp, Artificial Sequence
  Antisense compound
tcaagattaaaaccatgtgt

SEQ ID NO: 4557 - DNA, 20 bp, Artificial Sequence
  Antisense compound
ttcaagattaaaaccatgtg

SEQ ID NO: 4558 - DNA, 20 bp, Artificial Sequence
  Antisense compound
cttcaagattaaaaccatgt

SEQ ID NO: 4559 - DNA, 20 bp, Artificial Sequence
  Antisense compound
tcttcaagattaaaaccatg

SEQ ID NO: 4560 - DNA, 20 bp, Artificial Sequence
  Antisense compound
ctcttcaagattaaaaccat

SEQ ID NO: 4561 - DNA, 20 bp, Artificial Sequence
  Antisense compound
cctcttcaagattaaaacca

SEQ ID NO: 4562 - DNA, 20 bp, Artificial Sequence
  Antisense compound
gcctcttcaagattaaaacc

SEQ ID NO: 4563 - DNA, 20 bp, Artificial Sequence
  Antisense compound
agcctcttcaagattaaaac

SEQ ID NO: 4564 - DNA, 20 bp, Artificial Sequence
  Antisense compound
cagcctcttcaagattaaaa

SEQ ID NO: 4565 - DNA, 20 bp, Artificial Sequence
  Antisense compound
gcagcctcttcaagattaaa

SEQ ID NO: 4566 - DNA, 20 bp, Artificial Sequence
  Antisense compound
cgcagcctcttcaagattaa

SEQ ID NO: 4567 - DNA, 20 bp, Artificial Sequence
  Antisense compound
gcgcagcctcttcaagatta

SEQ ID NO: 4568 - DNA, 20 bp, Artificial Sequence
  Antisense compound
cgcgcagcctcttcaagatt

SEQ ID NO: 4569 - DNA, 20 bp, Artificial Sequence
  Antisense compound
gcgcgcagcctcttcaagat

SEQ ID NO: 4570 - DNA, 20 bp, Artificial Sequence
  Antisense compound
agcgcgcagcctcttcaaga

SEQ ID NO: 4571 - DNA, 20 bp, Artificial Sequence
  Antisense compound
cagcgcgcagcctcttcaag

SEQ ID NO: 4572 - DNA, 20 bp, Artificial Sequence
  Antisense compound
acagcgcgcagcctcttcaa

SEQ ID NO: 4573 - DNA, 20 bp, Artificial Sequence
  Antisense compound
tacagcgcgcagcctcttca

SEQ ID NO: 4574 - DNA, 20 bp, Artificial Sequence
  Antisense compound
atacagcgcgcagcctcttc

SEQ ID NO: 4575 - DNA, 20 bp, Artificial Sequence
  Antisense compound
catacagcgcgcagcctctt

SEQ ID NO: 4576 - DNA, 20 bp, Artificial Sequence
  Antisense compound
gcatacagcgcgcagcctct

SEQ ID NO: 4577 - DNA, 20 bp, Artificial Sequence
  Antisense compound
cgcatacagcgcgcagcctc

SEQ ID NO: 4578 - DNA, 20 bp, Artificial Sequence
  Antisense compound
acgcatacagcgcgcagcct

SEQ ID NO: 4579 - DNA, 20 bp, Artificial Sequence
  Antisense compound
aacgcatacagcgcgcagcc

SEQ ID NO: 4580 - DNA, 20 bp, Artificial Sequence
  Antisense compound
gaacgcatacagcgcgcagc

SEQ ID NO: 4581 - DNA, 20 bp, Artificial Sequence
  Antisense compound
agaacgcatacagcgcgcag

SEQ ID NO: 4582 - DNA, 20 bp, Artificial Sequence
  Antisense compound
gagaacgcatacagcgcgca

SEQ ID NO: 4583 - DNA, 20 bp, Artificial Sequence
  Antisense compound
agagaacgcatacagcgcgc

SEQ ID NO: 4584 - DNA, 20 bp, Artificial Sequence
  Antisense compound
aagagaacgcatacagcgcg

SEQ ID NO: 4585 - DNA, 20 bp, Artificial Sequence
  Antisense compound
taagagaacgcatacagcgc

SEQ ID NO: 4586 - DNA, 20 bp, Artificial Sequence
  Antisense compound
ttaagagaacgcatacagcg

SEQ ID NO: 4587 - DNA, 20 bp, Artificial Sequence
  Antisense compound
tttaagagaacgcatacagc

SEQ ID NO: 4588 - DNA, 20 bp, Artificial Sequence
  Antisense compound
ctttaagagaacgcatacag

SEQ ID NO: 4589 - DNA, 20 bp, Artificial Sequence
  Antisense compound
gctttaagagaacgcataca

SEQ ID NO: 4590 - DNA, 20 bp, Artificial Sequence
  Antisense compound
agctttaagagaacgcatac

SEQ ID NO: 4591 - DNA, 20 bp, Artificial Sequence
  Antisense compound
gagctttaagagaacgcata

SEQ ID NO: 4592 - DNA, 20 bp, Artificial Sequence
  Antisense compound
ggagctttaagagaacgcat

SEQ ID NO: 4593 - DNA, 20 bp, Artificial Sequence
  Antisense compound
aggagctttaagagaacgca

SEQ ID NO: 4594 - DNA, 20 bp, Artificial Sequence
  Antisense compound
caggagctttaagagaacgc

SEQ ID NO: 4595 - DNA, 20 bp, Artificial Sequence
  Antisense compound
gcaggagctttaagagaacg

SEQ ID NO: 4596 - DNA, 20 bp, Artificial Sequence
  Antisense compound
ggcaggagctttaagagaac

SEQ ID NO: 4597 - DNA, 20 bp, Artificial Sequence
  Antisense compound
cggcaggagctttaagagaa

SEQ ID NO: 4598 - DNA, 20 bp, Artificial Sequence
  Antisense compound
acggcaggagctttaagaga

SEQ ID NO: 4599 - DNA, 20 bp, Artificial Sequence
  Antisense compound
tacggcaggagctttaagag

SEQ ID NO: 4600 - DNA, 20 bp, Artificial Sequence
  Antisense compound
ctacggcaggagctttaaga

SEQ ID NO: 4601 - DNA, 20 bp, Artificial Sequence
  Antisense compound
actacggcaggagctttaag

SEQ ID NO: 4602 - DNA, 20 bp, Artificial Sequence
  Antisense compound
cactacggcaggagctttaa

SEQ ID NO: 4603 - DNA, 20 bp, Artificial Sequence
  Antisense compound
acactacggcaggagcttta

SEQ ID NO: 4604 - DNA, 20 bp, Artificial Sequence
  Antisense compound
gacactacggcaggagcttt

SEQ ID NO: 4605 - DNA, 20 bp, Artificial Sequence
  Antisense compound
tgacactacggcaggagctt

SEQ ID NO: 4606 - DNA, 20 bp, Artificial Sequence
  Antisense compound
ctgacactacggcaggagct

SEQ ID NO: 4607 - DNA, 20 bp, Artificial Sequence
  Antisense compound
actgacactacggcaggagc

SEQ ID NO: 4608 - DNA, 20 bp, Artificial Sequence
  Antisense compound
tactgacactacggcaggag

SEQ ID NO: 4609 - DNA, 20 bp, Artificial Sequence
  Antisense compound
atactgacactacggcagga

SEQ ID NO: 4610 - DNA, 20 bp, Artificial Sequence
  Antisense compound
gatactgacactacggcagg

SEQ ID NO: 4611 - DNA, 20 bp, Artificial Sequence
  Antisense compound
tgatactgacactacggcag

SEQ ID NO: 4612 - DNA, 20 bp, Artificial Sequence
  Antisense compound
atgatactgacactacggca

SEQ ID NO: 4613 - DNA, 20 bp, Artificial Sequence
  Antisense compound
gatgatactgacactacggc

SEQ ID NO: 4614 - DNA, 20 bp, Artificial Sequence
  Antisense compound
tgatgatactgacactacgg

SEQ ID NO: 4615 - DNA, 20 bp, Artificial Sequence
  Antisense compound
gtgatgatactgacactacg

SEQ ID NO: 4616 - DNA, 20 bp, Artificial Sequence
  Antisense compound
ggtgatgatactgacactac

SEQ ID NO: 4617 - DNA, 20 bp, Artificial Sequence
  Antisense compound
tggtgatgatactgacacta

SEQ ID NO: 4618 - DNA, 20 bp, Artificial Sequence
  Antisense compound
ctggtgatgatactgacact

SEQ ID NO: 4619 - DNA, 20 bp, Artificial Sequence
  Antisense compound
tctggtgatgatactgacac

SEQ ID NO: 4620 - DNA, 20 bp, Artificial Sequence
  Antisense compound
atctggtgatgatactgaca

SEQ ID NO: 4621 - DNA, 20 bp, Artificial Sequence
  Antisense compound
catctggtgatgatactgac

SEQ ID NO: 4622 - DNA, 20 bp, Artificial Sequence
  Antisense compound
gcatctggtgatgatactga

SEQ ID NO: 4623 - DNA, 20 bp, Artificial Sequence
  Antisense compound
agcatctggtgatgatactg

SEQ ID NO: 4624 - DNA, 20 bp, Artificial Sequence
  Antisense compound
cagcatctggtgatgatact

SEQ ID NO: 4625 - DNA, 20 bp, Artificial Sequence
  Antisense compound
acagcatctggtgatgatac

SEQ ID NO: 4626 - DNA, 20 bp, Artificial Sequence
  Antisense compound
aacagcatctggtgatgata

SEQ ID NO: 4627 - DNA, 20 bp, Artificial Sequence
  Antisense compound
taacagcatctggtgatgat

SEQ ID NO: 4628 - DNA, 20 bp, Artificial Sequence
  Antisense compound
gtaacagcatctggtgatga

SEQ ID NO: 4629 - DNA, 20 bp, Artificial Sequence
  Antisense compound
agtaacagcatctggtgatg

SEQ ID NO: 4630 - DNA, 20 bp, Artificial Sequence
  Antisense compound
tagtaacagcatctggtgat

SEQ ID NO: 4631 - DNA, 20 bp, Artificial Sequence
  Antisense compound
gtagtaacagcatctggtga

SEQ ID NO: 4632 - DNA, 20 bp, Artificial Sequence
  Antisense compound
tgtagtaacagcatctggtg

SEQ ID NO: 4633 - DNA, 20 bp, Artificial Sequence
  Antisense compound
atgtagtaacagcatctggt

SEQ ID NO: 4634 - DNA, 20 bp, Artificial Sequence
  Antisense compound
tatgtagtaacagcatctgg

SEQ ID NO: 4635 - DNA, 20 bp, Artificial Sequence
  Antisense compound
atatgtagtaacagcatctg

SEQ ID NO: 4636 - DNA, 20 bp, Artificial Sequence
  Antisense compound
tatatgtagtaacagcatct

SEQ ID NO: 4637 - DNA, 20 bp, Artificial Sequence
  Antisense compound
ttatatgtagtaacagcatc

SEQ ID NO: 4638 - DNA, 20 bp, Artificial Sequence
  Antisense compound
attatatgtagtaacagcat

SEQ ID NO: 4639 - DNA, 20 bp, Artificial Sequence
  Antisense compound
cattatatgtagtaacagca

SEQ ID NO: 4640 - DNA, 20 bp, Artificial Sequence
  Antisense compound
ccattatatgtagtaacagc

SEQ ID NO: 4641 - DNA, 20 bp, Artificial Sequence
  Antisense compound
tccattatatgtagtaacag

SEQ ID NO: 4642 - DNA, 20 bp, Artificial Sequence
  Antisense compound
atccattatatgtagtaaca

SEQ ID NO: 4643 - DNA, 20 bp, Artificial Sequence
  Antisense compound
tatccattatatgtagtaac

SEQ ID NO: 4644 - DNA, 20 bp, Artificial Sequence
  Antisense compound
gtatccattatatgtagtaa

SEQ ID NO: 4645 - DNA, 20 bp, Artificial Sequence
  Antisense compound
ggtatccattatatgtagta

SEQ ID NO: 4646 - DNA, 20 bp, Artificial Sequence
  Antisense compound
aggtatccattatatgtagt

SEQ ID NO: 4647 - DNA, 20 bp, Artificial Sequence
  Antisense compound
gaggtatccattatatgtag

SEQ ID NO: 4648 - DNA, 20 bp, Artificial Sequence
  Antisense compound
tgaggtatccattatatgta

SEQ ID NO: 4649 - DNA, 20 bp, Artificial Sequence
  Antisense compound
gtgaggtatccattatatgt

SEQ ID NO: 4650 - DNA, 20 bp, Artificial Sequence
  Antisense compound
agtgaggtatccattatatg

SEQ ID NO: 4651 - DNA, 20 bp, Artificial Sequence
  Antisense compound
aagtgaggtatccattatat

SEQ ID NO: 4652 - DNA, 20 bp, Artificial Sequence
  Antisense compound
gaagtgaggtatccattata

SEQ ID NO: 4653 - DNA, 20 bp, Artificial Sequence
  Antisense compound
cgaagtgaggtatccattat

SEQ ID NO: 4654 - DNA, 20 bp, Artificial Sequence
  Antisense compound
acgaagtgaggtatccatta

SEQ ID NO: 4655 - DNA, 20 bp, Artificial Sequence
  Antisense compound
gacgaagtgaggtatccatt

SEQ ID NO: 4656 - DNA, 20 bp, Artificial Sequence
  Antisense compound
tgacgaagtgaggtatccat

SEQ ID NO: 4657 - DNA, 20 bp, Artificial Sequence
  Antisense compound
atgacgaagtgaggtatcca

SEQ ID NO: 4658 - DNA, 20 bp, Artificial Sequence
  Antisense compound
gatgacgaagtgaggtatcc

SEQ ID NO: 4659 - DNA, 20 bp, Artificial Sequence
  Antisense compound
tgatgacgaagtgaggtatc

SEQ ID NO: 4660 - DNA, 20 bp, Artificial Sequence
  Antisense compound
ttgatgacgaagtgaggtat

SEQ ID NO: 4661 - DNA, 20 bp, Artificial Sequence
  Antisense compound
tttgatgacgaagtgaggta

SEQ ID NO: 4662 - DNA, 20 bp, Artificial Sequence
  Antisense compound
ctttgatgacgaagtgaggt

SEQ ID NO: 4663 - DNA, 20 bp, Artificial Sequence
  Antisense compound
tctttgatgacgaagtgagg

SEQ ID NO: 4664 - DNA, 20 bp, Artificial Sequence
  Antisense compound
gtctttgatgacgaagtgag

SEQ ID NO: 4665 - DNA, 20 bp, Artificial Sequence
  Antisense compound
tgtctttgatgacgaagtga

SEQ ID NO: 4666 - DNA, 20 bp, Artificial Sequence
  Antisense compound
atgtctttgatgacgaagtg

SEQ ID NO: 4667 - DNA, 20 bp, Artificial Sequence
  Antisense compound
gatgtctttgatgacgaagt

SEQ ID NO: 4668 - DNA, 20 bp, Artificial Sequence
  Antisense compound
agatgtctttgatgacgaag

SEQ ID NO: 4669 - DNA, 20 bp, Artificial Sequence
  Antisense compound
cagatgtctttgatgacgaa

SEQ ID NO: 4670 - DNA, 20 bp, Artificial Sequence
  Antisense compound
tcagatgtctttgatgacga

SEQ ID NO: 4671 - DNA, 20 bp, Artificial Sequence
  Antisense compound
ctcagatgtctttgatgacg

SEQ ID NO: 4672 - DNA, 20 bp, Artificial Sequence
  Antisense compound
cctcagatgtctttgatgac

SEQ ID NO: 4673 - DNA, 20 bp, Artificial Sequence
  Antisense compound
tcctcagatgtctttgatga

SEQ ID NO: 4674 - DNA, 20 bp, Artificial Sequence
  Antisense compound
ctcctcagatgtctttgatg

SEQ ID NO: 4675 - DNA, 20 bp, Artificial Sequence
  Antisense compound
gctcctcagatgtctttgat

SEQ ID NO: 4676 - DNA, 20 bp, Artificial Sequence
  Antisense compound
tgctcctcagatgtctttga

SEQ ID NO: 4677 - DNA, 20 bp, Artificial Sequence
  Antisense compound
gtgctcctcagatgtctttg

SEQ ID NO: 4678 - DNA, 20 bp, Artificial Sequence
  Antisense compound
agtgctcctcagatgtcttt

SEQ ID NO: 4679 - DNA, 20 bp, Artificial Sequence
  Antisense compound
aagtgctcctcagatgtctt

SEQ ID NO: 4680 - DNA, 20 bp, Artificial Sequence
  Antisense compound
aaagtgctcctcagatgtct

SEQ ID NO: 4681 - DNA, 20 bp, Artificial Sequence
  Antisense compound
caaagtgctcctcagatgtc

SEQ ID NO: 4682 - DNA, 20 bp, Artificial Sequence
  Antisense compound
acaaagtgctcctcagatgt

SEQ ID NO: 4683 - DNA, 20 bp, Artificial Sequence
  Antisense compound
tacaaagtgctcctcagatg

SEQ ID NO: 4684 - DNA, 20 bp, Artificial Sequence
  Antisense compound
ctacaaagtgctcctcagat

SEQ ID NO: 4685 - DNA, 20 bp, Artificial Sequence
  Antisense compound
tctacaaagtgctcctcaga

SEQ ID NO: 4686 - DNA, 20 bp, Artificial Sequence
  Antisense compound
ttctacaaagtgctcctcag

SEQ ID NO: 4687 - DNA, 20 bp, Artificial Sequence
  Antisense compound
tttctacaaagtgctcctca

SEQ ID NO: 4688 - DNA, 20 bp, Artificial Sequence
  Antisense compound
gtttctacaaagtgctcctc

SEQ ID NO: 4689 - DNA, 20 bp, Artificial Sequence
  Antisense compound
tgtttctacaaagtgctcct

SEQ ID NO: 4690 - DNA, 20 bp, Artificial Sequence
  Antisense compound
ctgtttctacaaagtgctcc

SEQ ID NO: 4691 - DNA, 20 bp, Artificial Sequence
  Antisense compound
actgtttctacaaagtgctc

SEQ ID NO: 4692 - DNA, 20 bp, Artificial Sequence
  Antisense compound
aactgtttctacaaagtgct

SEQ ID NO: 4693 - DNA, 20 bp, Artificial Sequence
  Antisense compound
aaactgtttctacaaagtgc

SEQ ID NO: 4694 - DNA, 20 bp, Artificial Sequence
  Antisense compound
gaaactgtttctacaaagtg

SEQ ID NO: 4695 - DNA, 20 bp, Artificial Sequence
  Antisense compound
agaaactgtttctacaaagt

SEQ ID NO: 4696 - DNA, 20 bp, Artificial Sequence
  Antisense compound
aagaaactgtttctacaaag

SEQ ID NO: 4697 - DNA, 20 bp, Artificial Sequence
  Antisense compound
aaagaaactgtttctacaaa

SEQ ID NO: 4698 - DNA, 20 bp, Artificial Sequence
  Antisense compound
caaagaaactgtttctacaa

SEQ ID NO: 4699 - DNA, 20 bp, Artificial Sequence
  Antisense compound
ccaaagaaactgtttctaca

SEQ ID NO: 4700 - DNA, 20 bp, Artificial Sequence
  Antisense compound
gccaaagaaactgtttctac

SEQ ID NO: 4701 - DNA, 20 bp, Artificial Sequence
  Antisense compound
agccaaagaaactgtttcta

SEQ ID NO: 4702 - DNA, 20 bp, Artificial Sequence
  Antisense compound
cagccaaagaaactgtttct

SEQ ID NO: 4703 - DNA, 20 bp, Artificial Sequence
  Antisense compound
ccagccaaagaaactgtttc

SEQ ID NO: 4704 - DNA, 20 bp, Artificial Sequence
  Antisense compound
gccagccaaagaaactgttt

SEQ ID NO: 4705 - DNA, 20 bp, Artificial Sequence
  Antisense compound
agccagccaaagaaactgtt

SEQ ID NO: 4706 - DNA, 20 bp, Artificial Sequence
  Antisense compound
gagccagccaaagaaactgt

SEQ ID NO: 4707 - DNA, 20 bp, Artificial Sequence
  Antisense compound
agagccagccaaagaaactg

SEQ ID NO: 4708 - DNA, 20 bp, Artificial Sequence
  Antisense compound
aagagccagccaaagaaact

SEQ ID NO: 4709 - DNA, 20 bp, Artificial Sequence
  Antisense compound
taagagccagccaaagaaac

SEQ ID NO: 4710 - DNA, 20 bp, Artificial Sequence
  Antisense compound
gtaagagccagccaaagaaa

SEQ ID NO: 4711 - DNA, 20 bp, Artificial Sequence
  Antisense compound
tgtaagagccagccaaagaa

SEQ ID NO: 4712 - DNA, 20 bp, Artificial Sequence
  Antisense compound
ctgtaagagccagccaaaga

SEQ ID NO: 4713 - DNA, 20 bp, Artificial Sequence
  Antisense compound
tctgtaagagccagccaaag

SEQ ID NO: 4714 - DNA, 20 bp, Artificial Sequence
  Antisense compound
ctctgtaagagccagccaaa

SEQ ID NO: 4715 - DNA, 20 bp, Artificial Sequence
  Antisense compound
tctctgtaagagccagccaa

SEQ ID NO: 4716 - DNA, 20 bp, Artificial Sequence
  Antisense compound
atctctgtaagagccagcca

SEQ ID NO: 4717 - DNA, 20 bp, Artificial Sequence
  Antisense compound
aatctctgtaagagccagcc

SEQ ID NO: 4718 - DNA, 20 bp, Artificial Sequence
  Antisense compound
caatctctgtaagagccagc

SEQ ID NO: 4719 - DNA, 20 bp, Artificial Sequence
  Antisense compound
ccaatctctgtaagagccag

SEQ ID NO: 4720 - DNA, 20 bp, Artificial Sequence
  Antisense compound
accaatctctgtaagagcca

SEQ ID NO: 4721 - DNA, 20 bp, Artificial Sequence
  Antisense compound
gaccaatctctgtaagagcc

SEQ ID NO: 4722 - DNA, 20 bp, Artificial Sequence
  Antisense compound
ggaccaatctctgtaagagc

SEQ ID NO: 4723 - DNA, 20 bp, Artificial Sequence
  Antisense compound
aggaccaatctctgtaagag

SEQ ID NO: 4724 - DNA, 20 bp, Artificial Sequence
  Antisense compound
taggaccaatctctgtaaga

SEQ ID NO: 4725 - DNA, 20 bp, Artificial Sequence
  Antisense compound
ataggaccaatctctgtaag

SEQ ID NO: 4726 - DNA, 20 bp, Artificial Sequence
  Antisense compound
aataggaccaatctctgtaa

SEQ ID NO: 4727 - DNA, 20 bp, Artificial Sequence
  Antisense compound
gaataggaccaatctctgta

SEQ ID NO: 4728 - DNA, 20 bp, Artificial Sequence
  Antisense compound
tgaataggaccaatctctgt

SEQ ID NO: 4729 - DNA, 20 bp, Artificial Sequence
  Antisense compound
ctgaataggaccaatctctg

SEQ ID NO: 4730 - DNA, 20 bp, Artificial Sequence
  Antisense compound
cctgaataggaccaatctct

SEQ ID NO: 4731 - DNA, 20 bp, Artificial Sequence
  Antisense compound
tcctgaataggaccaatctc

SEQ ID NO: 4732 - DNA, 20 bp, Artificial Sequence
  Antisense compound
gtcctgaataggaccaatct

SEQ ID NO: 4733 - DNA, 20 bp, Artificial Sequence
  Antisense compound
tgtcctgaataggaccaatc

SEQ ID NO: 4734 - DNA, 20 bp, Artificial Sequence
  Antisense compound
ctgtcctgaataggaccaat

SEQ ID NO: 4735 - DNA, 20 bp, Artificial Sequence
  Antisense compound
gctgtcctgaataggaccaa

SEQ ID NO: 4736 - DNA, 20 bp, Artificial Sequence
  Antisense compound
cgctgtcctgaataggacca

SEQ ID NO: 4737 - DNA, 20 bp, Artificial Sequence
  Antisense compound
acgctgtcctgaataggacc

SEQ ID NO: 4738 - DNA, 20 bp, Artificial Sequence
  Antisense compound
tacgctgtcctgaataggac

SEQ ID NO: 4739 - DNA, 20 bp, Artificial Sequence
  Antisense compound
gtacgctgtcctgaatagga

SEQ ID NO: 4740 - DNA, 20 bp, Artificial Sequence
  Antisense compound
tgtacgctgtcctgaatagg

SEQ ID NO: 4741 - DNA, 20 bp, Artificial Sequence
  Antisense compound
ctgtacgctgtcctgaatag

SEQ ID NO: 4742 - DNA, 20 bp, Artificial Sequence
  Antisense compound
tctgtacgctgtcctgaata

SEQ ID NO: 4743 - DNA, 20 bp, Artificial Sequence
  Antisense compound
ctctgtacgctgtcctgaat

SEQ ID NO: 4744 - DNA, 20 bp, Artificial Sequence
  Antisense compound
actctgtacgctgtcctgaa

SEQ ID NO: 4745 - DNA, 20 bp, Artificial Sequence
  Antisense compound
aactctgtacgctgtcctga

SEQ ID NO: 4746 - DNA, 20 bp, Artificial Sequence
  Antisense compound
taactctgtacgctgtcctg

SEQ ID NO: 4747 - DNA, 20 bp, Artificial Sequence
  Antisense compound
ctaactctgtacgctgtcct

SEQ ID NO: 4748 - DNA, 20 bp, Artificial Sequence
  Antisense compound
cctaactctgtacgctgtcc

SEQ ID NO: 4749 - DNA, 20 bp, Artificial Sequence
  Antisense compound
acctaactctgtacgctgtc

SEQ ID NO: 4750 - DNA, 20 bp, Artificial Sequence
  Antisense compound
cacctaactctgtacgctgt

SEQ ID NO: 4751 - DNA, 20 bp, Artificial Sequence
  Antisense compound
acacctaactctgtacgctg

SEQ ID NO: 4752 - DNA, 20 bp, Artificial Sequence
  Antisense compound
aacacctaactctgtacgct

SEQ ID NO: 4753 - DNA, 20 bp, Artificial Sequence
  Antisense compound
caacacctaactctgtacgc

SEQ ID NO: 4754 - DNA, 20 bp, Artificial Sequence
  Antisense compound
tcaacacctaactctgtacg

SEQ ID NO: 4755 - DNA, 20 bp, Artificial Sequence
  Antisense compound
ttcaacacctaactctgtac

SEQ ID NO: 4756 - DNA, 20 bp, Artificial Sequence
  Antisense compound
attcaacacctaactctgta

SEQ ID NO: 4757 - DNA, 20 bp, Artificial Sequence
  Antisense compound
aattcaacacctaactctgt

SEQ ID NO: 4758 - DNA, 20 bp, Artificial Sequence
  Antisense compound
aaattcaacacctaactctg

SEQ ID NO: 4759 - DNA, 20 bp, Artificial Sequence
  Antisense compound
gaaattcaacacctaactct

SEQ ID NO: 4760 - DNA, 20 bp, Artificial Sequence
  Antisense compound
agaaattcaacacctaactc

SEQ ID NO: 4761 - DNA, 20 bp, Artificial Sequence
  Antisense compound
aagaaattcaacacctaact

SEQ ID NO: 4762 - DNA, 20 bp, Artificial Sequence
  Antisense compound
taagaaattcaacacctaac

SEQ ID NO: 4763 - DNA, 20 bp, Artificial Sequence
  Antisense compound
ttaagaaattcaacacctaa

SEQ ID NO: 4764 - DNA, 20 bp, Artificial Sequence
  Antisense compound
cttaagaaattcaacaccta

SEQ ID NO: 4765 - DNA, 20 bp, Artificial Sequence
  Antisense compound
gcttaagaaattcaacacct

SEQ ID NO: 4766 - DNA, 20 bp, Artificial Sequence
  Antisense compound
cgcttaagaaattcaacacc

SEQ ID NO: 4767 - DNA, 20 bp, Artificial Sequence
  Antisense compound
acgcttaagaaattcaacac

SEQ ID NO: 4768 - DNA, 20 bp, Artificial Sequence
  Antisense compound
cacgcttaagaaattcaaca

SEQ ID NO: 4769 - DNA, 20 bp, Artificial Sequence
  Antisense compound
ccacgcttaagaaattcaac

SEQ ID NO: 4770 - DNA, 20 bp, Artificial Sequence
  Antisense compound
accacgcttaagaaattcaa

SEQ ID NO: 4771 - DNA, 20 bp, Artificial Sequence
  Antisense compound
caccacgcttaagaaattca

SEQ ID NO: 4772 - DNA, 20 bp, Artificial Sequence
  Antisense compound
tcaccacgcttaagaaattc

SEQ ID NO: 4773 - DNA, 20 bp, Artificial Sequence
  Antisense compound
gtcaccacgcttaagaaatt

SEQ ID NO: 4774 - DNA, 20 bp, Artificial Sequence
  Antisense compound
tgtcaccacgcttaagaaat

SEQ ID NO: 4775 - DNA, 20 bp, Artificial Sequence
  Antisense compound
ttgtcaccacgcttaagaaa

SEQ ID NO: 4776 - DNA, 20 bp, Artificial Sequence
  Antisense compound
tttgtcaccacgcttaagaa

SEQ ID NO: 4777 - DNA, 20 bp, Artificial Sequence
  Antisense compound
ttttgtcaccacgcttaaga

SEQ ID NO: 4778 - DNA, 20 bp, Artificial Sequence
  Antisense compound
attttgtcaccacgcttaag

SEQ ID NO: 4779 - DNA, 20 bp, Artificial Sequence
  Antisense compound
aattttgtcaccacgcttaa

SEQ ID NO: 4780 - DNA, 20 bp, Artificial Sequence
  Antisense compound
caattttgtcaccacgctta

SEQ ID NO: 4781 - DNA, 20 bp, Artificial Sequence
  Antisense compound
acaattttgtcaccacgctt

SEQ ID NO: 4782 - DNA, 20 bp, Artificial Sequence
  Antisense compound
cacaattttgtcaccacgct

SEQ ID NO: 4783 - DNA, 20 bp, Artificial Sequence
  Antisense compound
acacaattttgtcaccacgc

SEQ ID NO: 4784 - DNA, 20 bp, Artificial Sequence
  Antisense compound
tacacaattttgtcaccacg

SEQ ID NO: 4785 - DNA, 20 bp, Artificial Sequence
  Antisense compound
gtacacaattttgtcaccac

SEQ ID NO: 4786 - DNA, 20 bp, Artificial Sequence
  Antisense compound
ggtacacaattttgtcacca

SEQ ID NO: 4787 - DNA, 20 bp, Artificial Sequence
  Antisense compound
tggtacacaattttgtcacc

SEQ ID NO: 4788 - DNA, 20 bp, Artificial Sequence
  Antisense compound
gtggtacacaattttgtcac

SEQ ID NO: 4789 - DNA, 20 bp, Artificial Sequence
  Antisense compound
tgtggtacacaattttgtca

SEQ ID NO: 4790 - DNA, 20 bp, Artificial Sequence
  Antisense compound
gtgtggtacacaattttgtc

SEQ ID NO: 4791 - DNA, 20 bp, Artificial Sequence
  Antisense compound
agtgtggtacacaattttgt

SEQ ID NO: 4792 - DNA, 20 bp, Artificial Sequence
  Antisense compound
gagtgtggtacacaattttg

SEQ ID NO: 4793 - DNA, 20 bp, Artificial Sequence
  Antisense compound
agagtgtggtacacaatttt

SEQ ID NO: 4794 - DNA, 20 bp, Artificial Sequence
  Antisense compound
cagagtgtggtacacaattt

SEQ ID NO: 4795 - DNA, 20 bp, Artificial Sequence
  Antisense compound
ccagagtgtggtacacaatt

SEQ ID NO: 4796 - DNA, 20 bp, Artificial Sequence
  Antisense compound
tccagagtgtggtacacaat

SEQ ID NO: 4797 - DNA, 20 bp, Artificial Sequence
  Antisense compound
ctccagagtgtggtacacaa

SEQ ID NO: 4798 - DNA, 20 bp, Artificial Sequence
  Antisense compound
tctccagagtgtggtacaca

SEQ ID NO: 4799 - DNA, 20 bp, Artificial Sequence
  Antisense compound
ctctccagagtgtggtacac

SEQ ID NO: 4800 - DNA, 20 bp, Artificial Sequence
  Antisense compound
gctctccagagtgtggtaca

SEQ ID NO: 4801 - DNA, 20 bp, Artificial Sequence
  Antisense compound
ggctctccagagtgtggtac

SEQ ID NO: 4802 - DNA, 20 bp, Artificial Sequence
  Antisense compound
gggctctccagagtgtggta

SEQ ID NO: 4803 - DNA, 20 bp, Artificial Sequence
  Antisense compound
ggggctctccagagtgtggt

SEQ ID NO: 4804 - DNA, 20 bp, Artificial Sequence
  Antisense compound
cggggctctccagagtgtgg

SEQ ID NO: 4805 - DNA, 20 bp, Artificial Sequence
  Antisense compound
acggggctctccagagtgtg

SEQ ID NO: 4806 - DNA, 20 bp, Artificial Sequence
  Antisense compound
gacggggctctccagagtgt

SEQ ID NO: 4807 - DNA, 20 bp, Artificial Sequence
  Antisense compound
cgacggggctctccagagtg

SEQ ID NO: 4808 - DNA, 20 bp, Artificial Sequence
  Antisense compound
tcgacggggctctccagagt

SEQ ID NO: 4809 - DNA, 20 bp, Artificial Sequence
  Antisense compound
ctcgacggggctctccagag

SEQ ID NO: 4810 - DNA, 20 bp, Artificial Sequence
  Antisense compound
actcgacggggctctccaga

SEQ ID NO: 4811 - DNA, 20 bp, Artificial Sequence
  Antisense compound
aactcgacggggctctccag

SEQ ID NO: 4812 - DNA, 20 bp, Artificial Sequence
  Antisense compound
aaactcgacggggctctcca

SEQ ID NO: 4813 - DNA, 20 bp, Artificial Sequence
  Antisense compound
gaaactcgacggggctctcc

SEQ ID NO: 4814 - DNA, 20 bp, Artificial Sequence
  Antisense compound
tgaaactcgacggggctctc

SEQ ID NO: 4815 - DNA, 20 bp, Artificial Sequence
  Antisense compound
atgaaactcgacggggctct

SEQ ID NO: 4816 - DNA, 20 bp, Artificial Sequence
  Antisense compound
gatgaaactcgacggggctc

SEQ ID NO: 4817 - DNA, 20 bp, Artificial Sequence
  Antisense compound
agatgaaactcgacggggct

SEQ ID NO: 4818 - DNA, 20 bp, Artificial Sequence
  Antisense compound
aagatgaaactcgacggggc

SEQ ID NO: 4819 - DNA, 20 bp, Artificial Sequence
  Antisense compound
caagatgaaactcgacgggg

SEQ ID NO: 4820 - DNA, 20 bp, Artificial Sequence
  Antisense compound
tcaagatgaaactcgacggg

SEQ ID NO: 4821 - DNA, 20 bp, Artificial Sequence
  Antisense compound
gtcaagatgaaactcgacgg

SEQ ID NO: 4822 - DNA, 20 bp, Artificial Sequence
  Antisense compound
cgtcaagatgaaactcgacg

SEQ ID NO: 4823 - DNA, 20 bp, Artificial Sequence
  Antisense compound
ccgtcaagatgaaactcgac

SEQ ID NO: 4824 - DNA, 20 bp, Artificial Sequence
  Antisense compound
accgtcaagatgaaactcga

SEQ ID NO: 4825 - DNA, 20 bp, Artificial Sequence
  Antisense compound
caccgtcaagatgaaactcg

SEQ ID NO: 4826 - DNA, 20 bp, Artificial Sequence
  Antisense compound
tcaccgtcaagatgaaactc

SEQ ID NO: 4827 - DNA, 20 bp, Artificial Sequence
  Antisense compound
ctcaccgtcaagatgaaact

SEQ ID NO: 4828 - DNA, 20 bp, Artificial Sequence
  Antisense compound
cctcaccgtcaagatgaaac

SEQ ID NO: 4829 - DNA, 20 bp, Artificial Sequence
  Antisense compound
acctcaccgtcaagatgaaa

SEQ ID NO: 4830 - DNA, 20 bp, Artificial Sequence
  Antisense compound
aacctcaccgtcaagatgaa

SEQ ID NO: 4831 - DNA, 20 bp, Artificial Sequence
  Antisense compound
gaacctcaccgtcaagatga

SEQ ID NO: 4832 - DNA, 20 bp, Artificial Sequence
  Antisense compound
agaacctcaccgtcaagatg

SEQ ID NO: 4833 - DNA, 20 bp, Artificial Sequence
  Antisense compound
aagaacctcaccgtcaagat

SEQ ID NO: 4834 - DNA, 20 bp, Artificial Sequence
  Antisense compound
aaagaacctcaccgtcaaga

SEQ ID NO: 4835 - DNA, 20 bp, Artificial Sequence
  Antisense compound
gaaagaacctcaccgtcaag

SEQ ID NO: 4836 - DNA, 20 bp, Artificial Sequence
  Antisense compound
tgaaagaacctcaccgtcaa

SEQ ID NO: 4837 - DNA, 20 bp, Artificial Sequence
  Antisense compound
gtgaaagaacctcaccgtca

SEQ ID NO: 4838 - DNA, 20 bp, Artificial Sequence
  Antisense compound
agtgaaagaacctcaccgtc

SEQ ID NO: 4839 - DNA, 20 bp, Artificial Sequence
  Antisense compound
aagtgaaagaacctcaccgt

SEQ ID NO: 4840 - DNA, 20 bp, Artificial Sequence
  Antisense compound
caagtgaaagaacctcaccg

SEQ ID NO: 4841 - DNA, 20 bp, Artificial Sequence
  Antisense compound
tcaagtgaaagaacctcacc

SEQ ID NO: 4842 - DNA, 20 bp, Artificial Sequence
  Antisense compound
gtcaagtgaaagaacctcac

SEQ ID NO: 4843 - DNA, 20 bp, Artificial Sequence
  Antisense compound
tgtcaagtgaaagaacctca

SEQ ID NO: 4844 - DNA, 20 bp, Artificial Sequence
  Antisense compound
ttgtcaagtgaaagaacctc

SEQ ID NO: 4845 - DNA, 20 bp, Artificial Sequence
  Antisense compound
tttgtcaagtgaaagaacct

SEQ ID NO: 4846 - DNA, 20 bp, Artificial Sequence
  Antisense compound
gtttgtcaagtgaaagaacc

SEQ ID NO: 4847 - DNA, 20 bp, Artificial Sequence
  Antisense compound
agtttgtcaagtgaaagaac

SEQ ID NO: 4848 - DNA, 20 bp, Artificial Sequence
  Antisense compound
tagtttgtcaagtgaaagaa

SEQ ID NO: 4849 - DNA, 20 bp, Artificial Sequence
  Antisense compound
ttagtttgtcaagtgaaaga

SEQ ID NO: 4850 - DNA, 20 bp, Artificial Sequence
  Antisense compound
tttagtttgtcaagtgaaag

SEQ ID NO: 4851 - DNA, 20 bp, Artificial Sequence
  Antisense compound
ctttagtttgtcaagtgaaa

SEQ ID NO: 4852 - DNA, 20 bp, Artificial Sequence
  Antisense compound
tctttagtttgtcaagtgaa

SEQ ID NO: 4853 - DNA, 20 bp, Artificial Sequence
  Antisense compound
ctctttagtttgtcaagtga

SEQ ID NO: 4854 - DNA, 20 bp, Artificial Sequence
  Antisense compound
actctttagtttgtcaagtg

SEQ ID NO: 4855 - DNA, 20 bp, Artificial Sequence
  Antisense compound
gactctttagtttgtcaagt

SEQ ID NO: 4856 - DNA, 20 bp, Artificial Sequence
  Antisense compound
agactctttagtttgtcaag

SEQ ID NO: 4857 - DNA, 20 bp, Artificial Sequence
  Antisense compound
gagactctttagtttgtcaa

SEQ ID NO: 4858 - DNA, 20 bp, Artificial Sequence
  Antisense compound
agagactctttagtttgtca

SEQ ID NO: 4859 - DNA, 20 bp, Artificial Sequence
  Antisense compound
aagagactctttagtttgtc

SEQ ID NO: 4860 - DNA, 20 bp, Artificial Sequence
  Antisense compound
taagagactctttagtttgt

SEQ ID NO: 4861 - DNA, 20 bp, Artificial Sequence
  Antisense compound
ataagagactctttagtttg

SEQ ID NO: 4862 - DNA, 20 bp, Artificial Sequence
  Antisense compound
gataagagactctttagttt

SEQ ID NO: 4863 - DNA, 20 bp, Artificial Sequence
  Antisense compound
ggataagagactctttagtt

SEQ ID NO: 4864 - DNA, 20 bp, Artificial Sequence
  Antisense compound
gggataagagactctttagt

SEQ ID NO: 4865 - DNA, 20 bp, Artificial Sequence
  Antisense compound
agggataagagactctttag

SEQ ID NO: 4866 - DNA, 20 bp, Artificial Sequence
  Antisense compound
cagggataagagactcttta

SEQ ID NO: 4867 - DNA, 20 bp, Artificial Sequence
  Antisense compound
gcagggataagagactcttt

SEQ ID NO: 4868 - DNA, 20 bp, Artificial Sequence
  Antisense compound
cgcagggataagagactctt

SEQ ID NO: 4869 - DNA, 20 bp, Artificial Sequence
  Antisense compound
ccgcagggataagagactct

SEQ ID NO: 4870 - DNA, 20 bp, Artificial Sequence
  Antisense compound
cccgcagggataagagactc

SEQ ID NO: 4871 - DNA, 20 bp, Artificial Sequence
  Antisense compound
tcccgcagggataagagact

SEQ ID NO: 4872 - DNA, 20 bp, Artificial Sequence
  Antisense compound
ctcccgcagggataagagac

SEQ ID NO: 4873 - DNA, 20 bp, Artificial Sequence
  Antisense compound
cctcccgcagggataagaga

SEQ ID NO: 4874 - DNA, 20 bp, Artificial Sequence
  Antisense compound
acctcccgcagggataagag

SEQ ID NO: 4875 - DNA, 20 bp, Artificial Sequence
  Antisense compound
aacctcccgcagggataaga

SEQ ID NO: 4876 - DNA, 20 bp, Artificial Sequence
  Antisense compound
taacctcccgcagggataag

SEQ ID NO: 4877 - DNA, 20 bp, Artificial Sequence
  Antisense compound
ttaacctcccgcagggataa

SEQ ID NO: 4878 - DNA, 20 bp, Artificial Sequence
  Antisense compound
cttaacctcccgcagggata

SEQ ID NO: 4879 - DNA, 20 bp, Artificial Sequence
  Antisense compound
tcttaacctcccgcagggat

SEQ ID NO: 4880 - DNA, 20 bp, Artificial Sequence
  Antisense compound
gtcttaacctcccgcaggga

SEQ ID NO: 4881 - DNA, 20 bp, Artificial Sequence
  Antisense compound
agtcttaacctcccgcaggg

SEQ ID NO: 4882 - DNA, 20 bp, Artificial Sequence
  Antisense compound
tagtcttaacctcccgcagg

SEQ ID NO: 4883 - DNA, 20 bp, Artificial Sequence
  Antisense compound
atagtcttaacctcccgcag

SEQ ID NO: 4884 - DNA, 20 bp, Artificial Sequence
  Antisense compound
tatagtcttaacctcccgca

SEQ ID NO: 4885 - DNA, 20 bp, Artificial Sequence
  Antisense compound
ttatagtcttaacctcccgc

SEQ ID NO: 4886 - DNA, 20 bp, Artificial Sequence
  Antisense compound
tttatagtcttaacctcccg

SEQ ID NO: 4887 - DNA, 20 bp, Artificial Sequence
  Antisense compound
ttttatagtcttaacctccc

SEQ ID NO: 4888 - DNA, 20 bp, Artificial Sequence
  Antisense compound
cttttatagtcttaacctcc

SEQ ID NO: 4889 - DNA, 20 bp, Artificial Sequence
  Antisense compound
acttttatagtcttaacctc

SEQ ID NO: 4890 - DNA, 20 bp, Artificial Sequence
  Antisense compound
cacttttatagtcttaacct

SEQ ID NO: 4891 - DNA, 20 bp, Artificial Sequence
  Antisense compound
acacttttatagtcttaacc

SEQ ID NO: 4892 - DNA, 20 bp, Artificial Sequence
  Antisense compound
aacacttttatagtcttaac

SEQ ID NO: 4893 - DNA, 20 bp, Artificial Sequence
  Antisense compound
gaacacttttatagtcttaa

SEQ ID NO: 4894 - DNA, 20 bp, Artificial Sequence
  Antisense compound
tgaacacttttatagtctta

SEQ ID NO: 4895 - DNA, 20 bp, Artificial Sequence
  Antisense compound
gtgaacacttttatagtctt

SEQ ID NO: 4896 - DNA, 20 bp, Artificial Sequence
  Antisense compound
tgtgaacacttttatagtct

SEQ ID NO: 4897 - DNA, 20 bp, Artificial Sequence
  Antisense compound
ttgtgaacacttttatagtc

SEQ ID NO: 4898 - DNA, 20 bp, Artificial Sequence
  Antisense compound
gttgtgaacacttttatagt

SEQ ID NO: 4899 - DNA, 20 bp, Artificial Sequence
  Antisense compound
agttgtgaacacttttatag

SEQ ID NO: 4900 - DNA, 20 bp, Artificial Sequence
  Antisense compound
cagttgtgaacacttttata

SEQ ID NO: 4901 - DNA, 20 bp, Artificial Sequence
  Antisense compound
acagttgtgaacacttttat

SEQ ID NO: 4902 - DNA, 20 bp, Artificial Sequence
  Antisense compound
cacagttgtgaacactttta

SEQ ID NO: 4903 - DNA, 20 bp, Artificial Sequence
  Antisense compound
ccacagttgtgaacactttt

SEQ ID NO: 4904 - DNA, 20 bp, Artificial Sequence
  Antisense compound
tccacagttgtgaacacttt

SEQ ID NO: 4905 - DNA, 20 bp, Artificial Sequence
  Antisense compound
gtccacagttgtgaacactt

SEQ ID NO: 4906 - DNA, 20 bp, Artificial Sequence
  Antisense compound
tgtccacagttgtgaacact

SEQ ID NO: 4907 - DNA, 20 bp, Artificial Sequence
  Antisense compound
ttgtccacagttgtgaacac

SEQ ID NO: 4908 - DNA, 20 bp, Artificial Sequence
  Antisense compound
gttgtccacagttgtgaaca

SEQ ID NO: 4909 - DNA, 20 bp, Artificial Sequence
  Antisense compound
tgttgtccacagttgtgaac

SEQ ID NO: 4910 - DNA, 20 bp, Artificial Sequence
  Antisense compound
gtgttgtccacagttgtgaa

SEQ ID NO: 4911 - DNA, 20 bp, Artificial Sequence
  Antisense compound
agtgttgtccacagttgtga

SEQ ID NO: 4912 - DNA, 20 bp, Artificial Sequence
  Antisense compound
tagtgttgtccacagttgtg

SEQ ID NO: 4913 - DNA, 20 bp, Artificial Sequence
  Antisense compound
ttagtgttgtccacagttgt

SEQ ID NO: 4914 - DNA, 20 bp, Artificial Sequence
  Antisense compound
attagtgttgtccacagttg

SEQ ID NO: 4915 - DNA, 20 bp, Artificial Sequence
  Antisense compound
gattagtgttgtccacagtt

SEQ ID NO: 4916 - DNA, 20 bp, Artificial Sequence
  Antisense compound
agattagtgttgtccacagt

SEQ ID NO: 4917 - DNA, 20 bp, Artificial Sequence
  Antisense compound
gagattagtgttgtccacag

SEQ ID NO: 4918 - DNA, 20 bp, Artificial Sequence
  Antisense compound
ggagattagtgttgtccaca

SEQ ID NO: 4919 - DNA, 20 bp, Artificial Sequence
  Antisense compound
tggagattagtgttgtccac

SEQ ID NO: 4920 - DNA, 20 bp, Artificial Sequence
  Antisense compound
gtggagattagtgttgtcca

SEQ ID NO: 4921 - DNA, 20 bp, Artificial Sequence
  Antisense compound
tgtggagattagtgttgtcc

SEQ ID NO: 4922 - DNA, 20 bp, Artificial Sequence
  Antisense compound
gtgtggagattagtgttgtc

SEQ ID NO: 4923 - DNA, 20 bp, Artificial Sequence
  Antisense compound
tgtgtggagattagtgttgt

SEQ ID NO: 4924 - DNA, 20 bp, Artificial Sequence
  Antisense compound
gtgtgtggagattagtgttg

SEQ ID NO: 4925 - DNA, 20 bp, Artificial Sequence
  Antisense compound
tgtgtgtggagattagtgtt

SEQ ID NO: 4926 - DNA, 20 bp, Artificial Sequence
  Antisense compound
ctgtgtgtggagattagtgt

SEQ ID NO: 4927 - DNA, 20 bp, Artificial Sequence
  Antisense compound
gctgtgtgtggagattagtg

SEQ ID NO: 4928 - DNA, 20 bp, Artificial Sequence
  Antisense compound
agctgtgtgtggagattagt

SEQ ID NO: 4929 - DNA, 20 bp, Artificial Sequence
  Antisense compound
aagctgtgtgtggagattag

SEQ ID NO: 4930 - DNA, 20 bp, Artificial Sequence
  Antisense compound
caagctgtgtgtggagatta

SEQ ID NO: 4931 - DNA, 20 bp, Artificial Sequence
  Antisense compound
acaagctgtgtgtggagatt

SEQ ID NO: 4932 - DNA, 20 bp, Artificial Sequence
  Antisense compound
cacaagctgtgtgtggagat

SEQ ID NO: 4933 - DNA, 20 bp, Artificial Sequence
  Antisense compound
ccacaagctgtgtgtggaga

SEQ ID NO: 4934 - DNA, 20 bp, Artificial Sequence
  Antisense compound
tccacaagctgtgtgtggag

SEQ ID NO: 4935 - DNA, 20 bp, Artificial Sequence
  Antisense compound
atccacaagctgtgtgtgga

SEQ ID NO: 4936 - DNA, 20 bp, Artificial Sequence
  Antisense compound
tatccacaagctgtgtgtgg

SEQ ID NO: 4937 - DNA, 20 bp, Artificial Sequence
  Antisense compound
atatccacaagctgtgtgtg

SEQ ID NO: 4938 - DNA, 20 bp, Artificial Sequence
  Antisense compound
catatccacaagctgtgtgt

SEQ ID NO: 4939 - DNA, 20 bp, Artificial Sequence
  Antisense compound
acatatccacaagctgtgtg

SEQ ID NO: 4940 - DNA, 20 bp, Artificial Sequence
  Antisense compound
gacatatccacaagctgtgt

SEQ ID NO: 4941 - DNA, 20 bp, Artificial Sequence
  Antisense compound
agacatatccacaagctgtg

SEQ ID NO: 4942 - DNA, 20 bp, Artificial Sequence
  Antisense compound
tagacatatccacaagctgt

SEQ ID NO: 4943 - DNA, 20 bp, Artificial Sequence
  Antisense compound
atagacatatccacaagctg

SEQ ID NO: 4944 - DNA, 20 bp, Artificial Sequence
  Antisense compound
catagacatatccacaagct

SEQ ID NO: 4945 - DNA, 20 bp, Artificial Sequence
  Antisense compound
tcatagacatatccacaagc

SEQ ID NO: 4946 - DNA, 20 bp, Artificial Sequence
  Antisense compound
gtcatagacatatccacaag

SEQ ID NO: 4947 - DNA, 20 bp, Artificial Sequence
  Antisense compound
tgtcatagacatatccacaa

SEQ ID NO: 4948 - DNA, 20 bp, Artificial Sequence
  Antisense compound
atgtcatagacatatccaca

SEQ ID NO: 4949 - DNA, 20 bp, Artificial Sequence
  Antisense compound
tatgtcatagacatatccac

SEQ ID NO: 4950 - DNA, 20 bp, Artificial Sequence
  Antisense compound
atatgtcatagacatatcca

SEQ ID NO: 4951 - DNA, 20 bp, Artificial Sequence
  Antisense compound
catatgtcatagacatatcc

SEQ ID NO: 4952 - DNA, 20 bp, Artificial Sequence
  Antisense compound
ccatatgtcatagacatatc

SEQ ID NO: 4953 - DNA, 20 bp, Artificial Sequence
  Antisense compound
tccatatgtcatagacatat

SEQ ID NO: 4954 - DNA, 20 bp, Artificial Sequence
  Antisense compound
gtccatatgtcatagacata

SEQ ID NO: 4955 - DNA, 20 bp, Artificial Sequence
  Antisense compound
tgtccatatgtcatagacat

SEQ ID NO: 4956 - DNA, 20 bp, Artificial Sequence
  Antisense compound
ctgtccatatgtcatagaca

SEQ ID NO: 4957 - DNA, 20 bp, Artificial Sequence
  Antisense compound
gctgtccatatgtcatagac

SEQ ID NO: 4958 - DNA, 20 bp, Artificial Sequence
  Antisense compound
tgctgtccatatgtcataga

SEQ ID NO: 4959 - DNA, 20 bp, Artificial Sequence
  Antisense compound
ctgctgtccatatgtcatag

SEQ ID NO: 4960 - DNA, 20 bp, Artificial Sequence
  Antisense compound
actgctgtccatatgtcata

SEQ ID NO: 4961 - DNA, 20 bp, Artificial Sequence
  Antisense compound
aactgctgtccatatgtcat

SEQ ID NO: 4962 - DNA, 20 bp, Artificial Sequence
  Antisense compound
aaactgctgtccatatgtca

SEQ ID NO: 4963 - DNA, 20 bp, Artificial Sequence
  Antisense compound
caaactgctgtccatatgtc

SEQ ID NO: 4964 - DNA, 20 bp, Artificial Sequence
  Antisense compound
ccaaactgctgtccatatgt

SEQ ID NO: 4965 - DNA, 20 bp, Artificial Sequence
  Antisense compound
accaaactgctgtccatatg

SEQ ID NO: 4966 - DNA, 20 bp, Artificial Sequence
  Antisense compound
gaccaaactgctgtccatat

SEQ ID NO: 4967 - DNA, 20 bp, Artificial Sequence
  Antisense compound
ggaccaaactgctgtccata

SEQ ID NO: 4968 - DNA, 20 bp, Artificial Sequence
  Antisense compound
tggaccaaactgctgtccat

SEQ ID NO: 4969 - DNA, 20 bp, Artificial Sequence
  Antisense compound
ttggaccaaactgctgtcca

SEQ ID NO: 4970 - DNA, 20 bp, Artificial Sequence
  Antisense compound
gttggaccaaactgctgtcc

SEQ ID NO: 4971 - DNA, 20 bp, Artificial Sequence
  Antisense compound
tgttggaccaaactgctgtc

SEQ ID NO: 4972 - DNA, 20 bp, Artificial Sequence
  Antisense compound
atgttggaccaaactgctgt

SEQ ID NO: 4973 - DNA, 20 bp, Artificial Sequence
  Antisense compound
tatgttggaccaaactgctg

SEQ ID NO: 4974 - DNA, 20 bp, Artificial Sequence
  Antisense compound
gtatgttggaccaaactgct

SEQ ID NO: 4975 - DNA, 20 bp, Artificial Sequence
  Antisense compound
agtatgttggaccaaactgc

SEQ ID NO: 4976 - DNA, 20 bp, Artificial Sequence
  Antisense compound
aagtatgttggaccaaactg

SEQ ID NO: 4977 - DNA, 20 bp, Artificial Sequence
  Antisense compound
caagtatgttggaccaaact

SEQ ID NO: 4978 - DNA, 20 bp, Artificial Sequence
  Antisense compound
ccaagtatgttggaccaaac

SEQ ID NO: 4979 - DNA, 20 bp, Artificial Sequence
  Antisense compound
tccaagtatgttggaccaaa

SEQ ID NO: 4980 - DNA, 20 bp, Artificial Sequence
  Antisense compound
atccaagtatgttggaccaa

SEQ ID NO: 4981 - DNA, 20 bp, Artificial Sequence
  Antisense compound
catccaagtatgttggacca

SEQ ID NO: 4982 - DNA, 20 bp, Artificial Sequence
  Antisense compound
ccatccaagtatgttggacc

SEQ ID NO: 4983 - DNA, 20 bp, Artificial Sequence
  Antisense compound
accatccaagtatgttggac

SEQ ID NO: 4984 - DNA, 20 bp, Artificial Sequence
  Antisense compound
caccatccaagtatgttgga

SEQ ID NO: 4985 - DNA, 20 bp, Artificial Sequence
  Antisense compound
gcaccatccaagtatgttgg

SEQ ID NO: 4986 - DNA, 20 bp, Artificial Sequence
  Antisense compound
agcaccatccaagtatgttg

SEQ ID NO: 4987 - DNA, 20 bp, Artificial Sequence
  Antisense compound
cagcaccatccaagtatgtt

SEQ ID NO: 4988 - DNA, 20 bp, Artificial Sequence
  Antisense compound
tcagcaccatccaagtatgt

SEQ ID NO: 4989 - DNA, 20 bp, Artificial Sequence
  Antisense compound
atcagcaccatccaagtatg

SEQ ID NO: 4990 - DNA, 20 bp, Artificial Sequence
  Antisense compound
catcagcaccatccaagtat

SEQ ID NO: 4991 - DNA, 20 bp, Artificial Sequence
  Antisense compound
acatcagcaccatccaagta

SEQ ID NO: 4992 - DNA, 20 bp, Artificial Sequence
  Antisense compound
aacatcagcaccatccaagt

SEQ ID NO: 4993 - DNA, 20 bp, Artificial Sequence
  Antisense compound
taacatcagcaccatccaag

SEQ ID NO: 4994 - DNA, 20 bp, Artificial Sequence
  Antisense compound
gtaacatcagcaccatccaa

SEQ ID NO: 4995 - DNA, 20 bp, Artificial Sequence
  Antisense compound
tgtaacatcagcaccatcca

SEQ ID NO: 4996 - DNA, 20 bp, Artificial Sequence
  Antisense compound
ttgtaacatcagcaccatcc

SEQ ID NO: 4997 - DNA, 20 bp, Artificial Sequence
  Antisense compound
tttgtaacatcagcaccatc

SEQ ID NO: 4998 - DNA, 20 bp, Artificial Sequence
  Antisense compound
ttttgtaacatcagcaccat

SEQ ID NO: 4999 - DNA, 20 bp, Artificial Sequence
  Antisense compound
tttttgtaacatcagcacca

SEQ ID NO: 5000 - DNA, 20 bp, Artificial Sequence
  Antisense compound
atttttgtaacatcagcacc

SEQ ID NO: 5001 - DNA, 20 bp, Artificial Sequence
  Antisense compound
aatttttgtaacatcagcac

SEQ ID NO: 5002 - DNA, 20 bp, Artificial Sequence
  Antisense compound
taatttttgtaacatcagca

SEQ ID NO: 5003 - DNA, 20 bp, Artificial Sequence
  Antisense compound
ttaatttttgtaacatcagc

SEQ ID NO: 5004 - DNA, 20 bp, Artificial Sequence
  Antisense compound
tttaatttttgtaacatcag

SEQ ID NO: 5005 - DNA, 20 bp, Artificial Sequence
  Antisense compound
gtttaatttttgtaacatca

SEQ ID NO: 5006 - DNA, 20 bp, Artificial Sequence
  Antisense compound
ggtttaatttttgtaacatc

SEQ ID NO: 5007 - DNA, 20 bp, Artificial Sequence
  Antisense compound
aggtttaatttttgtaacat

SEQ ID NO: 5008 - DNA, 20 bp, Artificial Sequence
  Antisense compound
gaggtttaatttttgtaaca

SEQ ID NO: 5009 - DNA, 20 bp, Artificial Sequence
  Antisense compound
tgaggtttaatttttgtaac

SEQ ID NO: 5010 - DNA, 20 bp, Artificial Sequence
  Antisense compound
atgaggtttaatttttgtaa

SEQ ID NO: 5011 - DNA, 20 bp, Artificial Sequence
  Antisense compound
catgaggtttaatttttgta

SEQ ID NO: 5012 - DNA, 20 bp, Artificial Sequence
  Antisense compound
acatgaggtttaatttttgt

SEQ ID NO: 5013 - DNA, 20 bp, Artificial Sequence
  Antisense compound
tacatgaggtttaatttttg

SEQ ID NO: 5014 - DNA, 20 bp, Artificial Sequence
  Antisense compound
ttacatgaggtttaattttt

SEQ ID NO: 5015 - DNA, 20 bp, Artificial Sequence
  Antisense compound
tttacatgaggtttaatttt

SEQ ID NO: 5016 - DNA, 20 bp, Artificial Sequence
  Antisense compound
atttacatgaggtttaattt

SEQ ID NO: 5017 - DNA, 20 bp, Artificial Sequence
  Antisense compound
gatttacatgaggtttaatt

SEQ ID NO: 5018 - DNA, 20 bp, Artificial Sequence
  Antisense compound
tgatttacatgaggtttaat

SEQ ID NO: 5019 - DNA, 20 bp, Artificial Sequence
  Antisense compound
atgatttacatgaggtttaa

SEQ ID NO: 5020 - DNA, 20 bp, Artificial Sequence
  Antisense compound
catgatttacatgaggttta

SEQ ID NO: 5021 - DNA, 20 bp, Artificial Sequence
  Antisense compound
tcatgatttacatgaggttt

SEQ ID NO: 5022 - DNA, 20 bp, Artificial Sequence
  Antisense compound
ctcatgatttacatgaggtt

SEQ ID NO: 5023 - DNA, 20 bp, Artificial Sequence
  Antisense compound
cctcatgatttacatgaggt

SEQ ID NO: 5024 - DNA, 20 bp, Artificial Sequence
  Antisense compound
ccctcatgatttacatgagg

SEQ ID NO: 5025 - DNA, 20 bp, Artificial Sequence
  Antisense compound
accctcatgatttacatgag

SEQ ID NO: 5026 - DNA, 20 bp, Artificial Sequence
  Antisense compound
taccctcatgatttacatga

SEQ ID NO: 5027 - DNA, 20 bp, Artificial Sequence
  Antisense compound
ttaccctcatgatttacatg

SEQ ID NO: 5028 - DNA, 20 bp, Artificial Sequence
  Antisense compound
cttaccctcatgatttacat

SEQ ID NO: 5029 - DNA, 20 bp, Artificial Sequence
  Antisense compound
tcttaccctcatgatttaca

SEQ ID NO: 5030 - DNA, 20 bp, Artificial Sequence
  Antisense compound
gtcttaccctcatgatttac

SEQ ID NO: 5031 - DNA, 20 bp, Artificial Sequence
  Antisense compound
agtcttaccctcatgattta

SEQ ID NO: 5032 - DNA, 20 bp, Artificial Sequence
  Antisense compound
aagtcttaccctcatgattt

SEQ ID NO: 5033 - DNA, 20 bp, Artificial Sequence
  Antisense compound
aaagtcttaccctcatgatt

SEQ ID NO: 5034 - DNA, 20 bp, Artificial Sequence
  Antisense compound
gaaagtcttaccctcatgat

SEQ ID NO: 5035 - DNA, 20 bp, Artificial Sequence
  Antisense compound
agaaagtcttaccctcatga

SEQ ID NO: 5036 - DNA, 20 bp, Artificial Sequence
  Antisense compound
aagaaagtcttaccctcatg

SEQ ID NO: 5037 - DNA, 20 bp, Artificial Sequence
  Antisense compound
aaagaaagtcttaccctcat

SEQ ID NO: 5038 - DNA, 20 bp, Artificial Sequence
  Antisense compound
caaagaaagtcttaccctca

SEQ ID NO: 5039 - DNA, 20 bp, Artificial Sequence
  Antisense compound
acaaagaaagtcttaccctc

SEQ ID NO: 5040 - DNA, 20 bp, Artificial Sequence
  Antisense compound
tacaaagaaagtcttaccct

SEQ ID NO: 5041 - DNA, 20 bp, Artificial Sequence
  Antisense compound
gtacaaagaaagtcttaccc

SEQ ID NO: 5042 - DNA, 20 bp, Artificial Sequence
  Antisense compound
agtacaaagaaagtcttacc

SEQ ID NO: 5043 - DNA, 20 bp, Artificial Sequence
  Antisense compound
tagtacaaagaaagtcttac

SEQ ID NO: 5044 - DNA, 20 bp, Artificial Sequence
  Antisense compound
gtagtacaaagaaagtctta

SEQ ID NO: 5045 - DNA, 20 bp, Artificial Sequence
  Antisense compound
ggtagtacaaagaaagtctt

SEQ ID NO: 5046 - DNA, 20 bp, Artificial Sequence
  Antisense compound
aggtagtacaaagaaagtct

SEQ ID NO: 5047 - DNA, 20 bp, Artificial Sequence
  Antisense compound
taggtagtacaaagaaagtc

SEQ ID NO: 5048 - DNA, 20 bp, Artificial Sequence
  Antisense compound
ctaggtagtacaaagaaagt

SEQ ID NO: 5049 - DNA, 20 bp, Artificial Sequence
  Antisense compound
actaggtagtacaaagaaag

SEQ ID NO: 5050 - DNA, 20 bp, Artificial Sequence
  Antisense compound
cactaggtagtacaaagaaa

SEQ ID NO: 5051 - DNA, 20 bp, Artificial Sequence
  Antisense compound
tcactaggtagtacaaagaa

SEQ ID NO: 5052 - DNA, 20 bp, Artificial Sequence
  Antisense compound
atcactaggtagtacaaaga

SEQ ID NO: 5053 - DNA, 20 bp, Artificial Sequence
  Antisense compound
catcactaggtagtacaaag

SEQ ID NO: 5054 - DNA, 20 bp, Artificial Sequence
  Antisense compound
tcatcactaggtagtacaaa

SEQ ID NO: 5055 - DNA, 20 bp, Artificial Sequence
  Antisense compound
gtcatcactaggtagtacaa

SEQ ID NO: 5056 - DNA, 20 bp, Artificial Sequence
  Antisense compound
tgtcatcactaggtagtaca

SEQ ID NO: 5057 - DNA, 20 bp, Artificial Sequence
  Antisense compound
gtgtcatcactaggtagtac

SEQ ID NO: 5058 - DNA, 20 bp, Artificial Sequence
  Antisense compound
tgtgtcatcactaggtagta

SEQ ID NO: 5059 - DNA, 20 bp, Artificial Sequence
  Antisense compound
gtgtgtcatcactaggtagt

SEQ ID NO: 5060 - DNA, 20 bp, Artificial Sequence
  Antisense compound
agtgtgtcatcactaggtag

SEQ ID NO: 5061 - DNA, 20 bp, Artificial Sequence
  Antisense compound
tagtgtgtcatcactaggta

SEQ ID NO: 5062 - DNA, 20 bp, Artificial Sequence
  Antisense compound
gtagtgtgtcatcactaggt

SEQ ID NO: 5063 - DNA, 20 bp, Artificial Sequence
  Antisense compound
cgtagtgtgtcatcactagg

SEQ ID NO: 5064 - DNA, 20 bp, Artificial Sequence
  Antisense compound
acgtagtgtgtcatcactag

SEQ ID NO: 5065 - DNA, 20 bp, Artificial Sequence
  Antisense compound
tacgtagtgtgtcatcacta

SEQ ID NO: 5066 - DNA, 20 bp, Artificial Sequence
  Antisense compound
ctacgtagtgtgtcatcact

SEQ ID NO: 5067 - DNA, 20 bp, Artificial Sequence
  Antisense compound
actacgtagtgtgtcatcac

SEQ ID NO: 5068 - DNA, 20 bp, Artificial Sequence
  Antisense compound
cactacgtagtgtgtcatca

SEQ ID NO: 5069 - DNA, 20 bp, Artificial Sequence
  Antisense compound
tcactacgtagtgtgtcatc

SEQ ID NO: 5070 - DNA, 20 bp, Artificial Sequence
  Antisense compound
ttcactacgtagtgtgtcat

SEQ ID NO: 5071 - DNA, 20 bp, Artificial Sequence
  Antisense compound
cttcactacgtagtgtgtca

SEQ ID NO: 5072 - DNA, 20 bp, Artificial Sequence
  Antisense compound
gcttcactacgtagtgtgtc

SEQ ID NO: 5073 - DNA, 20 bp, Artificial Sequence
  Antisense compound
agcttcactacgtagtgtgt

SEQ ID NO: 5074 - DNA, 20 bp, Artificial Sequence
  Antisense compound
aagcttcactacgtagtgtg

SEQ ID NO: 5075 - DNA, 20 bp, Artificial Sequence
  Antisense compound
aaagcttcactacgtagtgt

SEQ ID NO: 5076 - DNA, 20 bp, Artificial Sequence
  Antisense compound
gaaagcttcactacgtagtg

SEQ ID NO: 5077 - DNA, 20 bp, Artificial Sequence
  Antisense compound
cgaaagcttcactacgtagt

SEQ ID NO: 5078 - DNA, 20 bp, Artificial Sequence
  Antisense compound
tcgaaagcttcactacgtag

SEQ ID NO: 5079 - DNA, 20 bp, Artificial Sequence
  Antisense compound
ctcgaaagcttcactacgta

SEQ ID NO: 5080 - DNA, 20 bp, Artificial Sequence
  Antisense compound
actcgaaagcttcactacgt

SEQ ID NO: 5081 - DNA, 20 bp, Artificial Sequence
  Antisense compound
tactcgaaagcttcactacg

SEQ ID NO: 5082 - DNA, 20 bp, Artificial Sequence
  Antisense compound
gtactcgaaagcttcactac

SEQ ID NO: 5083 - DNA, 20 bp, Artificial Sequence
  Antisense compound
agtactcgaaagcttcacta

SEQ ID NO: 5084 - DNA, 20 bp, Artificial Sequence
  Antisense compound
tagtactcgaaagcttcact

SEQ ID NO: 5085 - DNA, 20 bp, Artificial Sequence
  Antisense compound
gtagtactcgaaagcttcac

SEQ ID NO: 5086 - DNA, 20 bp, Artificial Sequence
  Antisense compound
ggtagtactcgaaagcttca

SEQ ID NO: 5087 - DNA, 20 bp, Artificial Sequence
  Antisense compound
tggtagtactcgaaagcttc

SEQ ID NO: 5088 - DNA, 20 bp, Artificial Sequence
  Antisense compound
atggtagtactcgaaagctt

SEQ ID NO: 5089 - DNA, 20 bp, Artificial Sequence
  Antisense compound
tatggtagtactcgaaagct

SEQ ID NO: 5090 - DNA, 20 bp, Artificial Sequence
  Antisense compound
gtatggtagtactcgaaagc

SEQ ID NO: 5091 - DNA, 20 bp, Artificial Sequence
  Antisense compound
agtatggtagtactcgaaag

SEQ ID NO: 5092 - DNA, 20 bp, Artificial Sequence
  Antisense compound
gagtatggtagtactcgaaa

SEQ ID NO: 5093 - DNA, 20 bp, Artificial Sequence
  Antisense compound
agagtatggtagtactcgaa

SEQ ID NO: 5094 - DNA, 20 bp, Artificial Sequence
  Antisense compound
aagagtatggtagtactcga

SEQ ID NO: 5095 - DNA, 20 bp, Artificial Sequence
  Antisense compound
caagagtatggtagtactcg

SEQ ID NO: 5096 - DNA, 20 bp, Artificial Sequence
  Antisense compound
tcaagagtatggtagtactc

SEQ ID NO: 5097 - DNA, 20 bp, Artificial Sequence
  Antisense compound
atcaagagtatggtagtact

SEQ ID NO: 5098 - DNA, 20 bp, Artificial Sequence
  Antisense compound
catcaagagtatggtagtac

SEQ ID NO: 5099 - DNA, 20 bp, Artificial Sequence
  Antisense compound
tcatcaagagtatggtagta

SEQ ID NO: 5100 - DNA, 20 bp, Artificial Sequence
  Antisense compound
ctcatcaagagtatggtagt

SEQ ID NO: 5101 - DNA, 20 bp, Artificial Sequence
  Antisense compound
tctcatcaagagtatggtag

SEQ ID NO: 5102 - DNA, 20 bp, Artificial Sequence
  Antisense compound
ctctcatcaagagtatggta

SEQ ID NO: 5103 - DNA, 20 bp, Artificial Sequence
  Antisense compound
actctcatcaagagtatggt

SEQ ID NO: 5104 - DNA, 20 bp, Artificial Sequence
  Antisense compound
aactctcatcaagagtatgg

SEQ ID NO: 5105 - DNA, 20 bp, Artificial Sequence
  Antisense compound
aaactctcatcaagagtatg

SEQ ID NO: 5106 - DNA, 20 bp, Artificial Sequence
  Antisense compound
aaaactctcatcaagagtat

SEQ ID NO: 5107 - DNA, 20 bp, Artificial Sequence
  Antisense compound
gaaaactctcatcaagagta

SEQ ID NO: 5108 - DNA, 20 bp, Artificial Sequence
  Antisense compound
agaaaactctcatcaagagt

SEQ ID NO: 5109 - DNA, 20 bp, Artificial Sequence
  Antisense compound
aagaaaactctcatcaagag

SEQ ID NO: 5110 - DNA, 20 bp, Artificial Sequence
  Antisense compound
caagaaaactctcatcaaga

SEQ ID NO: 5111 - DNA, 20 bp, Artificial Sequence
  Antisense compound
ccaagaaaactctcatcaag

SEQ ID NO: 5112 - DNA, 20 bp, Artificial Sequence
  Antisense compound
accaagaaaactctcatcaa

SEQ ID NO: 5113 - DNA, 20 bp, Artificial Sequence
  Antisense compound
taccaagaaaactctcatca

SEQ ID NO: 5114 - DNA, 20 bp, Artificial Sequence
  Antisense compound
ctaccaagaaaactctcatc

SEQ ID NO: 5115 - DNA, 20 bp, Artificial Sequence
  Antisense compound
cctaccaagaaaactctcat

SEQ ID NO: 5116 - DNA, 20 bp, Artificial Sequence
  Antisense compound
acctaccaagaaaactctca

SEQ ID NO: 5117 - DNA, 20 bp, Artificial Sequence
  Antisense compound
tacctaccaagaaaactctc

SEQ ID NO: 5118 - DNA, 20 bp, Artificial Sequence
  Antisense compound
gtacctaccaagaaaactct

SEQ ID NO: 5119 - DNA, 20 bp, Artificial Sequence
  Antisense compound
tgtacctaccaagaaaactc

SEQ ID NO: 5120 - DNA, 20 bp, Artificial Sequence
  Antisense compound
atgtacctaccaagaaaact

SEQ ID NO: 5121 - DNA, 20 bp, Artificial Sequence
  Antisense compound
catgtacctaccaagaaaac

SEQ ID NO: 5122 - DNA, 20 bp, Artificial Sequence
  Antisense compound
acatgtacctaccaagaaaa

SEQ ID NO: 5123 - DNA, 20 bp, Artificial Sequence
  Antisense compound
gacatgtacctaccaagaaa

SEQ ID NO: 5124 - DNA, 20 bp, Artificial Sequence
  Antisense compound
agacatgtacctaccaagaa

SEQ ID NO: 5125 - DNA, 20 bp, Artificial Sequence
  Antisense compound
cagacatgtacctaccaaga

SEQ ID NO: 5126 - DNA, 20 bp, Artificial Sequence
  Antisense compound
gcagacatgtacctaccaag

SEQ ID NO: 5127 - DNA, 20 bp, Artificial Sequence
  Antisense compound
agcagacatgtacctaccaa

SEQ ID NO: 5128 - DNA, 20 bp, Artificial Sequence
  Antisense compound
aagcagacatgtacctacca

SEQ ID NO: 5129 - DNA, 20 bp, Artificial Sequence
  Antisense compound
aaagcagacatgtacctacc

SEQ ID NO: 5130 - DNA, 20 bp, Artificial Sequence
  Antisense compound
taaagcagacatgtacctac

SEQ ID NO: 5131 - DNA, 20 bp, Artificial Sequence
  Antisense compound
ttaaagcagacatgtaccta

SEQ ID NO: 5132 - DNA, 20 bp, Artificial Sequence
  Antisense compound
tttaaagcagacatgtacct

SEQ ID NO: 5133 - DNA, 20 bp, Artificial Sequence
  Antisense compound
gtttaaagcagacatgtacc

SEQ ID NO: 5134 - DNA, 20 bp, Artificial Sequence
  Antisense compound
ggtttaaagcagacatgtac

SEQ ID NO: 5135 - DNA, 20 bp, Artificial Sequence
  Antisense compound
tggtttaaagcagacatgta

SEQ ID NO: 5136 - DNA, 20 bp, Artificial Sequence
  Antisense compound
gtggtttaaagcagacatgt

SEQ ID NO: 5137 - DNA, 20 bp, Artificial Sequence
  Antisense compound
tgtggtttaaagcagacatg

SEQ ID NO: 5138 - DNA, 20 bp, Artificial Sequence
  Antisense compound
gtgtggtttaaagcagacat

SEQ ID NO: 5139 - DNA, 20 bp, Artificial Sequence
  Antisense compound
tgtgtggtttaaagcagaca

SEQ ID NO: 5140 - DNA, 20 bp, Artificial Sequence
  Antisense compound
ttgtgtggtttaaagcagac

SEQ ID NO: 5141 - DNA, 20 bp, Artificial Sequence
  Antisense compound
tttgtgtggtttaaagcaga

SEQ ID NO: 5142 - DNA, 20 bp, Artificial Sequence
  Antisense compound
ctttgtgtggtttaaagcag

SEQ ID NO: 5143 - DNA, 20 bp, Artificial Sequence
  Antisense compound
tctttgtgtggtttaaagca

SEQ ID NO: 5144 - DNA, 20 bp, Artificial Sequence
  Antisense compound
ttctttgtgtggtttaaagc

SEQ ID NO: 5145 - DNA, 20 bp, Artificial Sequence
  Antisense compound
tttctttgtgtggtttaaag

SEQ ID NO: 5146 - DNA, 20 bp, Artificial Sequence
  Antisense compound
atttctttgtgtggtttaaa

SEQ ID NO: 5147 - DNA, 20 bp, Artificial Sequence
  Antisense compound
catttctttgtgtggtttaa

SEQ ID NO: 5148 - DNA, 20 bp, Artificial Sequence
  Antisense compound
ccatttctttgtgtggttta

SEQ ID NO: 5149 - DNA, 20 bp, Artificial Sequence
  Antisense compound
tccatttctttgtgtggttt

SEQ ID NO: 5150 - DNA, 20 bp, Artificial Sequence
  Antisense compound
ttccatttctttgtgtggtt

SEQ ID NO: 5151 - DNA, 20 bp, Artificial Sequence
  Antisense compound
tttccatttctttgtgtggt

SEQ ID NO: 5152 - DNA, 20 bp, Artificial Sequence
  Antisense compound
atttccatttctttgtgtgg

SEQ ID NO: 5153 - DNA, 20 bp, Artificial Sequence
  Antisense compound
aatttccatttctttgtgtg

SEQ ID NO: 5154 - DNA, 20 bp, Artificial Sequence
  Antisense compound
aaatttccatttctttgtgt

SEQ ID NO: 5155 - DNA, 20 bp, Artificial Sequence
  Antisense compound
gaaatttccatttctttgtg

SEQ ID NO: 5156 - DNA, 20 bp, Artificial Sequence
  Antisense compound
ggaaatttccatttctttgt

SEQ ID NO: 5157 - DNA, 20 bp, Artificial Sequence
  Antisense compound
aggaaatttccatttctttg

SEQ ID NO: 5158 - DNA, 20 bp, Artificial Sequence
  Antisense compound
gaggaaatttccatttcttt

SEQ ID NO: 5159 - DNA, 20 bp, Artificial Sequence
  Antisense compound
tgaggaaatttccatttctt

SEQ ID NO: 5160 - DNA, 20 bp, Artificial Sequence
  Antisense compound
ttgaggaaatttccatttct

SEQ ID NO: 5161 - DNA, 20 bp, Artificial Sequence
  Antisense compound
cttgaggaaatttccatttc

SEQ ID NO: 5162 - DNA, 20 bp, Artificial Sequence
  Antisense compound
acttgaggaaatttccattt

SEQ ID NO: 5163 - DNA, 20 bp, Artificial Sequence
  Antisense compound
aacttgaggaaatttccatt

SEQ ID NO: 5164 - DNA, 20 bp, Artificial Sequence
  Antisense compound
caacttgaggaaatttccat

SEQ ID NO: 5165 - DNA, 20 bp, Artificial Sequence
  Antisense compound
ccaacttgaggaaatttcca

SEQ ID NO: 5166 - DNA, 20 bp, Artificial Sequence
  Antisense compound
accaacttgaggaaatttcc

SEQ ID NO: 5167 - DNA, 20 bp, Artificial Sequence
  Antisense compound
caccaacttgaggaaatttc

SEQ ID NO: 5168 - DNA, 20 bp, Artificial Sequence
  Antisense compound
ccaccaacttgaggaaattt

SEQ ID NO: 5169 - DNA, 20 bp, Artificial Sequence
  Antisense compound
accaccaacttgaggaaatt

SEQ ID NO: 5170 - DNA, 20 bp, Artificial Sequence
  Antisense compound
aaccaccaacttgaggaaat

SEQ ID NO: 5171 - DNA, 20 bp, Artificial Sequence
  Antisense compound
aaaccaccaacttgaggaaa

SEQ ID NO: 5172 - DNA, 20 bp, Artificial Sequence
  Antisense compound
taaaccaccaacttgaggaa

SEQ ID NO: 5173 - DNA, 20 bp, Artificial Sequence
  Antisense compound
ttaaaccaccaacttgagga

SEQ ID NO: 5174 - DNA, 20 bp, Artificial Sequence
  Antisense compound
gttaaaccaccaacttgagg

SEQ ID NO: 5175 - DNA, 20 bp, Artificial Sequence
  Antisense compound
agttaaaccaccaacttgag

SEQ ID NO: 5176 - DNA, 20 bp, Artificial Sequence
  Antisense compound
aagttaaaccaccaacttga

SEQ ID NO: 5177 - DNA, 20 bp, Artificial Sequence
  Antisense compound
gaagttaaaccaccaacttg

SEQ ID NO: 5178 - DNA, 20 bp, Artificial Sequence
  Antisense compound
tgaagttaaaccaccaactt

SEQ ID NO: 5179 - DNA, 20 bp, Artificial Sequence
  Antisense compound
ttgaagttaaaccaccaact

SEQ ID NO: 5180 - DNA, 20 bp, Artificial Sequence
  Antisense compound
attgaagttaaaccaccaac

SEQ ID NO: 5181 - DNA, 20 bp, Artificial Sequence
  Antisense compound
aattgaagttaaaccaccaa

SEQ ID NO: 5182 - DNA, 20 bp, Artificial Sequence
  Antisense compound
taattgaagttaaaccacca

SEQ ID NO: 5183 - DNA, 20 bp, Artificial Sequence
  Antisense compound
ttaattgaagttaaaccacc

SEQ ID NO: 5184 - DNA, 20 bp, Artificial Sequence
  Antisense compound
tttaattgaagttaaaccac

SEQ ID NO: 5185 - DNA, 20 bp, Artificial Sequence
  Antisense compound
atttaattgaagttaaacca

SEQ ID NO: 5186 - DNA, 20 bp, Artificial Sequence
  Antisense compound
catttaattgaagttaaacc

SEQ ID NO: 5187 - DNA, 20 bp, Artificial Sequence
  Antisense compound
ccatttaattgaagttaaac

SEQ ID NO: 5188 - DNA, 20 bp, Artificial Sequence
  Antisense compound
cccatttaattgaagttaaa

SEQ ID NO: 5189 - DNA, 20 bp, Artificial Sequence
  Antisense compound
gcccatttaattgaagttaa

SEQ ID NO: 5190 - DNA, 20 bp, Artificial Sequence
  Antisense compound
agcccatttaattgaagtta

SEQ ID NO: 5191 - DNA, 20 bp, Artificial Sequence
  Antisense compound
cagcccatttaattgaagtt

SEQ ID NO: 5192 - DNA, 20 bp, Artificial Sequence
  Antisense compound
tcagcccatttaattgaagt

SEQ ID NO: 5193 - DNA, 20 bp, Artificial Sequence
  Antisense compound
atcagcccatttaattgaag

SEQ ID NO: 5194 - DNA, 20 bp, Artificial Sequence
  Antisense compound
tatcagcccatttaattgaa

SEQ ID NO: 5195 - DNA, 20 bp, Artificial Sequence
  Antisense compound
ttatcagcccatttaattga

SEQ ID NO: 5196 - DNA, 20 bp, Artificial Sequence
  Antisense compound
gttatcagcccatttaattg

SEQ ID NO: 5197 - DNA, 20 bp, Artificial Sequence
  Antisense compound
tgttatcagcccatttaatt

SEQ ID NO: 5198 - DNA, 20 bp, Artificial Sequence
  Antisense compound
ttgttatcagcccatttaat

SEQ ID NO: 5199 - DNA, 20 bp, Artificial Sequence
  Antisense compound
attgttatcagcccatttaa

SEQ ID NO: 5200 - DNA, 20 bp, Artificial Sequence
  Antisense compound
aattgttatcagcccattta

SEQ ID NO: 5201 - DNA, 20 bp, Artificial Sequence
  Antisense compound
caattgttatcagcccattt

SEQ ID NO: 5202 - DNA, 20 bp, Artificial Sequence
  Antisense compound
acaattgttatcagcccatt

SEQ ID NO: 5203 - DNA, 20 bp, Artificial Sequence
  Antisense compound
aacaattgttatcagcccat

SEQ ID NO: 5204 - DNA, 20 bp, Artificial Sequence
  Antisense compound
taacaattgttatcagccca

SEQ ID NO: 5205 - DNA, 20 bp, Artificial Sequence
  Antisense compound
ataacaattgttatcagccc

SEQ ID NO: 5206 - DNA, 20 bp, Artificial Sequence
  Antisense compound
aataacaattgttatcagcc

SEQ ID NO: 5207 - DNA, 20 bp, Artificial Sequence
  Antisense compound
aaataacaattgttatcagc

SEQ ID NO: 5208 - DNA, 20 bp, Artificial Sequence
  Antisense compound
caaataacaattgttatcag

SEQ ID NO: 5209 - DNA, 20 bp, Artificial Sequence
  Antisense compound
acaaataacaattgttatca

SEQ ID NO: 5210 - DNA, 20 bp, Artificial Sequence
  Antisense compound
gacaaataacaattgttatc

SEQ ID NO: 5211 - DNA, 20 bp, Artificial Sequence
  Antisense compound
agacaaataacaattgttat

SEQ ID NO: 5212 - DNA, 20 bp, Artificial Sequence
  Antisense compound
tagacaaataacaattgtta

SEQ ID NO: 5213 - DNA, 20 bp, Artificial Sequence
  Antisense compound
ctagacaaataacaattgtt

SEQ ID NO: 5214 - DNA, 20 bp, Artificial Sequence
  Antisense compound
actagacaaataacaattgt

SEQ ID NO: 5215 - DNA, 20 bp, Artificial Sequence
  Antisense compound
cactagacaaataacaattg

SEQ ID NO: 5216 - DNA, 20 bp, Artificial Sequence
  Antisense compound
acactagacaaataacaatt

SEQ ID NO: 5217 - DNA, 20 bp, Artificial Sequence
  Antisense compound
aacactagacaaataacaat

SEQ ID NO: 5218 - DNA, 20 bp, Artificial Sequence
  Antisense compound
aaacactagacaaataacaa

SEQ ID NO: 5219 - DNA, 20 bp, Artificial Sequence
  Antisense compound
aaaacactagacaaataaca

SEQ ID NO: 5220 - DNA, 20 bp, Artificial Sequence
  Antisense compound
taaaacactagacaaataac

SEQ ID NO: 5221 - DNA, 20 bp, Artificial Sequence
  Antisense compound
ataaaacactagacaaataa

SEQ ID NO: 5222 - DNA, 20 bp, Artificial Sequence
  Antisense compound
aataaaacactagacaaata

SEQ ID NO: 5223 - DNA, 20 bp, Artificial Sequence
  Antisense compound
taataaaacactagacaaat

SEQ ID NO: 5224 - DNA, 20 bp, Artificial Sequence
  Antisense compound
ctaataaaacactagacaaa

SEQ ID NO: 5225 - DNA, 20 bp, Artificial Sequence
  Antisense compound
gctaataaaacactagacaa

SEQ ID NO: 5226 - DNA, 20 bp, Artificial Sequence
  Antisense compound
tgctaataaaacactagaca

SEQ ID NO: 5227 - DNA, 20 bp, Artificial Sequence
  Antisense compound
gtgctaataaaacactagac

SEQ ID NO: 5228 - DNA, 20 bp, Artificial Sequence
  Antisense compound
agtgctaataaaacactaga

SEQ ID NO: 5229 - DNA, 20 bp, Artificial Sequence
  Antisense compound
aagtgctaataaaacactag

SEQ ID NO: 5230 - DNA, 20 bp, Artificial Sequence
  Antisense compound
gaagtgctaataaaacacta

SEQ ID NO: 5231 - DNA, 20 bp, Artificial Sequence
  Antisense compound
tgaagtgctaataaaacact

SEQ ID NO: 5232 - DNA, 20 bp, Artificial Sequence
  Antisense compound
ttgaagtgctaataaaacac

SEQ ID NO: 5233 - DNA, 20 bp, Artificial Sequence
  Antisense compound
gttgaagtgctaataaaaca

SEQ ID NO: 5234 - DNA, 20 bp, Artificial Sequence
  Antisense compound
tgttgaagtgctaataaaac

SEQ ID NO: 5235 - DNA, 20 bp, Artificial Sequence
  Antisense compound
ctgttgaagtgctaataaaa

SEQ ID NO: 5236 - DNA, 20 bp, Artificial Sequence
  Antisense compound
gctgttgaagtgctaataaa

SEQ ID NO: 5237 - DNA, 20 bp, Artificial Sequence
  Antisense compound
agctgttgaagtgctaataa

SEQ ID NO: 5238 - DNA, 20 bp, Artificial Sequence
  Antisense compound
aagctgttgaagtgctaata

SEQ ID NO: 5239 - DNA, 20 bp, Artificial Sequence
  Antisense compound
caagctgttgaagtgctaat

SEQ ID NO: 5240 - DNA, 20 bp, Artificial Sequence
  Antisense compound
tcaagctgttgaagtgctaa

SEQ ID NO: 5241 - DNA, 20 bp, Artificial Sequence
  Antisense compound
ttcaagctgttgaagtgcta

SEQ ID NO: 5242 - DNA, 20 bp, Artificial Sequence
  Antisense compound
cttcaagctgttgaagtgct

SEQ ID NO: 5243 - DNA, 20 bp, Artificial Sequence
  Antisense compound
acttcaagctgttgaagtgc

SEQ ID NO: 5244 - DNA, 20 bp, Artificial Sequence
  Antisense compound
gacttcaagctgttgaagtg

SEQ ID NO: 5245 - DNA, 20 bp, Artificial Sequence
  Antisense compound
tgacttcaagctgttgaagt

SEQ ID NO: 5246 - DNA, 20 bp, Artificial Sequence
  Antisense compound
ttgacttcaagctgttgaag

SEQ ID NO: 5247 - DNA, 20 bp, Artificial Sequence
  Antisense compound
tttgacttcaagctgttgaa

SEQ ID NO: 5248 - DNA, 20 bp, Artificial Sequence
  Antisense compound
atttgacttcaagctgttga

SEQ ID NO: 5249 - DNA, 20 bp, Artificial Sequence
  Antisense compound
aatttgacttcaagctgttg

SEQ ID NO: 5250 - DNA, 20 bp, Artificial Sequence
  Antisense compound
gaatttgacttcaagctgtt

SEQ ID NO: 5251 - DNA, 20 bp, Artificial Sequence
  Antisense compound
tgaatttgacttcaagctgt

SEQ ID NO: 5252 - DNA, 20 bp, Artificial Sequence
  Antisense compound
ttgaatttgacttcaagctg

SEQ ID NO: 5253 - DNA, 20 bp, Artificial Sequence
  Antisense compound
attgaatttgacttcaagct

SEQ ID NO: 5254 - DNA, 20 bp, Artificial Sequence
  Antisense compound
cattgaatttgacttcaagc

SEQ ID NO: 5255 - DNA, 20 bp, Artificial Sequence
  Antisense compound
gcattgaatttgacttcaag

SEQ ID NO: 5256 - DNA, 20 bp, Artificial Sequence
  Antisense compound
tgcattgaatttgacttcaa

SEQ ID NO: 5257 - DNA, 20 bp, Artificial Sequence
  Antisense compound
gtgcattgaatttgacttca

SEQ ID NO: 5258 - DNA, 20 bp, Artificial Sequence
  Antisense compound
ggtgcattgaatttgacttc

SEQ ID NO: 5259 - DNA, 20 bp, Artificial Sequence
  Antisense compound
tggtgcattgaatttgactt

SEQ ID NO: 5260 - DNA, 20 bp, Artificial Sequence
  Antisense compound
ctggtgcattgaatttgact

SEQ ID NO: 5261 - DNA, 20 bp, Artificial Sequence
  Antisense compound
gctggtgcattgaatttgac

SEQ ID NO: 5262 - DNA, 20 bp, Artificial Sequence
  Antisense compound
tgctggtgcattgaatttga

SEQ ID NO: 5263 - DNA, 20 bp, Artificial Sequence
  Antisense compound
gtgctggtgcattgaatttg

SEQ ID NO: 5264 - DNA, 20 bp, Artificial Sequence
  Antisense compound
agtgctggtgcattgaattt

SEQ ID NO: 5265 - DNA, 20 bp, Artificial Sequence
  Antisense compound
aagtgctggtgcattgaatt

SEQ ID NO: 5266 - DNA, 20 bp, Artificial Sequence
  Antisense compound
gaagtgctggtgcattgaat

SEQ ID NO: 5267 - DNA, 20 bp, Artificial Sequence
  Antisense compound
tgaagtgctggtgcattgaa

SEQ ID NO: 5268 - DNA, 20 bp, Artificial Sequence
  Antisense compound
ttgaagtgctggtgcattga

SEQ ID NO: 5269 - DNA, 20 bp, Artificial Sequence
  Antisense compound
cttgaagtgctggtgcattg

SEQ ID NO: 5270 - DNA, 20 bp, Artificial Sequence
  Antisense compound
tcttgaagtgctggtgcatt

SEQ ID NO: 5271 - DNA, 20 bp, Artificial Sequence
  Antisense compound
ctcttgaagtgctggtgcat

SEQ ID NO: 5272 - DNA, 20 bp, Artificial Sequence
  Antisense compound
cctcttgaagtgctggtgca

SEQ ID NO: 5273 - DNA, 20 bp, Artificial Sequence
  Antisense compound
gcctcttgaagtgctggtgc

SEQ ID NO: 5274 - DNA, 20 bp, Artificial Sequence
  Antisense compound
agcctcttgaagtgctggtg

SEQ ID NO: 5275 - DNA, 20 bp, Artificial Sequence
  Antisense compound
aagcctcttgaagtgctggt

SEQ ID NO: 5276 - DNA, 20 bp, Artificial Sequence
  Antisense compound
taagcctcttgaagtgctgg

SEQ ID NO: 5277 - DNA, 20 bp, Artificial Sequence
  Antisense compound
ataagcctcttgaagtgctg

SEQ ID NO: 5278 - DNA, 20 bp, Artificial Sequence
  Antisense compound
aataagcctcttgaagtgct

SEQ ID NO: 5279 - DNA, 20 bp, Artificial Sequence
  Antisense compound
taataagcctcttgaagtgc

SEQ ID NO: 5280 - DNA, 20 bp, Artificial Sequence
  Antisense compound
ataataagcctcttgaagtg

SEQ ID NO: 5281 - DNA, 20 bp, Artificial Sequence
  Antisense compound
tataataagcctcttgaagt

SEQ ID NO: 5282 - DNA, 20 bp, Artificial Sequence
  Antisense compound
ctataataagcctcttgaag

SEQ ID NO: 5283 - DNA, 20 bp, Artificial Sequence
  Antisense compound
tctataataagcctcttgaa

SEQ ID NO: 5284 - DNA, 20 bp, Artificial Sequence
  Antisense compound
ctctataataagcctcttga

SEQ ID NO: 5285 - DNA, 20 bp, Artificial Sequence
  Antisense compound
gctctataataagcctcttg

SEQ ID NO: 5286 - DNA, 20 bp, Artificial Sequence
  Antisense compound
ggctctataataagcctctt

SEQ ID NO: 5287 - DNA, 20 bp, Artificial Sequence
  Antisense compound
gggctctataataagcctct

SEQ ID NO: 5288 - DNA, 20 bp, Artificial Sequence
  Antisense compound
cgggctctataataagcctc

SEQ ID NO: 5289 - DNA, 20 bp, Artificial Sequence
  Antisense compound
acgggctctataataagcct

SEQ ID NO: 5290 - DNA, 20 bp, Artificial Sequence
  Antisense compound
cacgggctctataataagcc

SEQ ID NO: 5291 - DNA, 20 bp, Artificial Sequence
  Antisense compound
gcacgggctctataataagc

SEQ ID NO: 5292 - DNA, 20 bp, Artificial Sequence
  Antisense compound
agcacgggctctataataag

SEQ ID NO: 5293 - DNA, 20 bp, Artificial Sequence
  Antisense compound
cagcacgggctctataataa

SEQ ID NO: 5294 - DNA, 20 bp, Artificial Sequence
  Antisense compound
ccagcacgggctctataata

SEQ ID NO: 5295 - DNA, 20 bp, Artificial Sequence
  Antisense compound
accagcacgggctctataat

SEQ ID NO: 5296 - DNA, 20 bp, Artificial Sequence
  Antisense compound
caccagcacgggctctataa

SEQ ID NO: 5297 - DNA, 20 bp, Artificial Sequence
  Antisense compound
tcaccagcacgggctctata

SEQ ID NO: 5298 - DNA, 20 bp, Artificial Sequence
  Antisense compound
atcaccagcacgggctctat

SEQ ID NO: 5299 - DNA, 20 bp, Artificial Sequence
  Antisense compound
catcaccagcacgggctcta

SEQ ID NO: 5300 - DNA, 20 bp, Artificial Sequence
  Antisense compound
gcatcaccagcacgggctct

SEQ ID NO: 5301 - DNA, 20 bp, Artificial Sequence
  Antisense compound
agcatcaccagcacgggctc

SEQ ID NO: 5302 - DNA, 20 bp, Artificial Sequence
  Antisense compound
cagcatcaccagcacgggct

SEQ ID NO: 5303 - DNA, 20 bp, Artificial Sequence
  Antisense compound
gcagcatcaccagcacgggc

SEQ ID NO: 5304 - DNA, 20 bp, Artificial Sequence
  Antisense compound
agcagcatcaccagcacggg

SEQ ID NO: 5305 - DNA, 20 bp, Artificial Sequence
  Antisense compound
tagcagcatcaccagcacgg

SEQ ID NO: 5306 - DNA, 20 bp, Artificial Sequence
  Antisense compound
ttagcagcatcaccagcacg

SEQ ID NO: 5307 - DNA, 20 bp, Artificial Sequence
  Antisense compound
gttagcagcatcaccagcac

SEQ ID NO: 5308 - DNA, 20 bp, Artificial Sequence
  Antisense compound
agttagcagcatcaccagca

SEQ ID NO: 5309 - DNA, 20 bp, Artificial Sequence
  Antisense compound
aagttagcagcatcaccagc

SEQ ID NO: 5310 - DNA, 20 bp, Artificial Sequence
  Antisense compound
aaagttagcagcatcaccag

SEQ ID NO: 5311 - DNA, 20 bp, Artificial Sequence
  Antisense compound
aaaagttagcagcatcacca

SEQ ID NO: 5312 - DNA, 20 bp, Artificial Sequence
  Antisense compound
caaaagttagcagcatcacc

SEQ ID NO: 5313 - DNA, 20 bp, Artificial Sequence
  Antisense compound
acaaaagttagcagcatcac

SEQ ID NO: 5314 - DNA, 20 bp, Artificial Sequence
  Antisense compound
cacaaaagttagcagcatca

SEQ ID NO: 5315 - DNA, 20 bp, Artificial Sequence
  Antisense compound
gcacaaaagttagcagcatc

SEQ ID NO: 5316 - DNA, 20 bp, Artificial Sequence
  Antisense compound
tgcacaaaagttagcagcat

SEQ ID NO: 5317 - DNA, 20 bp, Artificial Sequence
  Antisense compound
gtgcacaaaagttagcagca

SEQ ID NO: 5318 - DNA, 20 bp, Artificial Sequence
  Antisense compound
agtgcacaaaagttagcagc

SEQ ID NO: 5319 - DNA, 20 bp, Artificial Sequence
  Antisense compound
gagtgcacaaaagttagcag

SEQ ID NO: 5320 - DNA, 20 bp, Artificial Sequence
  Antisense compound
tgagtgcacaaaagttagca

SEQ ID NO: 5321 - DNA, 20 bp, Artificial Sequence
  Antisense compound
atgagtgcacaaaagttagc

SEQ ID NO: 5322 - DNA, 20 bp, Artificial Sequence
  Antisense compound
tatgagtgcacaaaagttag

SEQ ID NO: 5323 - DNA, 20 bp, Artificial Sequence
  Antisense compound
gtatgagtgcacaaaagtta

SEQ ID NO: 5324 - DNA, 20 bp, Artificial Sequence
  Antisense compound
agtatgagtgcacaaaagtt

SEQ ID NO: 5325 - DNA, 20 bp, Artificial Sequence
  Antisense compound
gagtatgagtgcacaaaagt

SEQ ID NO: 5326 - DNA, 20 bp, Artificial Sequence
  Antisense compound
cgagtatgagtgcacaaaag

SEQ ID NO: 5327 - DNA, 20 bp, Artificial Sequence
  Antisense compound
gcgagtatgagtgcacaaaa

SEQ ID NO: 5328 - DNA, 20 bp, Artificial Sequence
  Antisense compound
agcgagtatgagtgcacaaa

SEQ ID NO: 5329 - DNA, 20 bp, Artificial Sequence
  Antisense compound
aagcgagtatgagtgcacaa

SEQ ID NO: 5330 - DNA, 20 bp, Artificial Sequence
  Antisense compound
taagcgagtatgagtgcaca

SEQ ID NO: 5331 - DNA, 20 bp, Artificial Sequence
  Antisense compound
gtaagcgagtatgagtgcac

SEQ ID NO: 5332 - DNA, 20 bp, Artificial Sequence
  Antisense compound
tgtaagcgagtatgagtgca

SEQ ID NO: 5333 - DNA, 20 bp, Artificial Sequence
  Antisense compound
ctgtaagcgagtatgagtgc

SEQ ID NO: 5334 - DNA, 20 bp, Artificial Sequence
  Antisense compound
actgtaagcgagtatgagtg

SEQ ID NO: 5335 - DNA, 20 bp, Artificial Sequence
  Antisense compound
tactgtaagcgagtatgagt

SEQ ID NO: 5336 - DNA, 20 bp, Artificial Sequence
  Antisense compound
ttactgtaagcgagtatgag

SEQ ID NO: 5337 - DNA, 20 bp, Artificial Sequence
  Antisense compound
attactgtaagcgagtatga

SEQ ID NO: 5338 - DNA, 20 bp, Artificial Sequence
  Antisense compound
tattactgtaagcgagtatg

SEQ ID NO: 5339 - DNA, 20 bp, Artificial Sequence
  Antisense compound
ttattactgtaagcgagtat

SEQ ID NO: 5340 - DNA, 20 bp, Artificial Sequence
  Antisense compound
tttattactgtaagcgagta

SEQ ID NO: 5341 - DNA, 20 bp, Artificial Sequence
  Antisense compound
ttttattactgtaagcgagt

SEQ ID NO: 5342 - DNA, 20 bp, Artificial Sequence
  Antisense compound
gttttattactgtaagcgag

SEQ ID NO: 5343 - DNA, 20 bp, Artificial Sequence
  Antisense compound
agttttattactgtaagcga

SEQ ID NO: 5344 - DNA, 20 bp, Artificial Sequence
  Antisense compound
cagttttattactgtaagcg

SEQ ID NO: 5345 - DNA, 20 bp, Artificial Sequence
  Antisense compound
acagttttattactgtaagc

SEQ ID NO: 5346 - DNA, 20 bp, Artificial Sequence
  Antisense compound
aacagttttattactgtaag

SEQ ID NO: 5347 - DNA, 20 bp, Artificial Sequence
  Antisense compound
caacagttttattactgtaa

SEQ ID NO: 5348 - DNA, 20 bp, Artificial Sequence
  Antisense compound
ccaacagttttattactgta

SEQ ID NO: 5349 - DNA, 20 bp, Artificial Sequence
  Antisense compound
gccaacagttttattactgt

SEQ ID NO: 5350 - DNA, 20 bp, Artificial Sequence
  Antisense compound
cgccaacagttttattactg

SEQ ID NO: 5351 - DNA, 20 bp, Artificial Sequence
  Antisense compound
tcgccaacagttttattact

SEQ ID NO: 5352 - DNA, 20 bp, Artificial Sequence
  Antisense compound
ctcgccaacagttttattac

SEQ ID NO: 5353 - DNA, 20 bp, Artificial Sequence
  Antisense compound
gctcgccaacagttttatta

SEQ ID NO: 5354 - DNA, 20 bp, Artificial Sequence
  Antisense compound
agctcgccaacagttttatt

SEQ ID NO: 5355 - DNA, 20 bp, Artificial Sequence
  Antisense compound
aagctcgccaacagttttat

SEQ ID NO: 5356 - DNA, 20 bp, Artificial Sequence
  Antisense compound
caagctcgccaacagtttta

SEQ ID NO: 5357 - DNA, 20 bp, Artificial Sequence
  Antisense compound
ccaagctcgccaacagtttt

SEQ ID NO: 5358 - DNA, 20 bp, Artificial Sequence
  Antisense compound
accaagctcgccaacagttt

SEQ ID NO: 5359 - DNA, 20 bp, Artificial Sequence
  Antisense compound
caccaagctcgccaacagtt

SEQ ID NO: 5360 - DNA, 20 bp, Artificial Sequence
  Antisense compound
tcaccaagctcgccaacagt

SEQ ID NO: 5361 - DNA, 20 bp, Artificial Sequence
  Antisense compound
atcaccaagctcgccaacag

SEQ ID NO: 5362 - DNA, 20 bp, Artificial Sequence
  Antisense compound
catcaccaagctcgccaaca

SEQ ID NO: 5363 - DNA, 20 bp, Artificial Sequence
  Antisense compound
acatcaccaagctcgccaac

SEQ ID NO: 5364 - DNA, 20 bp, Artificial Sequence
  Antisense compound
gacatcaccaagctcgccaa

SEQ ID NO: 5365 - DNA, 20 bp, Artificial Sequence
  Antisense compound
tgacatcaccaagctcgcca

SEQ ID NO: 5366 - DNA, 20 bp, Artificial Sequence
  Antisense compound
ctgacatcaccaagctcgcc

SEQ ID NO: 5367 - DNA, 20 bp, Artificial Sequence
  Antisense compound
tctgacatcaccaagctcgc

SEQ ID NO: 5368 - DNA, 20 bp, Artificial Sequence
  Antisense compound
ctctgacatcaccaagctcg

SEQ ID NO: 5369 - DNA, 20 bp, Artificial Sequence
  Antisense compound
tctctgacatcaccaagctc

SEQ ID NO: 5370 - DNA, 20 bp, Artificial Sequence
  Antisense compound
ttctctgacatcaccaagct

SEQ ID NO: 5371 - DNA, 20 bp, Artificial Sequence
  Antisense compound
tttctctgacatcaccaagc

SEQ ID NO: 5372 - DNA, 20 bp, Artificial Sequence
  Antisense compound
gtttctctgacatcaccaag

SEQ ID NO: 5373 - DNA, 20 bp, Artificial Sequence
  Antisense compound
agtttctctgacatcaccaa

SEQ ID NO: 5374 - DNA, 20 bp, Artificial Sequence
  Antisense compound
tagtttctctgacatcacca

SEQ ID NO: 5375 - DNA, 20 bp, Artificial Sequence
  Antisense compound
atagtttctctgacatcacc

SEQ ID NO: 5376 - DNA, 20 bp, Artificial Sequence
  Antisense compound
catagtttctctgacatcac

SEQ ID NO: 5377 - DNA, 20 bp, Artificial Sequence
  Antisense compound
tcatagtttctctgacatca

SEQ ID NO: 5378 - DNA, 20 bp, Artificial Sequence
  Antisense compound
gtcatagtttctctgacatc

SEQ ID NO: 5379 - DNA, 20 bp, Artificial Sequence
  Antisense compound
ggtcatagtttctctgacat

SEQ ID NO: 5380 - DNA, 20 bp, Artificial Sequence
  Antisense compound
gggtcatagtttctctgaca

SEQ ID NO: 5381 - DNA, 20 bp, Artificial Sequence
  Antisense compound
tgggtcatagtttctctgac

SEQ ID NO: 5382 - DNA, 20 bp, Artificial Sequence
  Antisense compound
atgggtcatagtttctctga

SEQ ID NO: 5383 - DNA, 20 bp, Artificial Sequence
  Antisense compound
gatgggtcatagtttctctg

SEQ ID NO: 5384 - DNA, 20 bp, Artificial Sequence
  Antisense compound
agatgggtcatagtttctct

SEQ ID NO: 5385 - DNA, 20 bp, Artificial Sequence
  Antisense compound
aagatgggtcatagtttctc

SEQ ID NO: 5386 - DNA, 20 bp, Artificial Sequence
  Antisense compound
gaagatgggtcatagtttct

SEQ ID NO: 5387 - DNA, 20 bp, Artificial Sequence
  Antisense compound
agaagatgggtcatagtttc

SEQ ID NO: 5388 - DNA, 20 bp, Artificial Sequence
  Antisense compound
tagaagatgggtcatagttt

SEQ ID NO: 5389 - DNA, 20 bp, Artificial Sequence
  Antisense compound
gtagaagatgggtcatagtt

SEQ ID NO: 5390 - DNA, 20 bp, Artificial Sequence
  Antisense compound
tgtagaagatgggtcatagt

SEQ ID NO: 5391 - DNA, 20 bp, Artificial Sequence
  Antisense compound
ctgtagaagatgggtcatag

SEQ ID NO: 5392 - DNA, 20 bp, Artificial Sequence
  Antisense compound
gctgtagaagatgggtcata

SEQ ID NO: 5393 - DNA, 20 bp, Artificial Sequence
  Antisense compound
tgctgtagaagatgggtcat

SEQ ID NO: 5394 - DNA, 20 bp, Artificial Sequence
  Antisense compound
atgctgtagaagatgggtca

SEQ ID NO: 5395 - DNA, 20 bp, Artificial Sequence
  Antisense compound
catgctgtagaagatgggtc

SEQ ID NO: 5396 - DNA, 20 bp, Artificial Sequence
  Antisense compound
gcatgctgtagaagatgggt

SEQ ID NO: 5397 - DNA, 20 bp, Artificial Sequence
  Antisense compound
agcatgctgtagaagatggg

SEQ ID NO: 5398 - DNA, 20 bp, Artificial Sequence
  Antisense compound
tagcatgctgtagaagatgg

SEQ ID NO: 5399 - DNA, 20 bp, Artificial Sequence
  Antisense compound
ttagcatgctgtagaagatg

SEQ ID NO: 5400 - DNA, 20 bp, Artificial Sequence
  Antisense compound
attagcatgctgtagaagat

SEQ ID NO: 5401 - DNA, 20 bp, Artificial Sequence
  Antisense compound
aattagcatgctgtagaaga

SEQ ID NO: 5402 - DNA, 20 bp, Artificial Sequence
  Antisense compound
aaattagcatgctgtagaag

SEQ ID NO: 5403 - DNA, 20 bp, Artificial Sequence
  Antisense compound
caaattagcatgctgtagaa

SEQ ID NO: 5404 - DNA, 20 bp, Artificial Sequence
  Antisense compound
ccaaattagcatgctgtaga

SEQ ID NO: 5405 - DNA, 20 bp, Artificial Sequence
  Antisense compound
tccaaattagcatgctgtag

SEQ ID NO: 5406 - DNA, 20 bp, Artificial Sequence
  Antisense compound
ttccaaattagcatgctgta

SEQ ID NO: 5407 - DNA, 20 bp, Artificial Sequence
  Antisense compound
attccaaattagcatgctgt

SEQ ID NO: 5408 - DNA, 20 bp, Artificial Sequence
  Antisense compound
gattccaaattagcatgctg

SEQ ID NO: 5409 - DNA, 20 bp, Artificial Sequence
  Antisense compound
agattccaaattagcatgct

SEQ ID NO: 5410 - DNA, 20 bp, Artificial Sequence
  Antisense compound
cagattccaaattagcatgc

SEQ ID NO: 5411 - DNA, 20 bp, Artificial Sequence
  Antisense compound
gcagattccaaattagcatg

SEQ ID NO: 5412 - DNA, 20 bp, Artificial Sequence
  Antisense compound
tgcagattccaaattagcat

SEQ ID NO: 5413 - DNA, 20 bp, Artificial Sequence
  Antisense compound
ttgcagattccaaattagca

SEQ ID NO: 5414 - DNA, 20 bp, Artificial Sequence
  Antisense compound
tttgcagattccaaattagc

SEQ ID NO: 5415 - DNA, 20 bp, Artificial Sequence
  Antisense compound
ctttgcagattccaaattag

SEQ ID NO: 5416 - DNA, 20 bp, Artificial Sequence
  Antisense compound
gctttgcagattccaaatta

SEQ ID NO: 5417 - DNA, 20 bp, Artificial Sequence
  Antisense compound
cgctttgcagattccaaatt

SEQ ID NO: 5418 - DNA, 20 bp, Artificial Sequence
  Antisense compound
tcgctttgcagattccaaat

SEQ ID NO: 5419 - DNA, 20 bp, Artificial Sequence
  Antisense compound
ctcgctttgcagattccaaa

SEQ ID NO: 5420 - DNA, 20 bp, Artificial Sequence
  Antisense compound
actcgctttgcagattccaa

SEQ ID NO: 5421 - DNA, 20 bp, Artificial Sequence
  Antisense compound
aactcgctttgcagattcca

SEQ ID NO: 5422 - DNA, 20 bp, Artificial Sequence
  Antisense compound
gaactcgctttgcagattcc

SEQ ID NO: 5423 - DNA, 20 bp, Artificial Sequence
  Antisense compound
agaactcgctttgcagattc

SEQ ID NO: 5424 - DNA, 20 bp, Artificial Sequence
  Antisense compound
aagaactcgctttgcagatt

SEQ ID NO: 5425 - DNA, 20 bp, Artificial Sequence
  Antisense compound
taagaactcgctttgcagat

SEQ ID NO: 5426 - DNA, 20 bp, Artificial Sequence
  Antisense compound
ttaagaactcgctttgcaga

SEQ ID NO: 5427 - DNA, 20 bp, Artificial Sequence
  Antisense compound
attaagaactcgctttgcag

SEQ ID NO: 5428 - DNA, 20 bp, Artificial Sequence
  Antisense compound
cattaagaactcgctttgca

SEQ ID NO: 5429 - DNA, 20 bp, Artificial Sequence
  Antisense compound
acattaagaactcgctttgc

SEQ ID NO: 5430 - DNA, 20 bp, Artificial Sequence
  Antisense compound
cacattaagaactcgctttg

SEQ ID NO: 5431 - DNA, 20 bp, Artificial Sequence
  Antisense compound
ccacattaagaactcgcttt

SEQ ID NO: 5432 - DNA, 20 bp, Artificial Sequence
  Antisense compound
accacattaagaactcgctt

SEQ ID NO: 5433 - DNA, 20 bp, Artificial Sequence
  Antisense compound
caccacattaagaactcgct

SEQ ID NO: 5434 - DNA, 20 bp, Artificial Sequence
  Antisense compound
acaccacattaagaactcgc

SEQ ID NO: 5435 - DNA, 20 bp, Artificial Sequence
  Antisense compound
cacaccacattaagaactcg

SEQ ID NO: 5436 - DNA, 20 bp, Artificial Sequence
  Antisense compound
acacaccacattaagaactc

SEQ ID NO: 5437 - DNA, 20 bp, Artificial Sequence
  Antisense compound
tacacaccacattaagaact

SEQ ID NO: 5438 - DNA, 20 bp, Artificial Sequence
  Antisense compound
ttacacaccacattaagaac

SEQ ID NO: 5439 - DNA, 20 bp, Artificial Sequence
  Antisense compound
tttacacaccacattaagaa

SEQ ID NO: 5440 - DNA, 20 bp, Artificial Sequence
  Antisense compound
gtttacacaccacattaaga

SEQ ID NO: 5441 - DNA, 20 bp, Artificial Sequence
  Antisense compound
tgtttacacaccacattaag

SEQ ID NO: 5442 - DNA, 20 bp, Artificial Sequence
  Antisense compound
atgtttacacaccacattaa

SEQ ID NO: 5443 - DNA, 20 bp, Artificial Sequence
  Antisense compound
aatgtttacacaccacatta

SEQ ID NO: 5444 - DNA, 20 bp, Artificial Sequence
  Antisense compound
caatgtttacacaccacatt

SEQ ID NO: 5445 - DNA, 20 bp, Artificial Sequence
  Antisense compound
acaatgtttacacaccacat

SEQ ID NO: 5446 - DNA, 20 bp, Artificial Sequence
  Antisense compound
cacaatgtttacacaccaca

SEQ ID NO: 5447 - DNA, 20 bp, Artificial Sequence
  Antisense compound
ccacaatgtttacacaccac

SEQ ID NO: 5448 - DNA, 20 bp, Artificial Sequence
  Antisense compound
accacaatgtttacacacca

SEQ ID NO: 5449 - DNA, 20 bp, Artificial Sequence
  Antisense compound
gaccacaatgtttacacacc

SEQ ID NO: 5450 - DNA, 20 bp, Artificial Sequence
  Antisense compound
tgaccacaatgtttacacac

SEQ ID NO: 5451 - DNA, 20 bp, Artificial Sequence
  Antisense compound
ctgaccacaatgtttacaca

SEQ ID NO: 5452 - DNA, 20 bp, Artificial Sequence
  Antisense compound
tctgaccacaatgtttacac

SEQ ID NO: 5453 - DNA, 20 bp, Artificial Sequence
  Antisense compound
ttctgaccacaatgtttaca

SEQ ID NO: 5454 - DNA, 20 bp, Artificial Sequence
  Antisense compound
tttctgaccacaatgtttac

SEQ ID NO: 5455 - DNA, 20 bp, Artificial Sequence
  Antisense compound
ttttctgaccacaatgttta

SEQ ID NO: 5456 - DNA, 20 bp, Artificial Sequence
  Antisense compound
gttttctgaccacaatgttt

SEQ ID NO: 5457 - DNA, 20 bp, Artificial Sequence
  Antisense compound
agttttctgaccacaatgtt

SEQ ID NO: 5458 - DNA, 20 bp, Artificial Sequence
  Antisense compound
tagttttctgaccacaatgt

SEQ ID NO: 5459 - DNA, 20 bp, Artificial Sequence
  Antisense compound
gtagttttctgaccacaatg

SEQ ID NO: 5460 - DNA, 20 bp, Artificial Sequence
  Antisense compound
agtagttttctgaccacaat

SEQ ID NO: 5461 - DNA, 20 bp, Artificial Sequence
  Antisense compound
tagtagttttctgaccacaa

SEQ ID NO: 5462 - DNA, 20 bp, Artificial Sequence
  Antisense compound
gtagtagttttctgaccaca

SEQ ID NO: 5463 - DNA, 20 bp, Artificial Sequence
  Antisense compound
ggtagtagttttctgaccac

SEQ ID NO: 5464 - DNA, 20 bp, Artificial Sequence
  Antisense compound
aggtagtagttttctgacca

SEQ ID NO: 5465 - DNA, 20 bp, Artificial Sequence
  Antisense compound
aaggtagtagttttctgacc

SEQ ID NO: 5466 - DNA, 20 bp, Artificial Sequence
  Antisense compound
taaggtagtagttttctgac

SEQ ID NO: 5467 - DNA, 20 bp, Artificial Sequence
  Antisense compound
ttaaggtagtagttttctga

SEQ ID NO: 5468 - DNA, 20 bp, Artificial Sequence
  Antisense compound
gttaaggtagtagttttctg

SEQ ID NO: 5469 - DNA, 20 bp, Artificial Sequence
  Antisense compound
cgttaaggtagtagttttct

SEQ ID NO: 5470 - DNA, 20 bp, Artificial Sequence
  Antisense compound
ccgttaaggtagtagttttc

SEQ ID NO: 5471 - DNA, 20 bp, Artificial Sequence
  Antisense compound
cccgttaaggtagtagtttt

SEQ ID NO: 5472 - DNA, 20 bp, Artificial Sequence
  Antisense compound
acccgttaaggtagtagttt

SEQ ID NO: 5473 - DNA, 20 bp, Artificial Sequence
  Antisense compound
cacccgttaaggtagtagtt

SEQ ID NO: 5474 - DNA, 20 bp, Artificial Sequence
  Antisense compound
acacccgttaaggtagtagt

SEQ ID NO: 5475 - DNA, 20 bp, Artificial Sequence
  Antisense compound
tacacccgttaaggtagtag

SEQ ID NO: 5476 - DNA, 20 bp, Artificial Sequence
  Antisense compound
ctacacccgttaaggtagta

SEQ ID NO: 5477 - DNA, 20 bp, Artificial Sequence
  Antisense compound
tctacacccgttaaggtagt

SEQ ID NO: 5478 - DNA, 20 bp, Artificial Sequence
  Antisense compound
ttctacacccgttaaggtag

SEQ ID NO: 5479 - DNA, 20 bp, Artificial Sequence
  Antisense compound
cttctacacccgttaaggta

SEQ ID NO: 5480 - DNA, 20 bp, Artificial Sequence
  Antisense compound
gcttctacacccgttaaggt

SEQ ID NO: 5481 - DNA, 20 bp, Artificial Sequence
  Antisense compound
agcttctacacccgttaagg

SEQ ID NO: 5482 - DNA, 20 bp, Artificial Sequence
  Antisense compound
cagcttctacacccgttaag

SEQ ID NO: 5483 - DNA, 20 bp, Artificial Sequence
  Antisense compound
acagcttctacacccgttaa

SEQ ID NO: 5484 - DNA, 20 bp, Artificial Sequence
  Antisense compound
cacagcttctacacccgtta

SEQ ID NO: 5485 - DNA, 20 bp, Artificial Sequence
  Antisense compound
tcacagcttctacacccgtt

SEQ ID NO: 5486 - DNA, 20 bp, Artificial Sequence
  Antisense compound
atcacagcttctacacccgt

SEQ ID NO: 5487 - DNA, 20 bp, Artificial Sequence
  Antisense compound
catcacagcttctacacccg

SEQ ID NO: 5488 - DNA, 20 bp, Artificial Sequence
  Antisense compound
acatcacagcttctacaccc

SEQ ID NO: 5489 - DNA, 20 bp, Artificial Sequence
  Antisense compound
tacatcacagcttctacacc

SEQ ID NO: 5490 - DNA, 20 bp, Artificial Sequence
  Antisense compound
atacatcacagcttctacac

SEQ ID NO: 5491 - DNA, 20 bp, Artificial Sequence
  Antisense compound
tatacatcacagcttctaca

SEQ ID NO: 5492 - DNA, 20 bp, Artificial Sequence
  Antisense compound
atatacatcacagcttctac

SEQ ID NO: 5493 - DNA, 20 bp, Artificial Sequence
  Antisense compound
catatacatcacagcttcta

SEQ ID NO: 5494 - DNA, 20 bp, Artificial Sequence
  Antisense compound
ccatatacatcacagcttct

SEQ ID NO: 5495 - DNA, 20 bp, Artificial Sequence
  Antisense compound
cccatatacatcacagcttc

SEQ ID NO: 5496 - DNA, 20 bp, Artificial Sequence
  Antisense compound
acccatatacatcacagctt

SEQ ID NO: 5497 - DNA, 20 bp, Artificial Sequence
  Antisense compound
tacccatatacatcacagct

SEQ ID NO: 5498 - DNA, 20 bp, Artificial Sequence
  Antisense compound
gtacccatatacatcacagc

SEQ ID NO: 5499 - DNA, 20 bp, Artificial Sequence
  Antisense compound
agtacccatatacatcacag

SEQ ID NO: 5500 - DNA, 20 bp, Artificial Sequence
  Antisense compound
gagtacccatatacatcaca

SEQ ID NO: 5501 - DNA, 20 bp, Artificial Sequence
  Antisense compound
agagtacccatatacatcac

SEQ ID NO: 5502 - DNA, 20 bp, Artificial Sequence
  Antisense compound
tagagtacccatatacatca

SEQ ID NO: 5503 - DNA, 20 bp, Artificial Sequence
  Antisense compound
atagagtacccatatacatc

SEQ ID NO: 5504 - DNA, 20 bp, Artificial Sequence
  Antisense compound
gatagagtacccatatacat

SEQ ID NO: 5505 - DNA, 20 bp, Artificial Sequence
  Antisense compound
agatagagtacccatataca

SEQ ID NO: 5506 - DNA, 20 bp, Artificial Sequence
  Antisense compound
aagatagagtacccatatac

SEQ ID NO: 5507 - DNA, 20 bp, Artificial Sequence
  Antisense compound
taagatagagtacccatata

SEQ ID NO: 5508 - DNA, 20 bp, Artificial Sequence
  Antisense compound
ataagatagagtacccatat

SEQ ID NO: 5509 - DNA, 20 bp, Artificial Sequence
  Antisense compound
cataagatagagtacccata

SEQ ID NO: 5510 - DNA, 20 bp, Artificial Sequence
  Antisense compound
tcataagatagagtacccat

SEQ ID NO: 5511 - DNA, 20 bp, Artificial Sequence
  Antisense compound
atcataagatagagtaccca

SEQ ID NO: 5512 - DNA, 20 bp, Artificial Sequence
  Antisense compound
tatcataagatagagtaccc

SEQ ID NO: 5513 - DNA, 20 bp, Artificial Sequence
  Antisense compound
ttatcataagatagagtacc

SEQ ID NO: 5514 - DNA, 20 bp, Artificial Sequence
  Antisense compound
attatcataagatagagtac

SEQ ID NO: 5515 - DNA, 20 bp, Artificial Sequence
  Antisense compound
gattatcataagatagagta

SEQ ID NO: 5516 - DNA, 20 bp, Artificial Sequence
  Antisense compound
agattatcataagatagagt

SEQ ID NO: 5517 - DNA, 20 bp, Artificial Sequence
  Antisense compound
aagattatcataagatagag

SEQ ID NO: 5518 - DNA, 20 bp, Artificial Sequence
  Antisense compound
taagattatcataagataga

SEQ ID NO: 5519 - DNA, 20 bp, Artificial Sequence
  Antisense compound
ttaagattatcataagatag

SEQ ID NO: 5520 - DNA, 20 bp, Artificial Sequence
  Antisense compound
cttaagattatcataagata

SEQ ID NO: 5521 - DNA, 20 bp, Artificial Sequence
  Antisense compound
tcttaagattatcataagat

SEQ ID NO: 5522 - DNA, 20 bp, Artificial Sequence
  Antisense compound
gtcttaagattatcataaga

SEQ ID NO: 5523 - DNA, 20 bp, Artificial Sequence
  Antisense compound
tgtcttaagattatcataag

SEQ ID NO: 5524 - DNA, 20 bp, Artificial Sequence
  Antisense compound
ctgtcttaagattatcataa

SEQ ID NO: 5525 - DNA, 20 bp, Artificial Sequence
  Antisense compound
cctgtcttaagattatcata

SEQ ID NO: 5526 - DNA, 20 bp, Artificial Sequence
  Antisense compound
acctgtcttaagattatcat

SEQ ID NO: 5527 - DNA, 20 bp, Artificial Sequence
  Antisense compound
cacctgtcttaagattatca

SEQ ID NO: 5528 - DNA, 20 bp, Artificial Sequence
  Antisense compound
acacctgtcttaagattatc

SEQ ID NO: 5529 - DNA, 20 bp, Artificial Sequence
  Antisense compound
aacacctgtcttaagattat

SEQ ID NO: 5530 - DNA, 20 bp, Artificial Sequence
  Antisense compound
aaacacctgtcttaagatta

SEQ ID NO: 5531 - DNA, 20 bp, Artificial Sequence
  Antisense compound
gaaacacctgtcttaagatt

SEQ ID NO: 5532 - DNA, 20 bp, Artificial Sequence
  Antisense compound
ggaaacacctgtcttaagat

SEQ ID NO: 5533 - DNA, 20 bp, Artificial Sequence
  Antisense compound
tggaaacacctgtcttaaga

SEQ ID NO: 5534 - DNA, 20 bp, Artificial Sequence
  Antisense compound
atggaaacacctgtcttaag

SEQ ID NO: 5535 - DNA, 20 bp, Artificial Sequence
  Antisense compound
aatggaaacacctgtcttaa

SEQ ID NO: 5536 - DNA, 20 bp, Artificial Sequence
  Antisense compound
gaatggaaacacctgtctta

SEQ ID NO: 5537 - DNA, 20 bp, Artificial Sequence
  Antisense compound
ggaatggaaacacctgtctt

SEQ ID NO: 5538 - DNA, 20 bp, Artificial Sequence
  Antisense compound
tggaatggaaacacctgtct

SEQ ID NO: 5539 - DNA, 20 bp, Artificial Sequence
  Antisense compound
atggaatggaaacacctgtc

SEQ ID NO: 5540 - DNA, 20 bp, Artificial Sequence
  Antisense compound
catggaatggaaacacctgt

SEQ ID NO: 5541 - DNA, 20 bp, Artificial Sequence
  Antisense compound
acatggaatggaaacacctg

SEQ ID NO: 5542 - DNA, 20 bp, Artificial Sequence
  Antisense compound
cacatggaatggaaacacct

SEQ ID NO: 5543 - DNA, 20 bp, Artificial Sequence
  Antisense compound
acacatggaatggaaacacc

SEQ ID NO: 5544 - DNA, 20 bp, Artificial Sequence
  Antisense compound
cacacatggaatggaaacac

SEQ ID NO: 5545 - DNA, 20 bp, Artificial Sequence
  Antisense compound
acacacatggaatggaaaca

SEQ ID NO: 5546 - DNA, 20 bp, Artificial Sequence
  Antisense compound
cacacacatggaatggaaac

SEQ ID NO: 5547 - DNA, 20 bp, Artificial Sequence
  Antisense compound
acacacacatggaatggaaa

SEQ ID NO: 5548 - DNA, 20 bp, Artificial Sequence
  Antisense compound
cacacacacatggaatggaa

SEQ ID NO: 5549 - DNA, 20 bp, Artificial Sequence
  Antisense compound
ccacacacacatggaatgga

SEQ ID NO: 5550 - DNA, 20 bp, Artificial Sequence
  Antisense compound
accacacacacatggaatgg

SEQ ID NO: 5551 - DNA, 20 bp, Artificial Sequence
  Antisense compound
gaccacacacacatggaatg

SEQ ID NO: 5552 - DNA, 20 bp, Artificial Sequence
  Antisense compound
cgaccacacacacatggaat

SEQ ID NO: 5553 - DNA, 20 bp, Artificial Sequence
  Antisense compound
acgaccacacacacatggaa

SEQ ID NO: 5554 - DNA, 20 bp, Artificial Sequence
  Antisense compound
cacgaccacacacacatgga

SEQ ID NO: 5555 - DNA, 20 bp, Artificial Sequence
  Antisense compound
tcacgaccacacacacatgg

SEQ ID NO: 5556 - DNA, 20 bp, Artificial Sequence
  Antisense compound
atcacgaccacacacacatg

SEQ ID NO: 5557 - DNA, 20 bp, Artificial Sequence
  Antisense compound
catcacgaccacacacacat

SEQ ID NO: 5558 - DNA, 20 bp, Artificial Sequence
  Antisense compound
gcatcacgaccacacacaca

SEQ ID NO: 5559 - DNA, 20 bp, Artificial Sequence
  Antisense compound
agcatcacgaccacacacac

SEQ ID NO: 5560 - DNA, 20 bp, Artificial Sequence
  Antisense compound
tagcatcacgaccacacaca

SEQ ID NO: 5561 - DNA, 20 bp, Artificial Sequence
  Antisense compound
gtagcatcacgaccacacac

SEQ ID NO: 5562 - DNA, 20 bp, Artificial Sequence
  Antisense compound
tgtagcatcacgaccacaca

SEQ ID NO: 5563 - DNA, 20 bp, Artificial Sequence
  Antisense compound
gtgtagcatcacgaccacac

SEQ ID NO: 5564 - DNA, 20 bp, Artificial Sequence
  Antisense compound
tgtgtagcatcacgaccaca

SEQ ID NO: 5565 - DNA, 20 bp, Artificial Sequence
  Antisense compound
ttgtgtagcatcacgaccac

SEQ ID NO: 5566 - DNA, 20 bp, Artificial Sequence
  Antisense compound
attgtgtagcatcacgacca

SEQ ID NO: 5567 - DNA, 20 bp, Artificial Sequence
  Antisense compound
tattgtgtagcatcacgacc

SEQ ID NO: 5568 - DNA, 20 bp, Artificial Sequence
  Antisense compound
atattgtgtagcatcacgac

SEQ ID NO: 5569 - DNA, 20 bp, Artificial Sequence
  Antisense compound
gatattgtgtagcatcacga

SEQ ID NO: 5570 - DNA, 20 bp, Artificial Sequence
  Antisense compound
agatattgtgtagcatcacg

SEQ ID NO: 5571 - DNA, 20 bp, Artificial Sequence
  Antisense compound
tagatattgtgtagcatcac

SEQ ID NO: 5572 - DNA, 20 bp, Artificial Sequence
  Antisense compound
ctagatattgtgtagcatca

SEQ ID NO: 5573 - DNA, 20 bp, Artificial Sequence
  Antisense compound
actagatattgtgtagcatc

SEQ ID NO: 5574 - DNA, 20 bp, Artificial Sequence
  Antisense compound
tactagatattgtgtagcat

SEQ ID NO: 5575 - DNA, 20 bp, Artificial Sequence
  Antisense compound
gtactagatattgtgtagca

SEQ ID NO: 5576 - DNA, 20 bp, Artificial Sequence
  Antisense compound
tgtactagatattgtgtagc

SEQ ID NO: 5577 - DNA, 20 bp, Artificial Sequence
  Antisense compound
ttgtactagatattgtgtag

SEQ ID NO: 5578 - DNA, 20 bp, Artificial Sequence
  Antisense compound
gttgtactagatattgtgta

SEQ ID NO: 5579 - DNA, 20 bp, Artificial Sequence
  Antisense compound
tgttgtactagatattgtgt

SEQ ID NO: 5580 - DNA, 20 bp, Artificial Sequence
  Antisense compound
ttgttgtactagatattgtg

SEQ ID NO: 5581 - DNA, 20 bp, Artificial Sequence
  Antisense compound
cttgttgtactagatattgt

SEQ ID NO: 5582 - DNA, 20 bp, Artificial Sequence
  Antisense compound
tcttgttgtactagatattg

SEQ ID NO: 5583 - DNA, 20 bp, Artificial Sequence
  Antisense compound
ctcttgttgtactagatatt

SEQ ID NO: 5584 - DNA, 20 bp, Artificial Sequence
  Antisense compound
actcttgttgtactagatat

SEQ ID NO: 5585 - DNA, 20 bp, Artificial Sequence
  Antisense compound
gactcttgttgtactagata

SEQ ID NO: 5586 - DNA, 20 bp, Artificial Sequence
  Antisense compound
agactcttgttgtactagat

SEQ ID NO: 5587 - DNA, 20 bp, Artificial Sequence
  Antisense compound
aagactcttgttgtactaga

SEQ ID NO: 5588 - DNA, 20 bp, Artificial Sequence
  Antisense compound
gaagactcttgttgtactag

SEQ ID NO: 5589 - DNA, 20 bp, Artificial Sequence
  Antisense compound
agaagactcttgttgtacta

SEQ ID NO: 5590 - DNA, 20 bp, Artificial Sequence
  Antisense compound
aagaagactcttgttgtact

SEQ ID NO: 5591 - DNA, 20 bp, Artificial Sequence
  Antisense compound
aaagaagactcttgttgtac

SEQ ID NO: 5592 - DNA, 20 bp, Artificial Sequence
  Antisense compound
aaaagaagactcttgttgta

SEQ ID NO: 5593 - DNA, 20 bp, Artificial Sequence
  Antisense compound
caaaagaagactcttgttgt

SEQ ID NO: 5594 - DNA, 20 bp, Artificial Sequence
  Antisense compound
acaaaagaagactcttgttg

SEQ ID NO: 5595 - DNA, 20 bp, Artificial Sequence
  Antisense compound
aacaaaagaagactcttgtt

SEQ ID NO: 5596 - DNA, 20 bp, Artificial Sequence
  Antisense compound
taacaaaagaagactcttgt

SEQ ID NO: 5597 - DNA, 20 bp, Artificial Sequence
  Antisense compound
ataacaaaagaagactcttg

SEQ ID NO: 5598 - DNA, 20 bp, Artificial Sequence
  Antisense compound
cataacaaaagaagactctt

SEQ ID NO: 5599 - DNA, 20 bp, Artificial Sequence
  Antisense compound
tcataacaaaagaagactct

SEQ ID NO: 5600 - DNA, 20 bp, Artificial Sequence
  Antisense compound
atcataacaaaagaagactc

SEQ ID NO: 5601 - DNA, 20 bp, Artificial Sequence
  Antisense compound
catcataacaaaagaagact

SEQ ID NO: 5602 - DNA, 20 bp, Artificial Sequence
  Antisense compound
acatcataacaaaagaagac

SEQ ID NO: 5603 - DNA, 20 bp, Artificial Sequence
  Antisense compound
gacatcataacaaaagaaga

SEQ ID NO: 5604 - DNA, 20 bp, Artificial Sequence
  Antisense compound
agacatcataacaaaagaag

SEQ ID NO: 5605 - DNA, 20 bp, Artificial Sequence
  Antisense compound
cagacatcataacaaaagaa

SEQ ID NO: 5606 - DNA, 20 bp, Artificial Sequence
  Antisense compound
gcagacatcataacaaaaga

SEQ ID NO: 5607 - DNA, 20 bp, Artificial Sequence
  Antisense compound
tgcagacatcataacaaaag

SEQ ID NO: 5608 - DNA, 20 bp, Artificial Sequence
  Antisense compound
gtgcagacatcataacaaaa

SEQ ID NO: 5609 - DNA, 20 bp, Artificial Sequence
  Antisense compound
ggtgcagacatcataacaaa

SEQ ID NO: 5610 - DNA, 20 bp, Artificial Sequence
  Antisense compound
tggtgcagacatcataacaa

SEQ ID NO: 5611 - DNA, 20 bp, Artificial Sequence
  Antisense compound
gtggtgcagacatcataaca

SEQ ID NO: 5612 - DNA, 20 bp, Artificial Sequence
  Antisense compound
ggtggtgcagacatcataac

SEQ ID NO: 5613 - DNA, 20 bp, Artificial Sequence
  Antisense compound
aggtggtgcagacatcataa

SEQ ID NO: 5614 - DNA, 20 bp, Artificial Sequence
  Antisense compound
caggtggtgcagacatcata

SEQ ID NO: 5615 - DNA, 20 bp, Artificial Sequence
  Antisense compound
gcaggtggtgcagacatcat

SEQ ID NO: 5616 - DNA, 20 bp, Artificial Sequence
  Antisense compound
agcaggtggtgcagacatca

SEQ ID NO: 5617 - DNA, 20 bp, Artificial Sequence
  Antisense compound
cagcaggtggtgcagacatc

SEQ ID NO: 5618 - DNA, 20 bp, Artificial Sequence
  Antisense compound
tcagcaggtggtgcagacat

SEQ ID NO: 5619 - DNA, 20 bp, Artificial Sequence
  Antisense compound
ctcagcaggtggtgcagaca

SEQ ID NO: 5620 - DNA, 20 bp, Artificial Sequence
  Antisense compound
actcagcaggtggtgcagac

SEQ ID NO: 5621 - DNA, 20 bp, Artificial Sequence
  Antisense compound
tactcagcaggtggtgcaga

SEQ ID NO: 5622 - DNA, 20 bp, Artificial Sequence
  Antisense compound
atactcagcaggtggtgcag

SEQ ID NO: 5623 - DNA, 20 bp, Artificial Sequence
  Antisense compound
tatactcagcaggtggtgca

SEQ ID NO: 5624 - DNA, 20 bp, Artificial Sequence
  Antisense compound
ttatactcagcaggtggtgc

SEQ ID NO: 5625 - DNA, 20 bp, Artificial Sequence
  Antisense compound
tttatactcagcaggtggtg

SEQ ID NO: 5626 - DNA, 20 bp, Artificial Sequence
  Antisense compound
atttatactcagcaggtggt

SEQ ID NO: 5627 - DNA, 20 bp, Artificial Sequence
  Antisense compound
aatttatactcagcaggtgg

SEQ ID NO: 5628 - DNA, 20 bp, Artificial Sequence
  Antisense compound
taatttatactcagcaggtg

SEQ ID NO: 5629 - DNA, 20 bp, Artificial Sequence
  Antisense compound
gtaatttatactcagcaggt

SEQ ID NO: 5630 - DNA, 20 bp, Artificial Sequence
  Antisense compound
tgtaatttatactcagcagg

SEQ ID NO: 5631 - DNA, 20 bp, Artificial Sequence
  Antisense compound
ctgtaatttatactcagcag

SEQ ID NO: 5632 - DNA, 20 bp, Artificial Sequence
  Antisense compound
gctgtaatttatactcagca

SEQ ID NO: 5633 - DNA, 20 bp, Artificial Sequence
  Antisense compound
tgctgtaatttatactcagc

SEQ ID NO: 5634 - DNA, 20 bp, Artificial Sequence
  Antisense compound
ttgctgtaatttatactcag

SEQ ID NO: 5635 - DNA, 20 bp, Artificial Sequence
  Antisense compound
cttgctgtaatttatactca

SEQ ID NO: 5636 - DNA, 20 bp, Artificial Sequence
  Antisense compound
ccttgctgtaatttatactc

SEQ ID NO: 5637 - DNA, 20 bp, Artificial Sequence
  Antisense compound
accttgctgtaatttatact

SEQ ID NO: 5638 - DNA, 20 bp, Artificial Sequence
  Antisense compound
taccttgctgtaatttatac

SEQ ID NO: 5639 - DNA, 20 bp, Artificial Sequence
  Antisense compound
gtaccttgctgtaatttata

SEQ ID NO: 5640 - DNA, 20 bp, Artificial Sequence
  Antisense compound
tgtaccttgctgtaatttat

SEQ ID NO: 5641 - DNA, 20 bp, Artificial Sequence
  Antisense compound
atgtaccttgctgtaattta

SEQ ID NO: 5642 - DNA, 20 bp, Artificial Sequence
  Antisense compound
aatgtaccttgctgtaattt

SEQ ID NO: 5643 - DNA, 20 bp, Artificial Sequence
  Antisense compound
gaatgtaccttgctgtaatt

SEQ ID NO: 5644 - DNA, 20 bp, Artificial Sequence
  Antisense compound
agaatgtaccttgctgtaat

SEQ ID NO: 5645 - DNA, 20 bp, Artificial Sequence
  Antisense compound
aagaatgtaccttgctgtaa

SEQ ID NO: 5646 - DNA, 20 bp, Artificial Sequence
  Antisense compound
taagaatgtaccttgctgta

SEQ ID NO: 5647 - DNA, 20 bp, Artificial Sequence
  Antisense compound
ataagaatgtaccttgctgt

SEQ ID NO: 5648 - DNA, 20 bp, Artificial Sequence
  Antisense compound
cataagaatgtaccttgctg

SEQ ID NO: 5649 - DNA, 20 bp, Artificial Sequence
  Antisense compound
acataagaatgtaccttgct

SEQ ID NO: 5650 - DNA, 20 bp, Artificial Sequence
  Antisense compound
cacataagaatgtaccttgc

SEQ ID NO: 5651 - DNA, 20 bp, Artificial Sequence
  Antisense compound
gcacataagaatgtaccttg

SEQ ID NO: 5652 - DNA, 20 bp, Artificial Sequence
  Antisense compound
cgcacataagaatgtacctt

SEQ ID NO: 5653 - DNA, 20 bp, Artificial Sequence
  Antisense compound
tcgcacataagaatgtacct

SEQ ID NO: 5654 - DNA, 20 bp, Artificial Sequence
  Antisense compound
ttcgcacataagaatgtacc

SEQ ID NO: 5655 - DNA, 20 bp, Artificial Sequence
  Antisense compound
attcgcacataagaatgtac

SEQ ID NO: 5656 - DNA, 20 bp, Artificial Sequence
  Antisense compound
cattcgcacataagaatgta

SEQ ID NO: 5657 - DNA, 20 bp, Artificial Sequence
  Antisense compound
tcattcgcacataagaatgt

SEQ ID NO: 5658 - DNA, 20 bp, Artificial Sequence
  Antisense compound
ctcattcgcacataagaatg

SEQ ID NO: 5659 - DNA, 20 bp, Artificial Sequence
  Antisense compound
actcattcgcacataagaat

SEQ ID NO: 5660 - DNA, 20 bp, Artificial Sequence
  Antisense compound
tactcattcgcacataagaa

SEQ ID NO: 5661 - DNA, 20 bp, Artificial Sequence
  Antisense compound
gtactcattcgcacataaga

SEQ ID NO: 5662 - DNA, 20 bp, Artificial Sequence
  Antisense compound
tgtactcattcgcacataag

SEQ ID NO: 5663 - DNA, 20 bp, Artificial Sequence
  Antisense compound
gtgtactcattcgcacataa

SEQ ID NO: 5664 - DNA, 20 bp, Artificial Sequence
  Antisense compound
agtgtactcattcgcacata

SEQ ID NO: 5665 - DNA, 20 bp, Artificial Sequence
  Antisense compound
cagtgtactcattcgcacat

SEQ ID NO: 5666 - DNA, 20 bp, Artificial Sequence
  Antisense compound
ccagtgtactcattcgcaca

SEQ ID NO: 5667 - DNA, 20 bp, Artificial Sequence
  Antisense compound
accagtgtactcattcgcac

SEQ ID NO: 5668 - DNA, 20 bp, Artificial Sequence
  Antisense compound
taccagtgtactcattcgca

SEQ ID NO: 5669 - DNA, 20 bp, Artificial Sequence
  Antisense compound
ttaccagtgtactcattcgc

SEQ ID NO: 5670 - DNA, 20 bp, Artificial Sequence
  Antisense compound
gttaccagtgtactcattcg

SEQ ID NO: 5671 - DNA, 20 bp, Artificial Sequence
  Antisense compound
agttaccagtgtactcattc

SEQ ID NO: 5672 - DNA, 20 bp, Artificial Sequence
  Antisense compound
tagttaccagtgtactcatt

SEQ ID NO: 5673 - DNA, 20 bp, Artificial Sequence
  Antisense compound
atagttaccagtgtactcat

SEQ ID NO: 5674 - DNA, 20 bp, Artificial Sequence
  Antisense compound
gatagttaccagtgtactca

SEQ ID NO: 5675 - DNA, 20 bp, Artificial Sequence
  Antisense compound
tgatagttaccagtgtactc

SEQ ID NO: 5676 - DNA, 20 bp, Artificial Sequence
  Antisense compound
ctgatagttaccagtgtact

SEQ ID NO: 5677 - DNA, 20 bp, Artificial Sequence
  Antisense compound
actgatagttaccagtgtac

SEQ ID NO: 5678 - DNA, 20 bp, Artificial Sequence
  Antisense compound
cactgatagttaccagtgta

SEQ ID NO: 5679 - DNA, 20 bp, Artificial Sequence
  Antisense compound
acactgatagttaccagtgt

SEQ ID NO: 5680 - DNA, 20 bp, Artificial Sequence
  Antisense compound
cacactgatagttaccagtg

SEQ ID NO: 5681 - DNA, 20 bp, Artificial Sequence
  Antisense compound
ccacactgatagttaccagt

SEQ ID NO: 5682 - DNA, 20 bp, Artificial Sequence
  Antisense compound
accacactgatagttaccag

SEQ ID NO: 5683 - DNA, 20 bp, Artificial Sequence
  Antisense compound
gaccacactgatagttacca

SEQ ID NO: 5684 - DNA, 20 bp, Artificial Sequence
  Antisense compound
tgaccacactgatagttacc

SEQ ID NO: 5685 - DNA, 20 bp, Artificial Sequence
  Antisense compound
atgaccacactgatagttac

SEQ ID NO: 5686 - DNA, 20 bp, Artificial Sequence
  Antisense compound
aatgaccacactgatagtta

SEQ ID NO: 5687 - DNA, 20 bp, Artificial Sequence
  Antisense compound
taatgaccacactgatagtt

SEQ ID NO: 5688 - DNA, 20 bp, Artificial Sequence
  Antisense compound
gtaatgaccacactgatagt

SEQ ID NO: 5689 - DNA, 20 bp, Artificial Sequence
  Antisense compound
tgtaatgaccacactgatag

SEQ ID NO: 5690 - DNA, 20 bp, Artificial Sequence
  Antisense compound
gtgtaatgaccacactgata

SEQ ID NO: 5691 - DNA, 20 bp, Artificial Sequence
  Antisense compound
agtgtaatgaccacactgat

SEQ ID NO: 5692 - DNA, 20 bp, Artificial Sequence
  Antisense compound
gagtgtaatgaccacactga

SEQ ID NO: 5693 - DNA, 20 bp, Artificial Sequence
  Antisense compound
tgagtgtaatgaccacactg

SEQ ID NO: 5694 - DNA, 20 bp, Artificial Sequence
  Antisense compound
atgagtgtaatgaccacact

SEQ ID NO: 5695 - DNA, 20 bp, Artificial Sequence
  Antisense compound
tatgagtgtaatgaccacac

SEQ ID NO: 5696 - DNA, 20 bp, Artificial Sequence
  Antisense compound
atatgagtgtaatgaccaca

SEQ ID NO: 5697 - DNA, 20 bp, Artificial Sequence
  Antisense compound
tatatgagtgtaatgaccac

SEQ ID NO: 5698 - DNA, 20 bp, Artificial Sequence
  Antisense compound
ttatatgagtgtaatgacca

SEQ ID NO: 5699 - DNA, 20 bp, Artificial Sequence
  Antisense compound
gttatatgagtgtaatgacc

SEQ ID NO: 5700 - DNA, 20 bp, Artificial Sequence
  Antisense compound
agttatatgagtgtaatgac

SEQ ID NO: 5701 - DNA, 20 bp, Artificial Sequence
  Antisense compound
cagttatatgagtgtaatga

SEQ ID NO: 5702 - DNA, 20 bp, Artificial Sequence
  Antisense compound
gcagttatatgagtgtaatg

SEQ ID NO: 5703 - DNA, 20 bp, Artificial Sequence
  Antisense compound
agcagttatatgagtgtaat

SEQ ID NO: 5704 - DNA, 20 bp, Artificial Sequence
  Antisense compound
tagcagttatatgagtgtaa

SEQ ID NO: 5705 - DNA, 20 bp, Artificial Sequence
  Antisense compound
ttagcagttatatgagtgta

SEQ ID NO: 5706 - DNA, 20 bp, Artificial Sequence
  Antisense compound
cttagcagttatatgagtgt

SEQ ID NO: 5707 - DNA, 20 bp, Artificial Sequence
  Antisense compound
ccttagcagttatatgagtg

SEQ ID NO: 5708 - DNA, 20 bp, Artificial Sequence
  Antisense compound
tccttagcagttatatgagt

SEQ ID NO: 5709 - DNA, 20 bp, Artificial Sequence
  Antisense compound
ctccttagcagttatatgag

SEQ ID NO: 5710 - DNA, 20 bp, Artificial Sequence
  Antisense compound
tctccttagcagttatatga

SEQ ID NO: 5711 - DNA, 20 bp, Artificial Sequence
  Antisense compound
gtctccttagcagttatatg

SEQ ID NO: 5712 - DNA, 20 bp, Artificial Sequence
  Antisense compound
ggtctccttagcagttatat

SEQ ID NO: 5713 - DNA, 20 bp, Artificial Sequence
  Antisense compound
gggtctccttagcagttata

SEQ ID NO: 5714 - DNA, 20 bp, Artificial Sequence
  Antisense compound
agggtctccttagcagttat

SEQ ID NO: 5715 - DNA, 20 bp, Artificial Sequence
  Antisense compound
gagggtctccttagcagtta

SEQ ID NO: 5716 - DNA, 20 bp, Artificial Sequence
  Antisense compound
agagggtctccttagcagtt

SEQ ID NO: 5717 - DNA, 20 bp, Artificial Sequence
  Antisense compound
tagagggtctccttagcagt

SEQ ID NO: 5718 - DNA, 20 bp, Artificial Sequence
  Antisense compound
atagagggtctccttagcag

SEQ ID NO: 5719 - DNA, 20 bp, Artificial Sequence
  Antisense compound
gatagagggtctccttagca

SEQ ID NO: 5720 - DNA, 20 bp, Artificial Sequence
  Antisense compound
cgatagagggtctccttagc

SEQ ID NO: 5721 - DNA, 20 bp, Artificial Sequence
  Antisense compound
acgatagagggtctccttag

SEQ ID NO: 5722 - DNA, 20 bp, Artificial Sequence
  Antisense compound
tacgatagagggtctcctta

SEQ ID NO: 5723 - DNA, 20 bp, Artificial Sequence
  Antisense compound
atacgatagagggtctcctt

SEQ ID NO: 5724 - DNA, 20 bp, Artificial Sequence
  Antisense compound
aatacgatagagggtctcct

SEQ ID NO: 5725 - DNA, 20 bp, Artificial Sequence
  Antisense compound
caatacgatagagggtctcc

SEQ ID NO: 5726 - DNA, 20 bp, Artificial Sequence
  Antisense compound
tcaatacgatagagggtctc

SEQ ID NO: 5727 - DNA, 20 bp, Artificial Sequence
  Antisense compound
gtcaatacgatagagggtct

SEQ ID NO: 5728 - DNA, 20 bp, Artificial Sequence
  Antisense compound
cgtcaatacgatagagggtc

SEQ ID NO: 5729 - DNA, 20 bp, Artificial Sequence
  Antisense compound
ccgtcaatacgatagagggt

SEQ ID NO: 5730 - DNA, 20 bp, Artificial Sequence
  Antisense compound
tccgtcaatacgatagaggg

SEQ ID NO: 5731 - DNA, 20 bp, Artificial Sequence
  Antisense compound
ctccgtcaatacgatagagg

SEQ ID NO: 5732 - DNA, 20 bp, Artificial Sequence
  Antisense compound
gctccgtcaatacgatagag

SEQ ID NO: 5733 - DNA, 20 bp, Artificial Sequence
  Antisense compound
agctccgtcaatacgataga

SEQ ID NO: 5734 - DNA, 20 bp, Artificial Sequence
  Antisense compound
gagctccgtcaatacgatag

SEQ ID NO: 5735 - DNA, 20 bp, Artificial Sequence
  Antisense compound
tgagctccgtcaatacgata

SEQ ID NO: 5736 - DNA, 20 bp, Artificial Sequence
  Antisense compound
gtgagctccgtcaatacgat

SEQ ID NO: 5737 - DNA, 20 bp, Artificial Sequence
  Antisense compound
ggtgagctccgtcaatacga

SEQ ID NO: 5738 - DNA, 20 bp, Artificial Sequence
  Antisense compound
aggtgagctccgtcaatacg

SEQ ID NO: 5739 - DNA, 20 bp, Artificial Sequence
  Antisense compound
aaggtgagctccgtcaatac

SEQ ID NO: 5740 - DNA, 20 bp, Artificial Sequence
  Antisense compound
taaggtgagctccgtcaata

SEQ ID NO: 5741 - DNA, 20 bp, Artificial Sequence
  Antisense compound
gtaaggtgagctccgtcaat

SEQ ID NO: 5742 - DNA, 20 bp, Artificial Sequence
  Antisense compound
tgtaaggtgagctccgtcaa

SEQ ID NO: 5743 - DNA, 20 bp, Artificial Sequence
  Antisense compound
ttgtaaggtgagctccgtca

SEQ ID NO: 5744 - DNA, 20 bp, Artificial Sequence
  Antisense compound
tttgtaaggtgagctccgtc

SEQ ID NO: 5745 - DNA, 20 bp, Artificial Sequence
  Antisense compound
ctttgtaaggtgagctccgt

SEQ ID NO: 5746 - DNA, 20 bp, Artificial Sequence
  Antisense compound
tctttgtaaggtgagctccg

SEQ ID NO: 5747 - DNA, 20 bp, Artificial Sequence
  Antisense compound
atctttgtaaggtgagctcc

SEQ ID NO: 5748 - DNA, 20 bp, Artificial Sequence
  Antisense compound
catctttgtaaggtgagctc

SEQ ID NO: 5749 - DNA, 20 bp, Artificial Sequence
  Antisense compound
acatctttgtaaggtgagct

SEQ ID NO: 5750 - DNA, 20 bp, Artificial Sequence
  Antisense compound
gacatctttgtaaggtgagc

SEQ ID NO: 5751 - DNA, 20 bp, Artificial Sequence
  Antisense compound
tgacatctttgtaaggtgag

SEQ ID NO: 5752 - DNA, 20 bp, Artificial Sequence
  Antisense compound
ctgacatctttgtaaggtga

SEQ ID NO: 5753 - DNA, 20 bp, Artificial Sequence
  Antisense compound
tctgacatctttgtaaggtg

SEQ ID NO: 5754 - DNA, 20 bp, Artificial Sequence
  Antisense compound
ctctgacatctttgtaaggt

SEQ ID NO: 5755 - DNA, 20 bp, Artificial Sequence
  Antisense compound
actctgacatctttgtaagg

SEQ ID NO: 5756 - DNA, 20 bp, Artificial Sequence
  Antisense compound
tactctgacatctttgtaag

SEQ ID NO: 5757 - DNA, 20 bp, Artificial Sequence
  Antisense compound
gtactctgacatctttgtaa

SEQ ID NO: 5758 - DNA, 20 bp, Artificial Sequence
  Antisense compound
tgtactctgacatctttgta

SEQ ID NO: 5759 - DNA, 20 bp, Artificial Sequence
  Antisense compound
ttgtactctgacatctttgt

SEQ ID NO: 5760 - DNA, 20 bp, Artificial Sequence
  Antisense compound
tttgtactctgacatctttg

SEQ ID NO: 5761 - DNA, 20 bp, Artificial Sequence
  Antisense compound
ctttgtactctgacatcttt

SEQ ID NO: 5762 - DNA, 20 bp, Artificial Sequence
  Antisense compound
cctttgtactctgacatctt

SEQ ID NO: 5763 - DNA, 20 bp, Artificial Sequence
  Antisense compound
tcctttgtactctgacatct

SEQ ID NO: 5764 - DNA, 20 bp, Artificial Sequence
  Antisense compound
gtcctttgtactctgacatc

SEQ ID NO: 5765 - DNA, 20 bp, Artificial Sequence
  Antisense compound
ggtcctttgtactctgacat

SEQ ID NO: 5766 - DNA, 20 bp, Artificial Sequence
  Antisense compound
tggtcctttgtactctgaca

SEQ ID NO: 5767 - DNA, 20 bp, Artificial Sequence
  Antisense compound
ctggtcctttgtactctgac

SEQ ID NO: 5768 - DNA, 20 bp, Artificial Sequence
  Antisense compound
actggtcctttgtactctga

SEQ ID NO: 5769 - DNA, 20 bp, Artificial Sequence
  Antisense compound
cactggtcctttgtactctg

SEQ ID NO: 5770 - DNA, 20 bp, Artificial Sequence
  Antisense compound
tcactggtcctttgtactct

SEQ ID NO: 5771 - DNA, 20 bp, Artificial Sequence
  Antisense compound
gtcactggtcctttgtactc

SEQ ID NO: 5772 - DNA, 20 bp, Artificial Sequence
  Antisense compound
agtcactggtcctttgtact

SEQ ID NO: 5773 - DNA, 20 bp, Artificial Sequence
  Antisense compound
cagtcactggtcctttgtac

SEQ ID NO: 5774 - DNA, 20 bp, Artificial Sequence
  Antisense compound
tcagtcactggtcctttgta

SEQ ID NO: 5775 - DNA, 20 bp, Artificial Sequence
  Antisense compound
atcagtcactggtcctttgt

SEQ ID NO: 5776 - DNA, 20 bp, Artificial Sequence
  Antisense compound
catcagtcactggtcctttg

SEQ ID NO: 5777 - DNA, 20 bp, Artificial Sequence
  Antisense compound
acatcagtcactggtccttt

SEQ ID NO: 5778 - DNA, 20 bp, Artificial Sequence
  Antisense compound
aacatcagtcactggtcctt

SEQ ID NO: 5779 - DNA, 20 bp, Artificial Sequence
  Antisense compound
aaacatcagtcactggtcct

SEQ ID NO: 5780 - DNA, 20 bp, Artificial Sequence
  Antisense compound
aaaacatcagtcactggtcc

SEQ ID NO: 5781 - DNA, 20 bp, Artificial Sequence
  Antisense compound
gaaaacatcagtcactggtc

SEQ ID NO: 5782 - DNA, 20 bp, Artificial Sequence
  Antisense compound
agaaaacatcagtcactggt

SEQ ID NO: 5783 - DNA, 20 bp, Artificial Sequence
  Antisense compound
tagaaaacatcagtcactgg

SEQ ID NO: 5784 - DNA, 20 bp, Artificial Sequence
  Antisense compound
gtagaaaacatcagtcactg

SEQ ID NO: 5785 - DNA, 20 bp, Artificial Sequence
  Antisense compound
tgtagaaaacatcagtcact

SEQ ID NO: 5786 - DNA, 20 bp, Artificial Sequence
  Antisense compound
ttgtagaaaacatcagtcac

SEQ ID NO: 5787 - DNA, 20 bp, Artificial Sequence
  Antisense compound
cttgtagaaaacatcagtca

SEQ ID NO: 5788 - DNA, 20 bp, Artificial Sequence
  Antisense compound
ccttgtagaaaacatcagtc

SEQ ID NO: 5789 - DNA, 20 bp, Artificial Sequence
  Antisense compound
tccttgtagaaaacatcagt

SEQ ID NO: 5790 - DNA, 20 bp, Artificial Sequence
  Antisense compound
ttccttgtagaaaacatcag

SEQ ID NO: 5791 - DNA, 20 bp, Artificial Sequence
  Antisense compound
tttccttgtagaaaacatca

SEQ ID NO: 5792 - DNA, 20 bp, Artificial Sequence
  Antisense compound
gtttccttgtagaaaacatc

SEQ ID NO: 5793 - DNA, 20 bp, Artificial Sequence
  Antisense compound
tgtttccttgtagaaaacat

SEQ ID NO: 5794 - DNA, 20 bp, Artificial Sequence
  Antisense compound
atgtttccttgtagaaaaca

SEQ ID NO: 5795 - DNA, 20 bp, Artificial Sequence
  Antisense compound
gatgtttccttgtagaaaac

SEQ ID NO: 5796 - DNA, 20 bp, Artificial Sequence
  Antisense compound
agatgtttccttgtagaaaa

SEQ ID NO: 5797 - DNA, 20 bp, Artificial Sequence
  Antisense compound
aagatgtttccttgtagaaa

SEQ ID NO: 5798 - DNA, 20 bp, Artificial Sequence
  Antisense compound
taagatgtttccttgtagaa

SEQ ID NO: 5799 - DNA, 20 bp, Artificial Sequence
  Antisense compound
gtaagatgtttccttgtaga

SEQ ID NO: 5800 - DNA, 20 bp, Artificial Sequence
  Antisense compound
tgtaagatgtttccttgtag

SEQ ID NO: 5801 - DNA, 20 bp, Artificial Sequence
  Antisense compound
gtgtaagatgtttccttgta

SEQ ID NO: 5802 - DNA, 20 bp, Artificial Sequence
  Antisense compound
agtgtaagatgtttccttgt

SEQ ID NO: 5803 - DNA, 20 bp, Artificial Sequence
  Antisense compound
tagtgtaagatgtttccttg

SEQ ID NO: 5804 - DNA, 20 bp, Artificial Sequence
  Antisense compound
gtagtgtaagatgtttcctt

SEQ ID NO: 5805 - DNA, 20 bp, Artificial Sequence
  Antisense compound
tgtagtgtaagatgtttcct

SEQ ID NO: 5806 - DNA, 20 bp, Artificial Sequence
  Antisense compound
ttgtagtgtaagatgtttcc

SEQ ID NO: 5807 - DNA, 20 bp, Artificial Sequence
  Antisense compound
gttgtagtgtaagatgtttc

SEQ ID NO: 5808 - DNA, 20 bp, Artificial Sequence
  Antisense compound
ggttgtagtgtaagatgttt

SEQ ID NO: 5809 - DNA, 20 bp, Artificial Sequence
  Antisense compound
tggttgtagtgtaagatgtt

SEQ ID NO: 5810 - DNA, 20 bp, Artificial Sequence
  Antisense compound
atggttgtagtgtaagatgt

SEQ ID NO: 5811 - DNA, 20 bp, Artificial Sequence
  Antisense compound
gatggttgtagtgtaagatg

SEQ ID NO: 5812 - DNA, 20 bp, Artificial Sequence
  Antisense compound
tgatggttgtagtgtaagat

SEQ ID NO: 5813 - DNA, 20 bp, Artificial Sequence
  Antisense compound
ttgatggttgtagtgtaaga

SEQ ID NO: 5814 - DNA, 20 bp, Artificial Sequence
  Antisense compound
cttgatggttgtagtgtaag

SEQ ID NO: 5815 - DNA, 20 bp, Artificial Sequence
  Antisense compound
gcttgatggttgtagtgtaa

SEQ ID NO: 5816 - DNA, 20 bp, Artificial Sequence
  Antisense compound
ggcttgatggttgtagtgta

SEQ ID NO: 5817 - DNA, 20 bp, Artificial Sequence
  Antisense compound
aggcttgatggttgtagtgt

SEQ ID NO: 5818 - DNA, 20 bp, Artificial Sequence
  Antisense compound
caggcttgatggttgtagtg

SEQ ID NO: 5819 - DNA, 20 bp, Artificial Sequence
  Antisense compound
acaggcttgatggttgtagt

SEQ ID NO: 5820 - DNA, 20 bp, Artificial Sequence
  Antisense compound
cacaggcttgatggttgtag

SEQ ID NO: 5821 - DNA, 20 bp, Artificial Sequence
  Antisense compound
acacaggcttgatggttgta

SEQ ID NO: 5822 - DNA, 20 bp, Artificial Sequence
  Antisense compound
gacacaggcttgatggttgt

SEQ ID NO: 5823 - DNA, 20 bp, Artificial Sequence
  Antisense compound
cgacacaggcttgatggttg

SEQ ID NO: 5824 - DNA, 20 bp, Artificial Sequence
  Antisense compound
acgacacaggcttgatggtt

SEQ ID NO: 5825 - DNA, 20 bp, Artificial Sequence
  Antisense compound
tacgacacaggcttgatggt

SEQ ID NO: 5826 - DNA, 20 bp, Artificial Sequence
  Antisense compound
atacgacacaggcttgatgg

SEQ ID NO: 5827 - DNA, 20 bp, Artificial Sequence
  Antisense compound
tatacgacacaggcttgatg

SEQ ID NO: 5828 - DNA, 20 bp, Artificial Sequence
  Antisense compound
ttatacgacacaggcttgat

SEQ ID NO: 5829 - DNA, 20 bp, Artificial Sequence
  Antisense compound
tttatacgacacaggcttga

SEQ ID NO: 5830 - DNA, 20 bp, Artificial Sequence
  Antisense compound
gtttatacgacacaggcttg

SEQ ID NO: 5831 - DNA, 20 bp, Artificial Sequence
  Antisense compound
agtttatacgacacaggctt

SEQ ID NO: 5832 - DNA, 20 bp, Artificial Sequence
  Antisense compound
gagtttatacgacacaggct

SEQ ID NO: 5833 - DNA, 20 bp, Artificial Sequence
  Antisense compound
cgagtttatacgacacaggc

SEQ ID NO: 5834 - DNA, 20 bp, Artificial Sequence
  Antisense compound
tcgagtttatacgacacagg

SEQ ID NO: 5835 - DNA, 20 bp, Artificial Sequence
  Antisense compound
atcgagtttatacgacacag

SEQ ID NO: 5836 - DNA, 20 bp, Artificial Sequence
  Antisense compound
catcgagtttatacgacaca

SEQ ID NO: 5837 - DNA, 20 bp, Artificial Sequence
  Antisense compound
ccatcgagtttatacgacac

SEQ ID NO: 5838 - DNA, 20 bp, Artificial Sequence
  Antisense compound
tccatcgagtttatacgaca

SEQ ID NO: 5839 - DNA, 20 bp, Artificial Sequence
  Antisense compound
ctccatcgagtttatacgac

SEQ ID NO: 5840 - DNA, 20 bp, Artificial Sequence
  Antisense compound
actccatcgagtttatacga

SEQ ID NO: 5841 - DNA, 20 bp, Artificial Sequence
  Antisense compound
aactccatcgagtttatacg

SEQ ID NO: 5842 - DNA, 20 bp, Artificial Sequence
  Antisense compound
taactccatcgagtttatac

SEQ ID NO: 5843 - DNA, 20 bp, Artificial Sequence
  Antisense compound
gtaactccatcgagtttata

SEQ ID NO: 5844 - DNA, 20 bp, Artificial Sequence
  Antisense compound
agtaactccatcgagtttat

SEQ ID NO: 5845 - DNA, 20 bp, Artificial Sequence
  Antisense compound
aagtaactccatcgagttta

SEQ ID NO: 5846 - DNA, 20 bp, Artificial Sequence
  Antisense compound
taagtaactccatcgagttt

SEQ ID NO: 5847 - DNA, 20 bp, Artificial Sequence
  Antisense compound
gtaagtaactccatcgagtt

SEQ ID NO: 5848 - DNA, 20 bp, Artificial Sequence
  Antisense compound
tgtaagtaactccatcgagt

SEQ ID NO: 5849 - DNA, 20 bp, Artificial Sequence
  Antisense compound
gtgtaagtaactccatcgag

SEQ ID NO: 5850 - DNA, 20 bp, Artificial Sequence
  Antisense compound
tgtgtaagtaactccatcga

SEQ ID NO: 5851 - DNA, 20 bp, Artificial Sequence
  Antisense compound
ctgtgtaagtaactccatcg

SEQ ID NO: 5852 - DNA, 20 bp, Artificial Sequence
  Antisense compound
tctgtgtaagtaactccatc

SEQ ID NO: 5853 - DNA, 20 bp, Artificial Sequence
  Antisense compound
ctctgtgtaagtaactccat

SEQ ID NO: 5854 - DNA, 20 bp, Artificial Sequence
  Antisense compound
tctctgtgtaagtaactcca

SEQ ID NO: 5855 - DNA, 20 bp, Artificial Sequence
  Antisense compound
atctctgtgtaagtaactcc

SEQ ID NO: 5856 - DNA, 20 bp, Artificial Sequence
  Antisense compound
aatctctgtgtaagtaactc

SEQ ID NO: 5857 - DNA, 20 bp, Artificial Sequence
  Antisense compound
caatctctgtgtaagtaact

SEQ ID NO: 5858 - DNA, 20 bp, Artificial Sequence
  Antisense compound
tcaatctctgtgtaagtaac

SEQ ID NO: 5859 - DNA, 20 bp, Artificial Sequence
  Antisense compound
ttcaatctctgtgtaagtaa

SEQ ID NO: 5860 - DNA, 20 bp, Artificial Sequence
  Antisense compound
gttcaatctctgtgtaagta

SEQ ID NO: 5861 - DNA, 20 bp, Artificial Sequence
  Antisense compound
ggttcaatctctgtgtaagt

SEQ ID NO: 5862 - DNA, 20 bp, Artificial Sequence
  Antisense compound
tggttcaatctctgtgtaag

SEQ ID NO: 5863 - DNA, 20 bp, Artificial Sequence
  Antisense compound
ttggttcaatctctgtgtaa

SEQ ID NO: 5864 - DNA, 20 bp, Artificial Sequence
  Antisense compound
tttggttcaatctctgtgta

SEQ ID NO: 5865 - DNA, 20 bp, Artificial Sequence
  Antisense compound
ttttggttcaatctctgtgt

SEQ ID NO: 5866 - DNA, 20 bp, Artificial Sequence
  Antisense compound
attttggttcaatctctgtg

SEQ ID NO: 5867 - DNA, 20 bp, Artificial Sequence
  Antisense compound
aattttggttcaatctctgt

SEQ ID NO: 5868 - DNA, 20 bp, Artificial Sequence
  Antisense compound
caattttggttcaatctctg

SEQ ID NO: 5869 - DNA, 20 bp, Artificial Sequence
  Antisense compound
ccaattttggttcaatctct

SEQ ID NO: 5870 - DNA, 20 bp, Artificial Sequence
  Antisense compound
tccaattttggttcaatctc

SEQ ID NO: 5871 - DNA, 20 bp, Artificial Sequence
  Antisense compound
atccaattttggttcaatct

SEQ ID NO: 5872 - DNA, 20 bp, Artificial Sequence
  Antisense compound
catccaattttggttcaatc

SEQ ID NO: 5873 - DNA, 20 bp, Artificial Sequence
  Antisense compound
ccatccaattttggttcaat

SEQ ID NO: 5874 - DNA, 20 bp, Artificial Sequence
  Antisense compound
cccatccaattttggttcaa

SEQ ID NO: 5875 - DNA, 20 bp, Artificial Sequence
  Antisense compound
acccatccaattttggttca

SEQ ID NO: 5876 - DNA, 20 bp, Artificial Sequence
  Antisense compound
tacccatccaattttggttc

SEQ ID NO: 5877 - DNA, 20 bp, Artificial Sequence
  Antisense compound
atacccatccaattttggtt

SEQ ID NO: 5878 - DNA, 20 bp, Artificial Sequence
  Antisense compound
aatacccatccaattttggt

SEQ ID NO: 5879 - DNA, 20 bp, Artificial Sequence
  Antisense compound
taatacccatccaattttgg

SEQ ID NO: 5880 - DNA, 20 bp, Artificial Sequence
  Antisense compound
ataatacccatccaattttg

SEQ ID NO: 5881 - DNA, 20 bp, Artificial Sequence
  Antisense compound
tataatacccatccaatttt

SEQ ID NO: 5882 - DNA, 20 bp, Artificial Sequence
  Antisense compound
ttataatacccatccaattt

SEQ ID NO: 5883 - DNA, 20 bp, Artificial Sequence
  Antisense compound
tttataatacccatccaatt

SEQ ID NO: 5884 - DNA, 20 bp, Artificial Sequence
  Antisense compound
ttttataatacccatccaat

SEQ ID NO: 5885 - DNA, 20 bp, Artificial Sequence
  Antisense compound
tttttataatacccatccaa

SEQ ID NO: 5886 - DNA, 20 bp, Artificial Sequence
  Antisense compound
ctttttataatacccatcca

SEQ ID NO: 5887 - DNA, 20 bp, Artificial Sequence
  Antisense compound
cctttttataatacccatcc

SEQ ID NO: 5888 - DNA, 20 bp, Artificial Sequence
  Antisense compound
tcctttttataatacccatc

SEQ ID NO: 5889 - DNA, 20 bp, Artificial Sequence
  Antisense compound
atcctttttataatacccat

SEQ ID NO: 5890 - DNA, 20 bp, Artificial Sequence
  Antisense compound
tatcctttttataataccca

SEQ ID NO: 5891 - DNA, 20 bp, Artificial Sequence
  Antisense compound
ttatcctttttataataccc

SEQ ID NO: 5892 - DNA, 20 bp, Artificial Sequence
  Antisense compound
attatcctttttataatacc

SEQ ID NO: 5893 - DNA, 20 bp, Artificial Sequence
  Antisense compound
cattatcctttttataatac

SEQ ID NO: 5894 - DNA, 20 bp, Artificial Sequence
  Antisense compound
gcattatcctttttataata

SEQ ID NO: 5895 - DNA, 20 bp, Artificial Sequence
  Antisense compound
agcattatcctttttataat

SEQ ID NO: 5896 - DNA, 20 bp, Artificial Sequence
  Antisense compound
aagcattatcctttttataa

SEQ ID NO: 5897 - DNA, 20 bp, Artificial Sequence
  Antisense compound
taagcattatcctttttata

SEQ ID NO: 5898 - DNA, 20 bp, Artificial Sequence
  Antisense compound
gtaagcattatcctttttat

SEQ ID NO: 5899 - DNA, 20 bp, Artificial Sequence
  Antisense compound
agtaagcattatccttttta

SEQ ID NO: 5900 - DNA, 20 bp, Artificial Sequence
  Antisense compound
tagtaagcattatccttttt

SEQ ID NO: 5901 - DNA, 20 bp, Artificial Sequence
  Antisense compound
atagtaagcattatcctttt

SEQ ID NO: 5902 - DNA, 20 bp, Artificial Sequence
  Antisense compound
tatagtaagcattatccttt

SEQ ID NO: 5903 - DNA, 20 bp, Artificial Sequence
  Antisense compound
gtatagtaagcattatcctt

SEQ ID NO: 5904 - DNA, 20 bp, Artificial Sequence
  Antisense compound
tgtatagtaagcattatcct

SEQ ID NO: 5905 - DNA, 20 bp, Artificial Sequence
  Antisense compound
ctgtatagtaagcattatcc

SEQ ID NO: 5906 - DNA, 20 bp, Artificial Sequence
  Antisense compound
tctgtatagtaagcattatc

SEQ ID NO: 5907 - DNA, 20 bp, Artificial Sequence
  Antisense compound
ctctgtatagtaagcattat

SEQ ID NO: 5908 - DNA, 20 bp, Artificial Sequence
  Antisense compound
gctctgtatagtaagcatta

SEQ ID NO: 5909 - DNA, 20 bp, Artificial Sequence
  Antisense compound
tgctctgtatagtaagcatt

SEQ ID NO: 5910 - DNA, 20 bp, Artificial Sequence
  Antisense compound
ctgctctgtatagtaagcat

SEQ ID NO: 5911 - DNA, 20 bp, Artificial Sequence
  Antisense compound
gctgctctgtatagtaagca

SEQ ID NO: 5912 - DNA, 20 bp, Artificial Sequence
  Antisense compound
ggctgctctgtatagtaagc

SEQ ID NO: 5913 - DNA, 20 bp, Artificial Sequence
  Antisense compound
aggctgctctgtatagtaag

SEQ ID NO: 5914 - DNA, 20 bp, Artificial Sequence
  Antisense compound
taggctgctctgtatagtaa

SEQ ID NO: 5915 - DNA, 20 bp, Artificial Sequence
  Antisense compound
ataggctgctctgtatagta

SEQ ID NO: 5916 - DNA, 20 bp, Artificial Sequence
  Antisense compound
tataggctgctctgtatagt

SEQ ID NO: 5917 - DNA, 20 bp, Artificial Sequence
  Antisense compound
ctataggctgctctgtatag

SEQ ID NO: 5918 - DNA, 20 bp, Artificial Sequence
  Antisense compound
tctataggctgctctgtata

SEQ ID NO: 5919 - DNA, 20 bp, Artificial Sequence
  Antisense compound
gtctataggctgctctgtat

SEQ ID NO: 5920 - DNA, 20 bp, Artificial Sequence
  Antisense compound
ggtctataggctgctctgta

SEQ ID NO: 5921 - DNA, 20 bp, Artificial Sequence
  Antisense compound
aggtctataggctgctctgt

SEQ ID NO: 5922 - DNA, 20 bp, Artificial Sequence
  Antisense compound
aaggtctataggctgctctg

SEQ ID NO: 5923 - DNA, 20 bp, Artificial Sequence
  Antisense compound
caaggtctataggctgctct

SEQ ID NO: 5924 - DNA, 20 bp, Artificial Sequence
  Antisense compound
acaaggtctataggctgctc

SEQ ID NO: 5925 - DNA, 20 bp, Artificial Sequence
  Antisense compound
tacaaggtctataggctgct

SEQ ID NO: 5926 - DNA, 20 bp, Artificial Sequence
  Antisense compound
gtacaaggtctataggctgc

SEQ ID NO: 5927 - DNA, 20 bp, Artificial Sequence
  Antisense compound
ggtacaaggtctataggctg

SEQ ID NO: 5928 - DNA, 20 bp, Artificial Sequence
  Antisense compound
tggtacaaggtctataggct

SEQ ID NO: 5929 - DNA, 20 bp, Artificial Sequence
  Antisense compound
ttggtacaaggtctataggc

SEQ ID NO: 5930 - DNA, 20 bp, Artificial Sequence
  Antisense compound
gttggtacaaggtctatagg

SEQ ID NO: 5931 - DNA, 20 bp, Artificial Sequence
  Antisense compound
agttggtacaaggtctatag

SEQ ID NO: 5932 - DNA, 20 bp, Artificial Sequence
  Antisense compound
gagttggtacaaggtctata

SEQ ID NO: 5933 - DNA, 20 bp, Artificial Sequence
  Antisense compound
tgagttggtacaaggtctat

SEQ ID NO: 5934 - DNA, 20 bp, Artificial Sequence
  Antisense compound
ttgagttggtacaaggtcta

SEQ ID NO: 5935 - DNA, 20 bp, Artificial Sequence
  Antisense compound
gttgagttggtacaaggtct

SEQ ID NO: 5936 - DNA, 20 bp, Artificial Sequence
  Antisense compound
ggttgagttggtacaaggtc

SEQ ID NO: 5937 - DNA, 20 bp, Artificial Sequence
  Antisense compound
tggttgagttggtacaaggt

SEQ ID NO: 5938 - DNA, 20 bp, Artificial Sequence
  Antisense compound
atggttgagttggtacaagg

SEQ ID NO: 5939 - DNA, 20 bp, Artificial Sequence
  Antisense compound
aatggttgagttggtacaag

SEQ ID NO: 5940 - DNA, 20 bp, Artificial Sequence
  Antisense compound
taatggttgagttggtacaa

SEQ ID NO: 5941 - DNA, 20 bp, Artificial Sequence
  Antisense compound
gtaatggttgagttggtaca

SEQ ID NO: 5942 - DNA, 20 bp, Artificial Sequence
  Antisense compound
ggtaatggttgagttggtac

SEQ ID NO: 5943 - DNA, 20 bp, Artificial Sequence
  Antisense compound
tggtaatggttgagttggta

SEQ ID NO: 5944 - DNA, 20 bp, Artificial Sequence
  Antisense compound
ttggtaatggttgagttggt

SEQ ID NO: 5945 - DNA, 20 bp, Artificial Sequence
  Antisense compound
tttggtaatggttgagttgg

SEQ ID NO: 5946 - DNA, 20 bp, Artificial Sequence
  Antisense compound
atttggtaatggttgagttg

SEQ ID NO: 5947 - DNA, 20 bp, Artificial Sequence
  Antisense compound
catttggtaatggttgagtt

SEQ ID NO: 5948 - DNA, 20 bp, Artificial Sequence
  Antisense compound
gcatttggtaatggttgagt

SEQ ID NO: 5949 - DNA, 20 bp, Artificial Sequence
  Antisense compound
cgcatttggtaatggttgag

SEQ ID NO: 5950 - DNA, 20 bp, Artificial Sequence
  Antisense compound
tcgcatttggtaatggttga

SEQ ID NO: 5951 - DNA, 20 bp, Artificial Sequence
  Antisense compound
ctcgcatttggtaatggttg

SEQ ID NO: 5952 - DNA, 20 bp, Artificial Sequence
  Antisense compound
actcgcatttggtaatggtt

SEQ ID NO: 5953 - DNA, 20 bp, Artificial Sequence
  Antisense compound
aactcgcatttggtaatggt

SEQ ID NO: 5954 - DNA, 20 bp, Artificial Sequence
  Antisense compound
aaactcgcatttggtaatgg

SEQ ID NO: 5955 - DNA, 20 bp, Artificial Sequence
  Antisense compound
aaaactcgcatttggtaatg

SEQ ID NO: 5956 - DNA, 20 bp, Artificial Sequence
  Antisense compound
caaaactcgcatttggtaat

SEQ ID NO: 5957 - DNA, 20 bp, Artificial Sequence
  Antisense compound
tcaaaactcgcatttggtaa

SEQ ID NO: 5958 - DNA, 20 bp, Artificial Sequence
  Antisense compound
atcaaaactcgcatttggta

SEQ ID NO: 5959 - DNA, 20 bp, Artificial Sequence
  Antisense compound
tatcaaaactcgcatttggt

SEQ ID NO: 5960 - DNA, 20 bp, Artificial Sequence
  Antisense compound
ttatcaaaactcgcatttgg

SEQ ID NO: 5961 - DNA, 20 bp, Artificial Sequence
  Antisense compound
attatcaaaactcgcatttg

SEQ ID NO: 5962 - DNA, 20 bp, Artificial Sequence
  Antisense compound
aattatcaaaactcgcattt

SEQ ID NO: 5963 - DNA, 20 bp, Artificial Sequence
  Antisense compound
aaattatcaaaactcgcatt

SEQ ID NO: 5964 - DNA, 20 bp, Artificial Sequence
  Antisense compound
gaaattatcaaaactcgcat

SEQ ID NO: 5965 - DNA, 20 bp, Artificial Sequence
  Antisense compound
tgaaattatcaaaactcgca

SEQ ID NO: 5966 - DNA, 20 bp, Artificial Sequence
  Antisense compound
ttgaaattatcaaaactcgc

SEQ ID NO: 5967 - DNA, 20 bp, Artificial Sequence
  Antisense compound
tttgaaattatcaaaactcg

SEQ ID NO: 5968 - DNA, 20 bp, Artificial Sequence
  Antisense compound
gtttgaaattatcaaaactc

SEQ ID NO: 5969 - DNA, 20 bp, Artificial Sequence
  Antisense compound
agtttgaaattatcaaaact

SEQ ID NO: 5970 - DNA, 20 bp, Artificial Sequence
  Antisense compound
gagtttgaaattatcaaaac

SEQ ID NO: 5971 - DNA, 20 bp, Artificial Sequence
  Antisense compound
tgagtttgaaattatcaaaa

SEQ ID NO: 5972 - DNA, 20 bp, Artificial Sequence
  Antisense compound
gtgagtttgaaattatcaaa

SEQ ID NO: 5973 - DNA, 20 bp, Artificial Sequence
  Antisense compound
tgtgagtttgaaattatcaa

SEQ ID NO: 5974 - DNA, 20 bp, Artificial Sequence
  Antisense compound
atgtgagtttgaaattatca

SEQ ID NO: 5975 - DNA, 20 bp, Artificial Sequence
  Antisense compound
catgtgagtttgaaattatc

SEQ ID NO: 5976 - DNA, 20 bp, Artificial Sequence
  Antisense compound
acatgtgagtttgaaattat

SEQ ID NO: 5977 - DNA, 20 bp, Artificial Sequence
  Antisense compound
aacatgtgagtttgaaatta

SEQ ID NO: 5978 - DNA, 20 bp, Artificial Sequence
  Antisense compound
gaacatgtgagtttgaaatt

SEQ ID NO: 5979 - DNA, 20 bp, Artificial Sequence
  Antisense compound
agaacatgtgagtttgaaat

SEQ ID NO: 5980 - DNA, 20 bp, Artificial Sequence
  Antisense compound
tagaacatgtgagtttgaaa

SEQ ID NO: 5981 - DNA, 20 bp, Artificial Sequence
  Antisense compound
ttagaacatgtgagtttgaa

SEQ ID NO: 5982 - DNA, 20 bp, Artificial Sequence
  Antisense compound
gttagaacatgtgagtttga

SEQ ID NO: 5983 - DNA, 20 bp, Artificial Sequence
  Antisense compound
tgttagaacatgtgagtttg

SEQ ID NO: 5984 - DNA, 20 bp, Artificial Sequence
  Antisense compound
gtgttagaacatgtgagttt

SEQ ID NO: 5985 - DNA, 20 bp, Artificial Sequence
  Antisense compound
tgtgttagaacatgtgagtt

SEQ ID NO: 5986 - DNA, 20 bp, Artificial Sequence
  Antisense compound
ttgtgttagaacatgtgagt

SEQ ID NO: 5987 - DNA, 20 bp, Artificial Sequence
  Antisense compound
tttgtgttagaacatgtgag

SEQ ID NO: 5988 - DNA, 20 bp, Artificial Sequence
  Antisense compound
ttttgtgttagaacatgtga

SEQ ID NO: 5989 - DNA, 20 bp, Artificial Sequence
  Antisense compound
attttgtgttagaacatgtg

SEQ ID NO: 5990 - DNA, 20 bp, Artificial Sequence
  Antisense compound
aattttgtgttagaacatgt

SEQ ID NO: 5991 - DNA, 20 bp, Artificial Sequence
  Antisense compound
aaattttgtgttagaacatg

SEQ ID NO: 5992 - DNA, 20 bp, Artificial Sequence
  Antisense compound
caaattttgtgttagaacat

SEQ ID NO: 5993 - DNA, 20 bp, Artificial Sequence
  Antisense compound
gcaaattttgtgttagaaca

SEQ ID NO: 5994 - DNA, 20 bp, Artificial Sequence
  Antisense compound
agcaaattttgtgttagaac

SEQ ID NO: 5995 - DNA, 20 bp, Artificial Sequence
  Antisense compound
cagcaaattttgtgttagaa

SEQ ID NO: 5996 - DNA, 20 bp, Artificial Sequence
  Antisense compound
tcagcaaattttgtgttaga

SEQ ID NO: 5997 - DNA, 20 bp, Artificial Sequence
  Antisense compound
atcagcaaattttgtgttag

SEQ ID NO: 5998 - DNA, 20 bp, Artificial Sequence
  Antisense compound
catcagcaaattttgtgtta

SEQ ID NO: 5999 - DNA, 20 bp, Artificial Sequence
  Antisense compound
tcatcagcaaattttgtgtt

SEQ ID NO: 6000 - DNA, 20 bp, Artificial Sequence
  Antisense compound
atcatcagcaaattttgtgt

SEQ ID NO: 6001 - DNA, 20 bp, Artificial Sequence
  Antisense compound
aatcatcagcaaattttgtg

SEQ ID NO: 6002 - DNA, 20 bp, Artificial Sequence
  Antisense compound
aaatcatcagcaaattttgt

SEQ ID NO: 6003 - DNA, 20 bp, Artificial Sequence
  Antisense compound
taaatcatcagcaaattttg

SEQ ID NO: 6004 - DNA, 20 bp, Artificial Sequence
  Antisense compound
ttaaatcatcagcaaatttt

SEQ ID NO: 6005 - DNA, 20 bp, Artificial Sequence
  Antisense compound
tttaaatcatcagcaaattt

SEQ ID NO: 6006 - DNA, 20 bp, Artificial Sequence
  Antisense compound
atttaaatcatcagcaaatt

SEQ ID NO: 6007 - DNA, 20 bp, Artificial Sequence
  Antisense compound
gatttaaatcatcagcaaat

SEQ ID NO: 6008 - DNA, 20 bp, Artificial Sequence
  Antisense compound
tgatttaaatcatcagcaaa

SEQ ID NO: 6009 - DNA, 20 bp, Artificial Sequence
  Antisense compound
ttgatttaaatcatcagcaa

SEQ ID NO: 6010 - DNA, 20 bp, Artificial Sequence
  Antisense compound
tttgatttaaatcatcagca

SEQ ID NO: 6011 - DNA, 20 bp, Artificial Sequence
  Antisense compound
atttgatttaaatcatcagc

SEQ ID NO: 6012 - DNA, 20 bp, Artificial Sequence
  Antisense compound
catttgatttaaatcatcag

SEQ ID NO: 6013 - DNA, 20 bp, Artificial Sequence
  Antisense compound
tcatttgatttaaatcatca

SEQ ID NO: 6014 - DNA, 20 bp, Artificial Sequence
  Antisense compound
gtcatttgatttaaatcatc

SEQ ID NO: 6015 - DNA, 20 bp, Artificial Sequence
  Antisense compound
tgtcatttgatttaaatcat

SEQ ID NO: 6016 - DNA, 20 bp, Artificial Sequence
  Antisense compound
ctgtcatttgatttaaatca

SEQ ID NO: 6017 - DNA, 20 bp, Artificial Sequence
  Antisense compound
cctgtcatttgatttaaatc

SEQ ID NO: 6018 - DNA, 20 bp, Artificial Sequence
  Antisense compound
gcctgtcatttgatttaaat

SEQ ID NO: 6019 - DNA, 20 bp, Artificial Sequence
  Antisense compound
agcctgtcatttgatttaaa

SEQ ID NO: 6020 - DNA, 20 bp, Artificial Sequence
  Antisense compound
aagcctgtcatttgatttaa

SEQ ID NO: 6021 - DNA, 20 bp, Artificial Sequence
  Antisense compound
gaagcctgtcatttgattta

SEQ ID NO: 6022 - DNA, 20 bp, Artificial Sequence
  Antisense compound
tgaagcctgtcatttgattt

SEQ ID NO: 6023 - DNA, 20 bp, Artificial Sequence
  Antisense compound
gtgaagcctgtcatttgatt

SEQ ID NO: 6024 - DNA, 20 bp, Artificial Sequence
  Antisense compound
tgtgaagcctgtcatttgat

SEQ ID NO: 6025 - DNA, 20 bp, Artificial Sequence
  Antisense compound
ttgtgaagcctgtcatttga

SEQ ID NO: 6026 - DNA, 20 bp, Artificial Sequence
  Antisense compound
tttgtgaagcctgtcatttg

SEQ ID NO: 6027 - DNA, 20 bp, Artificial Sequence
  Antisense compound
ctttgtgaagcctgtcattt

SEQ ID NO: 6028 - DNA, 20 bp, Artificial Sequence
  Antisense compound
gctttgtgaagcctgtcatt

SEQ ID NO: 6029 - DNA, 20 bp, Artificial Sequence
  Antisense compound
ggctttgtgaagcctgtcat

SEQ ID NO: 6030 - DNA, 20 bp, Artificial Sequence
  Antisense compound
tggctttgtgaagcctgtca

SEQ ID NO: 6031 - DNA, 20 bp, Artificial Sequence
  Antisense compound
ctggctttgtgaagcctgtc

SEQ ID NO: 6032 - DNA, 20 bp, Artificial Sequence
  Antisense compound
gctggctttgtgaagcctgt

SEQ ID NO: 6033 - DNA, 20 bp, Artificial Sequence
  Antisense compound
agctggctttgtgaagcctg

SEQ ID NO: 6034 - DNA, 20 bp, Artificial Sequence
  Antisense compound
aagctggctttgtgaagcct

SEQ ID NO: 6035 - DNA, 20 bp, Artificial Sequence
  Antisense compound
gaagctggctttgtgaagcc

SEQ ID NO: 6036 - DNA, 20 bp, Artificial Sequence
  Antisense compound
tgaagctggctttgtgaagc

SEQ ID NO: 6037 - DNA, 20 bp, Artificial Sequence
  Antisense compound
gtgaagctggctttgtgaag

SEQ ID NO: 6038 - DNA, 20 bp, Artificial Sequence
  Antisense compound
cgtgaagctggctttgtgaa

SEQ ID NO: 6039 - DNA, 20 bp, Artificial Sequence
  Antisense compound
tcgtgaagctggctttgtga

SEQ ID NO: 6040 - DNA, 20 bp, Artificial Sequence
  Antisense compound
ctcgtgaagctggctttgtg

SEQ ID NO: 6041 - DNA, 20 bp, Artificial Sequence
  Antisense compound
tctcgtgaagctggctttgt

SEQ ID NO: 6042 - DNA, 20 bp, Artificial Sequence
  Antisense compound
ctctcgtgaagctggctttg

SEQ ID NO: 6043 - DNA, 20 bp, Artificial Sequence
  Antisense compound
gctctcgtgaagctggcttt

SEQ ID NO: 6044 - DNA, 20 bp, Artificial Sequence
  Antisense compound
agctctcgtgaagctggctt

SEQ ID NO: 6045 - DNA, 20 bp, Artificial Sequence
  Antisense compound
tagctctcgtgaagctggct

SEQ ID NO: 6046 - DNA, 20 bp, Artificial Sequence
  Antisense compound
atagctctcgtgaagctggc

SEQ ID NO: 6047 - DNA, 20 bp, Artificial Sequence
  Antisense compound
gatagctctcgtgaagctgg

SEQ ID NO: 6048 - DNA, 20 bp, Artificial Sequence
  Antisense compound
agatagctctcgtgaagctg

SEQ ID NO: 6049 - DNA, 20 bp, Artificial Sequence
  Antisense compound
cagatagctctcgtgaagct

SEQ ID NO: 6050 - DNA, 20 bp, Artificial Sequence
  Antisense compound
acagatagctctcgtgaagc

SEQ ID NO: 6051 - DNA, 20 bp, Artificial Sequence
  Antisense compound
gacagatagctctcgtgaag

SEQ ID NO: 6052 - DNA, 20 bp, Artificial Sequence
  Antisense compound
tgacagatagctctcgtgaa

SEQ ID NO: 6053 - DNA, 20 bp, Artificial Sequence
  Antisense compound
gtgacagatagctctcgtga

SEQ ID NO: 6054 - DNA, 20 bp, Artificial Sequence
  Antisense compound
tgtgacagatagctctcgtg

SEQ ID NO: 6055 - DNA, 20 bp, Artificial Sequence
  Antisense compound
atgtgacagatagctctcgt

SEQ ID NO: 6056 - DNA, 20 bp, Artificial Sequence
  Antisense compound
aatgtgacagatagctctcg

SEQ ID NO: 6057 - DNA, 20 bp, Artificial Sequence
  Antisense compound
gaatgtgacagatagctctc

SEQ ID NO: 6058 - DNA, 20 bp, Artificial Sequence
  Antisense compound
agaatgtgacagatagctct

SEQ ID NO: 6059 - DNA, 20 bp, Artificial Sequence
  Antisense compound
aagaatgtgacagatagctc

SEQ ID NO: 6060 - DNA, 20 bp, Artificial Sequence
  Antisense compound
gaagaatgtgacagatagct

SEQ ID NO: 6061 - DNA, 20 bp, Artificial Sequence
  Antisense compound
ggaagaatgtgacagatagc

SEQ ID NO: 6062 - DNA, 20 bp, Artificial Sequence
  Antisense compound
gggaagaatgtgacagatag

SEQ ID NO: 6063 - DNA, 20 bp, Artificial Sequence
  Antisense compound
tgggaagaatgtgacagata

SEQ ID NO: 6064 - DNA, 20 bp, Artificial Sequence
  Antisense compound
ctgggaagaatgtgacagat

SEQ ID NO: 6065 - DNA, 20 bp, Artificial Sequence
  Antisense compound
tctgggaagaatgtgacaga

SEQ ID NO: 6066 - DNA, 20 bp, Artificial Sequence
  Antisense compound
gtctgggaagaatgtgacag

SEQ ID NO: 6067 - DNA, 20 bp, Artificial Sequence
  Antisense compound
agtctgggaagaatgtgaca

SEQ ID NO: 6068 - DNA, 20 bp, Artificial Sequence
  Antisense compound
aagtctgggaagaatgtgac

SEQ ID NO: 6069 - DNA, 20 bp, Artificial Sequence
  Antisense compound
caagtctgggaagaatgtga

SEQ ID NO: 6070 - DNA, 20 bp, Artificial Sequence
  Antisense compound
tcaagtctgggaagaatgtg

SEQ ID NO: 6071 - DNA, 20 bp, Artificial Sequence
  Antisense compound
ttcaagtctgggaagaatgt

SEQ ID NO: 6072 - DNA, 20 bp, Artificial Sequence
  Antisense compound
attcaagtctgggaagaatg

SEQ ID NO: 6073 - DNA, 20 bp, Artificial Sequence
  Antisense compound
cattcaagtctgggaagaat

SEQ ID NO: 6074 - DNA, 20 bp, Artificial Sequence
  Antisense compound
ccattcaagtctgggaagaa

SEQ ID NO: 6075 - DNA, 20 bp, Artificial Sequence
  Antisense compound
gccattcaagtctgggaaga

SEQ ID NO: 6076 - DNA, 20 bp, Artificial Sequence
  Antisense compound
cgccattcaagtctgggaag

SEQ ID NO: 6077 - DNA, 20 bp, Artificial Sequence
  Antisense compound
tcgccattcaagtctgggaa

SEQ ID NO: 6078 - DNA, 20 bp, Artificial Sequence
  Antisense compound
atcgccattcaagtctggga

SEQ ID NO: 6079 - DNA, 20 bp, Artificial Sequence
  Antisense compound
catcgccattcaagtctggg

SEQ ID NO: 6080 - DNA, 20 bp, Artificial Sequence
  Antisense compound
acatcgccattcaagtctgg

SEQ ID NO: 6081 - DNA, 20 bp, Artificial Sequence
  Antisense compound
tacatcgccattcaagtctg

SEQ ID NO: 6082 - DNA, 20 bp, Artificial Sequence
  Antisense compound
ctacatcgccattcaagtct

SEQ ID NO: 6083 - DNA, 20 bp, Artificial Sequence
  Antisense compound
actacatcgccattcaagtc

SEQ ID NO: 6084 - DNA, 20 bp, Artificial Sequence
  Antisense compound
cactacatcgccattcaagt

SEQ ID NO: 6085 - DNA, 20 bp, Artificial Sequence
  Antisense compound
ccactacatcgccattcaag

SEQ ID NO: 6086 - DNA, 20 bp, Artificial Sequence
  Antisense compound
gccactacatcgccattcaa

SEQ ID NO: 6087 - DNA, 20 bp, Artificial Sequence
  Antisense compound
agccactacatcgccattca

SEQ ID NO: 6088 - DNA, 20 bp, Artificial Sequence
  Antisense compound
tagccactacatcgccattc

SEQ ID NO: 6089 - DNA, 20 bp, Artificial Sequence
  Antisense compound
atagccactacatcgccatt

SEQ ID NO: 6090 - DNA, 20 bp, Artificial Sequence
  Antisense compound
aatagccactacatcgccat

SEQ ID NO: 6091 - DNA, 20 bp, Artificial Sequence
  Antisense compound
caatagccactacatcgcca

SEQ ID NO: 6092 - DNA, 20 bp, Artificial Sequence
  Antisense compound
tcaatagccactacatcgcc

SEQ ID NO: 6093 - DNA, 20 bp, Artificial Sequence
  Antisense compound
gtcaatagccactacatcgc

SEQ ID NO: 6094 - DNA, 20 bp, Artificial Sequence
  Antisense compound
agtcaatagccactacatcg

SEQ ID NO: 6095 - DNA, 20 bp, Artificial Sequence
  Antisense compound
tagtcaatagccactacatc

SEQ ID NO: 6096 - DNA, 20 bp, Artificial Sequence
  Antisense compound
atagtcaatagccactacat

SEQ ID NO: 6097 - DNA, 20 bp, Artificial Sequence
  Antisense compound
tatagtcaatagccactaca

SEQ ID NO: 6098 - DNA, 20 bp, Artificial Sequence
  Antisense compound
ctatagtcaatagccactac

SEQ ID NO: 6099 - DNA, 20 bp, Artificial Sequence
  Antisense compound
tctatagtcaatagccacta

SEQ ID NO: 6100 - DNA, 20 bp, Artificial Sequence
  Antisense compound
gtctatagtcaatagccact

SEQ ID NO: 6101 - DNA, 20 bp, Artificial Sequence
  Antisense compound
tgtctatagtcaatagccac

SEQ ID NO: 6102 - DNA, 20 bp, Artificial Sequence
  Antisense compound
gtgtctatagtcaatagcca

SEQ ID NO: 6103 - DNA, 20 bp, Artificial Sequence
  Antisense compound
agtgtctatagtcaatagcc

SEQ ID NO: 6104 - DNA, 20 bp, Artificial Sequence
  Antisense compound
tagtgtctatagtcaatagc

SEQ ID NO: 6105 - DNA, 20 bp, Artificial Sequence
  Antisense compound
atagtgtctatagtcaatag

SEQ ID NO: 6106 - DNA, 20 bp, Artificial Sequence
  Antisense compound
aatagtgtctatagtcaata

SEQ ID NO: 6107 - DNA, 20 bp, Artificial Sequence
  Antisense compound
gaatagtgtctatagtcaat

SEQ ID NO: 6108 - DNA, 20 bp, Artificial Sequence
  Antisense compound
tgaatagtgtctatagtcaa

SEQ ID NO: 6109 - DNA, 20 bp, Artificial Sequence
  Antisense compound
ctgaatagtgtctatagtca

SEQ ID NO: 6110 - DNA, 20 bp, Artificial Sequence
  Antisense compound
gctgaatagtgtctatagtc

SEQ ID NO: 6111 - DNA, 20 bp, Artificial Sequence
  Antisense compound
cgctgaatagtgtctatagt

SEQ ID NO: 6112 - DNA, 20 bp, Artificial Sequence
  Antisense compound
tcgctgaatagtgtctatag

SEQ ID NO: 6113 - DNA, 20 bp, Artificial Sequence
  Antisense compound
ctcgctgaatagtgtctata

SEQ ID NO: 6114 - DNA, 20 bp, Artificial Sequence
  Antisense compound
actcgctgaatagtgtctat

SEQ ID NO: 6115 - DNA, 20 bp, Artificial Sequence
  Antisense compound
aactcgctgaatagtgtcta

SEQ ID NO: 6116 - DNA, 20 bp, Artificial Sequence
  Antisense compound
aaactcgctgaatagtgtct

SEQ ID NO: 6117 - DNA, 20 bp, Artificial Sequence
  Antisense compound
gaaactcgctgaatagtgtc

SEQ ID NO: 6118 - DNA, 20 bp, Artificial Sequence
  Antisense compound
tgaaactcgctgaatagtgt

SEQ ID NO: 6119 - DNA, 20 bp, Artificial Sequence
  Antisense compound
ttgaaactcgctgaatagtg

SEQ ID NO: 6120 - DNA, 20 bp, Artificial Sequence
  Antisense compound
cttgaaactcgctgaatagt

SEQ ID NO: 6121 - DNA, 20 bp, Artificial Sequence
  Antisense compound
tcttgaaactcgctgaatag

SEQ ID NO: 6122 - DNA, 20 bp, Artificial Sequence
  Antisense compound
ttcttgaaactcgctgaata

SEQ ID NO: 6123 - DNA, 20 bp, Artificial Sequence
  Antisense compound
tttcttgaaactcgctgaat

SEQ ID NO: 6124 - DNA, 20 bp, Artificial Sequence
  Antisense compound
ctttcttgaaactcgctgaa

SEQ ID NO: 6125 - DNA, 20 bp, Artificial Sequence
  Antisense compound
cctttcttgaaactcgctga

SEQ ID NO: 6126 - DNA, 20 bp, Artificial Sequence
  Antisense compound
acctttcttgaaactcgctg

SEQ ID NO: 6127 - DNA, 20 bp, Artificial Sequence
  Antisense compound
cacctttcttgaaactcgct

SEQ ID NO: 6128 - DNA, 20 bp, Artificial Sequence
  Antisense compound
gcacctttcttgaaactcgc

SEQ ID NO: 6129 - DNA, 20 bp, Artificial Sequence
  Antisense compound
agcacctttcttgaaactcg

SEQ ID NO: 6130 - DNA, 20 bp, Artificial Sequence
  Antisense compound
tagcacctttcttgaaactc

SEQ ID NO: 6131 - DNA, 20 bp, Artificial Sequence
  Antisense compound
ttagcacctttcttgaaact

SEQ ID NO: 6132 - DNA, 20 bp, Artificial Sequence
  Antisense compound
tttagcacctttcttgaaac

SEQ ID NO: 6133 - DNA, 20 bp, Artificial Sequence
  Antisense compound
atttagcacctttcttgaaa

SEQ ID NO: 6134 - DNA, 20 bp, Artificial Sequence
  Antisense compound
aatttagcacctttcttgaa

SEQ ID NO: 6135 - DNA, 20 bp, Artificial Sequence
  Antisense compound
taatttagcacctttcttga

SEQ ID NO: 6136 - DNA, 20 bp, Artificial Sequence
  Antisense compound
gtaatttagcacctttcttg

SEQ ID NO: 6137 - DNA, 20 bp, Artificial Sequence
  Antisense compound
agtaatttagcacctttctt

SEQ ID NO: 6138 - DNA, 20 bp, Artificial Sequence
  Antisense compound
cagtaatttagcacctttct

SEQ ID NO: 6139 - DNA, 20 bp, Artificial Sequence
  Antisense compound
gcagtaatttagcacctttc

SEQ ID NO: 6140 - DNA, 20 bp, Artificial Sequence
  Antisense compound
tgcagtaatttagcaccttt

SEQ ID NO: 6141 - DNA, 20 bp, Artificial Sequence
  Antisense compound
atgcagtaatttagcacctt

SEQ ID NO: 6142 - DNA, 20 bp, Artificial Sequence
  Antisense compound
tatgcagtaatttagcacct

SEQ ID NO: 6143 - DNA, 20 bp, Artificial Sequence
  Antisense compound
ttatgcagtaatttagcacc

SEQ ID NO: 6144 - DNA, 20 bp, Artificial Sequence
  Antisense compound
cttatgcagtaatttagcac

SEQ ID NO: 6145 - DNA, 20 bp, Artificial Sequence
  Antisense compound
gcttatgcagtaatttagca

SEQ ID NO: 6146 - DNA, 20 bp, Artificial Sequence
  Antisense compound
ggcttatgcagtaatttagc

SEQ ID NO: 6147 - DNA, 20 bp, Artificial Sequence
  Antisense compound
tggcttatgcagtaatttag

SEQ ID NO: 6148 - DNA, 20 bp, Artificial Sequence
  Antisense compound
ttggcttatgcagtaattta

SEQ ID NO: 6149 - DNA, 20 bp, Artificial Sequence
  Antisense compound
attggcttatgcagtaattt

SEQ ID NO: 6150 - DNA, 20 bp, Artificial Sequence
  Antisense compound
aattggcttatgcagtaatt

SEQ ID NO: 6151 - DNA, 20 bp, Artificial Sequence
  Antisense compound
caattggcttatgcagtaat

SEQ ID NO: 6152 - DNA, 20 bp, Artificial Sequence
  Antisense compound
acaattggcttatgcagtaa

SEQ ID NO: 6153 - DNA, 20 bp, Artificial Sequence
  Antisense compound
aacaattggcttatgcagta

SEQ ID NO: 6154 - DNA, 20 bp, Artificial Sequence
  Antisense compound
aaacaattggcttatgcagt

SEQ ID NO: 6155 - DNA, 20 bp, Artificial Sequence
  Antisense compound
caaacaattggcttatgcag

SEQ ID NO: 6156 - DNA, 20 bp, Artificial Sequence
  Antisense compound
ccaaacaattggcttatgca

SEQ ID NO: 6157 - DNA, 20 bp, Artificial Sequence
  Antisense compound
gccaaacaattggcttatgc

SEQ ID NO: 6158 - DNA, 20 bp, Artificial Sequence
  Antisense compound
tgccaaacaattggcttatg

SEQ ID NO: 6159 - DNA, 20 bp, Artificial Sequence
  Antisense compound
gtgccaaacaattggcttat

SEQ ID NO: 6160 - DNA, 20 bp, Artificial Sequence
  Antisense compound
tgtgccaaacaattggctta

SEQ ID NO: 6161 - DNA, 20 bp, Artificial Sequence
  Antisense compound
atgtgccaaacaattggctt

SEQ ID NO: 6162 - DNA, 20 bp, Artificial Sequence
  Antisense compound
aatgtgccaaacaattggct

SEQ ID NO: 6163 - DNA, 20 bp, Artificial Sequence
  Antisense compound
taatgtgccaaacaattggc

SEQ ID NO: 6164 - DNA, 20 bp, Artificial Sequence
  Antisense compound
ttaatgtgccaaacaattgg

SEQ ID NO: 6165 - DNA, 20 bp, Artificial Sequence
  Antisense compound
gttaatgtgccaaacaattg

SEQ ID NO: 6166 - DNA, 20 bp, Artificial Sequence
  Antisense compound
ggttaatgtgccaaacaatt

SEQ ID NO: 6167 - DNA, 20 bp, Artificial Sequence
  Antisense compound
tggttaatgtgccaaacaat

SEQ ID NO: 6168 - DNA, 20 bp, Artificial Sequence
  Antisense compound
ctggttaatgtgccaaacaa

SEQ ID NO: 6169 - DNA, 20 bp, Artificial Sequence
  Antisense compound
cctggttaatgtgccaaaca

SEQ ID NO: 6170 - DNA, 20 bp, Artificial Sequence
  Antisense compound
gcctggttaatgtgccaaac

SEQ ID NO: 6171 - DNA, 20 bp, Artificial Sequence
  Antisense compound
agcctggttaatgtgccaaa

SEQ ID NO: 6172 - DNA, 20 bp, Artificial Sequence
  Antisense compound
tagcctggttaatgtgccaa

SEQ ID NO: 6173 - DNA, 20 bp, Artificial Sequence
  Antisense compound
gtagcctggttaatgtgcca

SEQ ID NO: 6174 - DNA, 20 bp, Artificial Sequence
  Antisense compound
tgtagcctggttaatgtgcc

SEQ ID NO: 6175 - DNA, 20 bp, Artificial Sequence
  Antisense compound
ttgtagcctggttaatgtgc

SEQ ID NO: 6176 - DNA, 20 bp, Artificial Sequence
  Antisense compound
gttgtagcctggttaatgtg

SEQ ID NO: 6177 - DNA, 20 bp, Artificial Sequence
  Antisense compound
ggttgtagcctggttaatgt

SEQ ID NO: 6178 - DNA, 20 bp, Artificial Sequence
  Antisense compound
tggttgtagcctggttaatg

SEQ ID NO: 6179 - DNA, 20 bp, Artificial Sequence
  Antisense compound
ttggttgtagcctggttaat

SEQ ID NO: 6180 - DNA, 20 bp, Artificial Sequence
  Antisense compound
cttggttgtagcctggttaa

SEQ ID NO: 6181 - DNA, 20 bp, Artificial Sequence
  Antisense compound
tcttggttgtagcctggtta

SEQ ID NO: 6182 - DNA, 20 bp, Artificial Sequence
  Antisense compound
gtcttggttgtagcctggtt

SEQ ID NO: 6183 - DNA, 20 bp, Artificial Sequence
  Antisense compound
tgtcttggttgtagcctggt

SEQ ID NO: 6184 - DNA, 20 bp, Artificial Sequence
  Antisense compound
ttgtcttggttgtagcctgg

SEQ ID NO: 6185 - DNA, 20 bp, Artificial Sequence
  Antisense compound
gttgtcttggttgtagcctg

SEQ ID NO: 6186 - DNA, 20 bp, Artificial Sequence
  Antisense compound
cgttgtcttggttgtagcct

SEQ ID NO: 6187 - DNA, 20 bp, Artificial Sequence
  Antisense compound
acgttgtcttggttgtagcc

SEQ ID NO: 6188 - DNA, 20 bp, Artificial Sequence
  Antisense compound
aacgttgtcttggttgtagc

SEQ ID NO: 6189 - DNA, 20 bp, Artificial Sequence
  Antisense compound
gaacgttgtcttggttgtag

SEQ ID NO: 6190 - DNA, 20 bp, Artificial Sequence
  Antisense compound
tgaacgttgtcttggttgta

SEQ ID NO: 6191 - DNA, 20 bp, Artificial Sequence
  Antisense compound
ttgaacgttgtcttggttgt

SEQ ID NO: 6192 - DNA, 20 bp, Artificial Sequence
  Antisense compound
tttgaacgttgtcttggttg

SEQ ID NO: 6193 - DNA, 20 bp, Artificial Sequence
  Antisense compound
gtttgaacgttgtcttggtt

SEQ ID NO: 6194 - DNA, 20 bp, Artificial Sequence
  Antisense compound
ggtttgaacgttgtcttggt

SEQ ID NO: 6195 - DNA, 20 bp, Artificial Sequence
  Antisense compound
tggtttgaacgttgtcttgg

SEQ ID NO: 6196 - DNA, 20 bp, Artificial Sequence
  Antisense compound
ttggtttgaacgttgtcttg

SEQ ID NO: 6197 - DNA, 20 bp, Artificial Sequence
  Antisense compound
tttggtttgaacgttgtctt

SEQ ID NO: 6198 - DNA, 20 bp, Artificial Sequence
  Antisense compound
gtttggtttgaacgttgtct

SEQ ID NO: 6199 - DNA, 20 bp, Artificial Sequence
  Antisense compound
tgtttggtttgaacgttgtc

SEQ ID NO: 6200 - DNA, 20 bp, Artificial Sequence
  Antisense compound
gtgtttggtttgaacgttgt

SEQ ID NO: 6201 - DNA, 20 bp, Artificial Sequence
  Antisense compound
agtgtttggtttgaacgttg

SEQ ID NO: 6202 - DNA, 20 bp, Artificial Sequence
  Antisense compound
aagtgtttggtttgaacgtt

SEQ ID NO: 6203 - DNA, 20 bp, Artificial Sequence
  Antisense compound
caagtgtttggtttgaacgt

SEQ ID NO: 6204 - DNA, 20 bp, Artificial Sequence
  Antisense compound
ccaagtgtttggtttgaacg

SEQ ID NO: 6205 - DNA, 20 bp, Artificial Sequence
  Antisense compound
accaagtgtttggtttgaac

SEQ ID NO: 6206 - DNA, 20 bp, Artificial Sequence
  Antisense compound
caccaagtgtttggtttgaa

SEQ ID NO: 6207 - DNA, 20 bp, Artificial Sequence
  Antisense compound
acaccaagtgtttggtttga

SEQ ID NO: 6208 - DNA, 20 bp, Artificial Sequence
  Antisense compound
aacaccaagtgtttggtttg

SEQ ID NO: 6209 - DNA, 20 bp, Artificial Sequence
  Antisense compound
aaacaccaagtgtttggttt

SEQ ID NO: 6210 - DNA, 20 bp, Artificial Sequence
  Antisense compound
taaacaccaagtgtttggtt

SEQ ID NO: 6211 - DNA, 20 bp, Artificial Sequence
  Antisense compound
gtaaacaccaagtgtttggt

SEQ ID NO: 6212 - DNA, 20 bp, Artificial Sequence
  Antisense compound
cgtaaacaccaagtgtttgg

SEQ ID NO: 6213 - DNA, 20 bp, Artificial Sequence
  Antisense compound
acgtaaacaccaagtgtttg

SEQ ID NO: 6214 - DNA, 20 bp, Artificial Sequence
  Antisense compound
aacgtaaacaccaagtgttt

SEQ ID NO: 6215 - DNA, 20 bp, Artificial Sequence
  Antisense compound
caacgtaaacaccaagtgtt

SEQ ID NO: 6216 - DNA, 20 bp, Artificial Sequence
  Antisense compound
acaacgtaaacaccaagtgt

SEQ ID NO: 6217 - DNA, 20 bp, Artificial Sequence
  Antisense compound
gacaacgtaaacaccaagtg

SEQ ID NO: 6218 - DNA, 20 bp, Artificial Sequence
  Antisense compound
agacaacgtaaacaccaagt

SEQ ID NO: 6219 - DNA, 20 bp, Artificial Sequence
  Antisense compound
aagacaacgtaaacaccaag

SEQ ID NO: 6220 - DNA, 20 bp, Artificial Sequence
  Antisense compound
aaagacaacgtaaacaccaa

SEQ ID NO: 6221 - DNA, 20 bp, Artificial Sequence
  Antisense compound
caaagacaacgtaaacacca

SEQ ID NO: 6222 - DNA, 20 bp, Artificial Sequence
  Antisense compound
ccaaagacaacgtaaacacc

SEQ ID NO: 6223 - DNA, 20 bp, Artificial Sequence
  Antisense compound
tccaaagacaacgtaaacac

SEQ ID NO: 6224 - DNA, 20 bp, Artificial Sequence
  Antisense compound
ctccaaagacaacgtaaaca

SEQ ID NO: 6225 - DNA, 20 bp, Artificial Sequence
  Antisense compound
actccaaagacaacgtaaac

SEQ ID NO: 6226 - DNA, 20 bp, Artificial Sequence
  Antisense compound
tactccaaagacaacgtaaa

SEQ ID NO: 6227 - DNA, 20 bp, Artificial Sequence
  Antisense compound
gtactccaaagacaacgtaa

SEQ ID NO: 6228 - DNA, 20 bp, Artificial Sequence
  Antisense compound
tgtactccaaagacaacgta

SEQ ID NO: 6229 - DNA, 20 bp, Artificial Sequence
  Antisense compound
ttgtactccaaagacaacgt

SEQ ID NO: 6230 - DNA, 20 bp, Artificial Sequence
  Antisense compound
tttgtactccaaagacaacg

SEQ ID NO: 6231 - DNA, 20 bp, Artificial Sequence
  Antisense compound
ctttgtactccaaagacaac

SEQ ID NO: 6232 - DNA, 20 bp, Artificial Sequence
  Antisense compound
gctttgtactccaaagacaa

SEQ ID NO: 6233 - DNA, 20 bp, Artificial Sequence
  Antisense compound
ggctttgtactccaaagaca

SEQ ID NO: 6234 - DNA, 20 bp, Artificial Sequence
  Antisense compound
tggctttgtactccaaagac

SEQ ID NO: 6235 - DNA, 20 bp, Artificial Sequence
  Antisense compound
ctggctttgtactccaaaga

SEQ ID NO: 6236 - DNA, 20 bp, Artificial Sequence
  Antisense compound
actggctttgtactccaaag

SEQ ID NO: 6237 - DNA, 20 bp, Artificial Sequence
  Antisense compound
tactggctttgtactccaaa

SEQ ID NO: 6238 - DNA, 20 bp, Artificial Sequence
  Antisense compound
ctactggctttgtactccaa

SEQ ID NO: 6239 - DNA, 20 bp, Artificial Sequence
  Antisense compound
tctactggctttgtactcca

SEQ ID NO: 6240 - DNA, 20 bp, Artificial Sequence
  Antisense compound
atctactggctttgtactcc

SEQ ID NO: 6241 - DNA, 20 bp, Artificial Sequence
  Antisense compound
tatctactggctttgtactc

SEQ ID NO: 6242 - DNA, 20 bp, Artificial Sequence
  Antisense compound
gtatctactggctttgtact

SEQ ID NO: 6243 - DNA, 20 bp, Artificial Sequence
  Antisense compound
agtatctactggctttgtac

SEQ ID NO: 6244 - DNA, 20 bp, Artificial Sequence
  Antisense compound
aagtatctactggctttgta

SEQ ID NO: 6245 - DNA, 20 bp, Artificial Sequence
  Antisense compound
gaagtatctactggctttgt

SEQ ID NO: 6246 - DNA, 20 bp, Artificial Sequence
  Antisense compound
tgaagtatctactggctttg

SEQ ID NO: 6247 - DNA, 20 bp, Artificial Sequence
  Antisense compound
ttgaagtatctactggcttt

SEQ ID NO: 6248 - DNA, 20 bp, Artificial Sequence
  Antisense compound
tttgaagtatctactggctt

SEQ ID NO: 6249 - DNA, 20 bp, Artificial Sequence
  Antisense compound
atttgaagtatctactggct

SEQ ID NO: 6250 - DNA, 20 bp, Artificial Sequence
  Antisense compound
aatttgaagtatctactggc

SEQ ID NO: 6251 - DNA, 20 bp, Artificial Sequence
  Antisense compound
gaatttgaagtatctactgg

SEQ ID NO: 6252 - DNA, 20 bp, Artificial Sequence
  Antisense compound
tgaatttgaagtatctactg

SEQ ID NO: 6253 - DNA, 20 bp, Artificial Sequence
  Antisense compound
atgaatttgaagtatctact

SEQ ID NO: 6254 - DNA, 20 bp, Artificial Sequence
  Antisense compound
aatgaatttgaagtatctac

SEQ ID NO: 6255 - DNA, 20 bp, Artificial Sequence
  Antisense compound
aaatgaatttgaagtatcta

SEQ ID NO: 6256 - DNA, 20 bp, Artificial Sequence
  Antisense compound
caaatgaatttgaagtatct

SEQ ID NO: 6257 - DNA, 20 bp, Artificial Sequence
  Antisense compound
tcaaatgaatttgaagtatc

SEQ ID NO: 6258 - DNA, 20 bp, Artificial Sequence
  Antisense compound
ttcaaatgaatttgaagtat

SEQ ID NO: 6259 - DNA, 20 bp, Artificial Sequence
  Antisense compound
cttcaaatgaatttgaagta

SEQ ID NO: 6260 - DNA, 20 bp, Artificial Sequence
  Antisense compound
acttcaaatgaatttgaagt

SEQ ID NO: 6261 - DNA, 20 bp, Artificial Sequence
  Antisense compound
aacttcaaatgaatttgaag

SEQ ID NO: 6262 - DNA, 20 bp, Artificial Sequence
  Antisense compound
gaacttcaaatgaatttgaa

SEQ ID NO: 6263 - DNA, 20 bp, Artificial Sequence
  Antisense compound
agaacttcaaatgaatttga

SEQ ID NO: 6264 - DNA, 20 bp, Artificial Sequence
  Antisense compound
cagaacttcaaatgaatttg

SEQ ID NO: 6265 - DNA, 20 bp, Artificial Sequence
  Antisense compound
ccagaacttcaaatgaattt

SEQ ID NO: 6266 - DNA, 20 bp, Artificial Sequence
  Antisense compound
gccagaacttcaaatgaatt

SEQ ID NO: 6267 - DNA, 20 bp, Artificial Sequence
  Antisense compound
tgccagaacttcaaatgaat

SEQ ID NO: 6268 - DNA, 20 bp, Artificial Sequence
  Antisense compound
ctgccagaacttcaaatgaa

SEQ ID NO: 6269 - DNA, 20 bp, Artificial Sequence
  Antisense compound
actgccagaacttcaaatga

SEQ ID NO: 6270 - DNA, 20 bp, Artificial Sequence
  Antisense compound
tactgccagaacttcaaatg

SEQ ID NO: 6271 - DNA, 20 bp, Artificial Sequence
  Antisense compound
ctactgccagaacttcaaat

SEQ ID NO: 6272 - DNA, 20 bp, Artificial Sequence
  Antisense compound
tctactgccagaacttcaaa

SEQ ID NO: 6273 - DNA, 20 bp, Artificial Sequence
  Antisense compound
ttctactgccagaacttcaa

SEQ ID NO: 6274 - DNA, 20 bp, Artificial Sequence
  Antisense compound
cttctactgccagaacttca

SEQ ID NO: 6275 - DNA, 20 bp, Artificial Sequence
  Antisense compound
tcttctactgccagaacttc

SEQ ID NO: 6276 - DNA, 20 bp, Artificial Sequence
  Antisense compound
gtcttctactgccagaactt

SEQ ID NO: 6277 - DNA, 20 bp, Artificial Sequence
  Antisense compound
tgtcttctactgccagaact

SEQ ID NO: 6278 - DNA, 20 bp, Artificial Sequence
  Antisense compound
gtgtcttctactgccagaac

SEQ ID NO: 6279 - DNA, 20 bp, Artificial Sequence
  Antisense compound
tgtgtcttctactgccagaa

SEQ ID NO: 6280 - DNA, 20 bp, Artificial Sequence
  Antisense compound
gtgtgtcttctactgccaga

SEQ ID NO: 6281 - DNA, 20 bp, Artificial Sequence
  Antisense compound
tgtgtgtcttctactgccag

SEQ ID NO: 6282 - DNA, 20 bp, Artificial Sequence
  Antisense compound
ttgtgtgtcttctactgcca

SEQ ID NO: 6283 - DNA, 20 bp, Artificial Sequence
  Antisense compound
cttgtgtgtcttctactgcc

SEQ ID NO: 6284 - DNA, 20 bp, Artificial Sequence
  Antisense compound
ccttgtgtgtcttctactgc

SEQ ID NO: 6285 - DNA, 20 bp, Artificial Sequence
  Antisense compound
tccttgtgtgtcttctactg

SEQ ID NO: 6286 - DNA, 20 bp, Artificial Sequence
  Antisense compound
ttccttgtgtgtcttctact

SEQ ID NO: 6287 - DNA, 20 bp, Artificial Sequence
  Antisense compound
attccttgtgtgtcttctac

SEQ ID NO: 6288 - DNA, 20 bp, Artificial Sequence
  Antisense compound
cattccttgtgtgtcttcta

SEQ ID NO: 6289 - DNA, 20 bp, Artificial Sequence
  Antisense compound
ccattccttgtgtgtcttct

SEQ ID NO: 6290 - DNA, 20 bp, Artificial Sequence
  Antisense compound
tccattccttgtgtgtcttc

SEQ ID NO: 6291 - DNA, 20 bp, Artificial Sequence
  Antisense compound
gtccattccttgtgtgtctt

SEQ ID NO: 6292 - DNA, 20 bp, Artificial Sequence
  Antisense compound
tgtccattccttgtgtgtct

SEQ ID NO: 6293 - DNA, 20 bp, Artificial Sequence
  Antisense compound
ttgtccattccttgtgtgtc

SEQ ID NO: 6294 - DNA, 20 bp, Artificial Sequence
  Antisense compound
attgtccattccttgtgtgt

SEQ ID NO: 6295 - DNA, 20 bp, Artificial Sequence
  Antisense compound
gattgtccattccttgtgtg

SEQ ID NO: 6296 - DNA, 20 bp, Artificial Sequence
  Antisense compound
agattgtccattccttgtgt

SEQ ID NO: 6297 - DNA, 20 bp, Artificial Sequence
  Antisense compound
aagattgtccattccttgtg

SEQ ID NO: 6298 - DNA, 20 bp, Artificial Sequence
  Antisense compound
caagattgtccattccttgt

SEQ ID NO: 6299 - DNA, 20 bp, Artificial Sequence
  Antisense compound
gcaagattgtccattccttg

SEQ ID NO: 6300 - DNA, 20 bp, Artificial Sequence
  Antisense compound
agcaagattgtccattcctt

SEQ ID NO: 6301 - DNA, 20 bp, Artificial Sequence
  Antisense compound
aagcaagattgtccattcct

SEQ ID NO: 6302 - DNA, 20 bp, Artificial Sequence
  Antisense compound
caagcaagattgtccattcc

SEQ ID NO: 6303 - DNA, 20 bp, Artificial Sequence
  Antisense compound
acaagcaagattgtccattc

SEQ ID NO: 6304 - DNA, 20 bp, Artificial Sequence
  Antisense compound
cacaagcaagattgtccatt

SEQ ID NO: 6305 - DNA, 20 bp, Artificial Sequence
  Antisense compound
tcacaagcaagattgtccat

SEQ ID NO: 6306 - DNA, 20 bp, Artificial Sequence
  Antisense compound
ttcacaagcaagattgtcca

SEQ ID NO: 6307 - DNA, 20 bp, Artificial Sequence
  Antisense compound
tttcacaagcaagattgtcc

SEQ ID NO: 6308 - DNA, 20 bp, Artificial Sequence
  Antisense compound
ctttcacaagcaagattgtc

SEQ ID NO: 6309 - DNA, 20 bp, Artificial Sequence
  Antisense compound
actttcacaagcaagattgt

SEQ ID NO: 6310 - DNA, 20 bp, Artificial Sequence
  Antisense compound
gactttcacaagcaagattg

SEQ ID NO: 6311 - DNA, 20 bp, Artificial Sequence
  Antisense compound
tgactttcacaagcaagatt

SEQ ID NO: 6312 - DNA, 20 bp, Artificial Sequence
  Antisense compound
ttgactttcacaagcaagat

SEQ ID NO: 6313 - DNA, 20 bp, Artificial Sequence
  Antisense compound
gttgactttcacaagcaaga

SEQ ID NO: 6314 - DNA, 20 bp, Artificial Sequence
  Antisense compound
tgttgactttcacaagcaag

SEQ ID NO: 6315 - DNA, 20 bp, Artificial Sequence
  Antisense compound
ttgttgactttcacaagcaa

SEQ ID NO: 6316 - DNA, 20 bp, Artificial Sequence
  Antisense compound
gttgttgactttcacaagca

SEQ ID NO: 6317 - DNA, 20 bp, Artificial Sequence
  Antisense compound
ggttgttgactttcacaagc

SEQ ID NO: 6318 - DNA, 20 bp, Artificial Sequence
  Antisense compound
gggttgttgactttcacaag

SEQ ID NO: 6319 - DNA, 20 bp, Artificial Sequence
  Antisense compound
tgggttgttgactttcacaa

SEQ ID NO: 6320 - DNA, 20 bp, Artificial Sequence
  Antisense compound
gtgggttgttgactttcaca

SEQ ID NO: 6321 - DNA, 20 bp, Artificial Sequence
  Antisense compound
ggtgggttgttgactttcac

SEQ ID NO: 6322 - DNA, 20 bp, Artificial Sequence
  Antisense compound
aggtgggttgttgactttca

SEQ ID NO: 6323 - DNA, 20 bp, Artificial Sequence
  Antisense compound
gaggtgggttgttgactttc

SEQ ID NO: 6324 - DNA, 20 bp, Artificial Sequence
  Antisense compound
agaggtgggttgttgacttt

SEQ ID NO: 6325 - DNA, 20 bp, Artificial Sequence
  Antisense compound
cagaggtgggttgttgactt

SEQ ID NO: 6326 - DNA, 20 bp, Artificial Sequence
  Antisense compound
tcagaggtgggttgttgact

SEQ ID NO: 6327 - DNA, 20 bp, Artificial Sequence
  Antisense compound
ttcagaggtgggttgttgac

SEQ ID NO: 6328 - DNA, 20 bp, Artificial Sequence
  Antisense compound
cttcagaggtgggttgttga

SEQ ID NO: 6329 - DNA, 20 bp, Artificial Sequence
  Antisense compound
tcttcagaggtgggttgttg

SEQ ID NO: 6330 - DNA, 20 bp, Artificial Sequence
  Antisense compound
ttcttcagaggtgggttgtt

SEQ ID NO: 6331 - DNA, 20 bp, Artificial Sequence
  Antisense compound
cttcttcagaggtgggttgt

SEQ ID NO: 6332 - DNA, 20 bp, Artificial Sequence
  Antisense compound
acttcttcagaggtgggttg

SEQ ID NO: 6333 - DNA, 20 bp, Artificial Sequence
  Antisense compound
tacttcttcagaggtgggtt

SEQ ID NO: 6334 - DNA, 20 bp, Artificial Sequence
  Antisense compound
ctacttcttcagaggtgggt

SEQ ID NO: 6335 - DNA, 20 bp, Artificial Sequence
  Antisense compound
actacttcttcagaggtggg

SEQ ID NO: 6336 - DNA, 20 bp, Artificial Sequence
  Antisense compound
cactacttcttcagaggtgg

SEQ ID NO: 6337 - DNA, 20 bp, Artificial Sequence
  Antisense compound
ccactacttcttcagaggtg

SEQ ID NO: 6338 - DNA, 20 bp, Artificial Sequence
  Antisense compound
tccactacttcttcagaggt

SEQ ID NO: 6339 - DNA, 20 bp, Artificial Sequence
  Antisense compound
ttccactacttcttcagagg

SEQ ID NO: 6340 - DNA, 20 bp, Artificial Sequence
  Antisense compound
tttccactacttcttcagag

SEQ ID NO: 6341 - DNA, 20 bp, Artificial Sequence
  Antisense compound
ttttccactacttcttcaga

SEQ ID NO: 6342 - DNA, 20 bp, Artificial Sequence
  Antisense compound
attttccactacttcttcag

SEQ ID NO: 6343 - DNA, 20 bp, Artificial Sequence
  Antisense compound
gattttccactacttcttca

SEQ ID NO: 6344 - DNA, 20 bp, Artificial Sequence
  Antisense compound
ggattttccactacttcttc

SEQ ID NO: 6345 - DNA, 20 bp, Artificial Sequence
  Antisense compound
aggattttccactacttctt

SEQ ID NO: 6346 - DNA, 20 bp, Artificial Sequence
  Antisense compound
taggattttccactacttct

SEQ ID NO: 6347 - DNA, 20 bp, Artificial Sequence
  Antisense compound
gtaggattttccactacttc

SEQ ID NO: 6348 - DNA, 20 bp, Artificial Sequence
  Antisense compound
ggtaggattttccactactt

SEQ ID NO: 6349 - DNA, 20 bp, Artificial Sequence
  Antisense compound
tggtaggattttccactact

SEQ ID NO: 6350 - DNA, 20 bp, Artificial Sequence
  Antisense compound
atggtaggattttccactac

SEQ ID NO: 6351 - DNA, 20 bp, Artificial Sequence
  Antisense compound
tatggtaggattttccacta

SEQ ID NO: 6352 - DNA, 20 bp, Artificial Sequence
  Antisense compound
gtatggtaggattttccact

SEQ ID NO: 6353 - DNA, 20 bp, Artificial Sequence
  Antisense compound
tgtatggtaggattttccac

SEQ ID NO: 6354 - DNA, 20 bp, Artificial Sequence
  Antisense compound
ctgtatggtaggattttcca

SEQ ID NO: 6355 - DNA, 20 bp, Artificial Sequence
  Antisense compound
tctgtatggtaggattttcc

SEQ ID NO: 6356 - DNA, 20 bp, Artificial Sequence
  Antisense compound
ttctgtatggtaggattttc

SEQ ID NO: 6357 - DNA, 20 bp, Artificial Sequence
  Antisense compound
cttctgtatggtaggatttt

SEQ ID NO: 6358 - DNA, 20 bp, Artificial Sequence
  Antisense compound
ccttctgtatggtaggattt

SEQ ID NO: 6359 - DNA, 20 bp, Artificial Sequence
  Antisense compound
tccttctgtatggtaggatt

SEQ ID NO: 6360 - DNA, 20 bp, Artificial Sequence
  Antisense compound
ttccttctgtatggtaggat

SEQ ID NO: 6361 - DNA, 20 bp, Artificial Sequence
  Antisense compound
cttccttctgtatggtagga

SEQ ID NO: 6362 - DNA, 20 bp, Artificial Sequence
  Antisense compound
acttccttctgtatggtagg

SEQ ID NO: 6363 - DNA, 20 bp, Artificial Sequence
  Antisense compound
gacttccttctgtatggtag

SEQ ID NO: 6364 - DNA, 20 bp, Artificial Sequence
  Antisense compound
tgacttccttctgtatggta

SEQ ID NO: 6365 - DNA, 20 bp, Artificial Sequence
  Antisense compound
atgacttccttctgtatggt

SEQ ID NO: 6366 - DNA, 20 bp, Artificial Sequence
  Antisense compound
tatgacttccttctgtatgg

SEQ ID NO: 6367 - DNA, 20 bp, Artificial Sequence
  Antisense compound
ctatgacttccttctgtatg

SEQ ID NO: 6368 - DNA, 20 bp, Artificial Sequence
  Antisense compound
tctatgacttccttctgtat

SEQ ID NO: 6369 - DNA, 20 bp, Artificial Sequence
  Antisense compound
ctctatgacttccttctgta

SEQ ID NO: 6370 - DNA, 20 bp, Artificial Sequence
  Antisense compound
actctatgacttccttctgt

SEQ ID NO: 6371 - DNA, 20 bp, Artificial Sequence
  Antisense compound
cactctatgacttccttctg

SEQ ID NO: 6372 - DNA, 20 bp, Artificial Sequence
  Antisense compound
acactctatgacttccttct

SEQ ID NO: 6373 - DNA, 20 bp, Artificial Sequence
  Antisense compound
cacactctatgacttccttc

SEQ ID NO: 6374 - DNA, 20 bp, Artificial Sequence
  Antisense compound
tcacactctatgacttcctt

SEQ ID NO: 6375 - DNA, 20 bp, Artificial Sequence
  Antisense compound
gtcacactctatgacttcct

SEQ ID NO: 6376 - DNA, 20 bp, Artificial Sequence
  Antisense compound
cgtcacactctatgacttcc

SEQ ID NO: 6377 - DNA, 20 bp, Artificial Sequence
  Antisense compound
acgtcacactctatgacttc

SEQ ID NO: 6378 - DNA, 20 bp, Artificial Sequence
  Antisense compound
cacgtcacactctatgactt

SEQ ID NO: 6379 - DNA, 20 bp, Artificial Sequence
  Antisense compound
tcacgtcacactctatgact

SEQ ID NO: 6380 - DNA, 20 bp, Artificial Sequence
  Antisense compound
ttcacgtcacactctatgac

SEQ ID NO: 6381 - DNA, 20 bp, Artificial Sequence
  Antisense compound
tttcacgtcacactctatga

SEQ ID NO: 6382 - DNA, 20 bp, Artificial Sequence
  Antisense compound
ttttcacgtcacactctatg

SEQ ID NO: 6383 - DNA, 20 bp, Artificial Sequence
  Antisense compound
gttttcacgtcacactctat

SEQ ID NO: 6384 - DNA, 20 bp, Artificial Sequence
  Antisense compound
agttttcacgtcacactcta

SEQ ID NO: 6385 - DNA, 20 bp, Artificial Sequence
  Antisense compound
tagttttcacgtcacactct

SEQ ID NO: 6386 - DNA, 20 bp, Artificial Sequence
  Antisense compound
gtagttttcacgtcacactc

SEQ ID NO: 6387 - DNA, 20 bp, Artificial Sequence
  Antisense compound
ggtagttttcacgtcacact

SEQ ID NO: 6388 - DNA, 20 bp, Artificial Sequence
  Antisense compound
cggtagttttcacgtcacac

SEQ ID NO: 6389 - DNA, 20 bp, Artificial Sequence
  Antisense compound
tcggtagttttcacgtcaca

SEQ ID NO: 6390 - DNA, 20 bp, Artificial Sequence
  Antisense compound
ttcggtagttttcacgtcac

SEQ ID NO: 6391 - DNA, 20 bp, Artificial Sequence
  Antisense compound
cttcggtagttttcacgtca

SEQ ID NO: 6392 - DNA, 20 bp, Artificial Sequence
  Antisense compound
acttcggtagttttcacgtc

SEQ ID NO: 6393 - DNA, 20 bp, Artificial Sequence
  Antisense compound
aacttcggtagttttcacgt

SEQ ID NO: 6394 - DNA, 20 bp, Artificial Sequence
  Antisense compound
caacttcggtagttttcacg

SEQ ID NO: 6395 - DNA, 20 bp, Artificial Sequence
  Antisense compound
acaacttcggtagttttcac

SEQ ID NO: 6396 - DNA, 20 bp, Artificial Sequence
  Antisense compound
tacaacttcggtagttttca

SEQ ID NO: 6397 - DNA, 20 bp, Artificial Sequence
  Antisense compound
ctacaacttcggtagttttc

SEQ ID NO: 6398 - DNA, 20 bp, Artificial Sequence
  Antisense compound
cctacaacttcggtagtttt

SEQ ID NO: 6399 - DNA, 20 bp, Artificial Sequence
  Antisense compound
gcctacaacttcggtagttt

SEQ ID NO: 6400 - DNA, 20 bp, Artificial Sequence
  Antisense compound
tgcctacaacttcggtagtt

SEQ ID NO: 6401 - DNA, 20 bp, Artificial Sequence
  Antisense compound
ttgcctacaacttcggtagt

SEQ ID NO: 6402 - DNA, 20 bp, Artificial Sequence
  Antisense compound
attgcctacaacttcggtag

SEQ ID NO: 6403 - DNA, 20 bp, Artificial Sequence
  Antisense compound
cattgcctacaacttcggta

SEQ ID NO: 6404 - DNA, 20 bp, Artificial Sequence
  Antisense compound
acattgcctacaacttcggt

SEQ ID NO: 6405 - DNA, 20 bp, Artificial Sequence
  Antisense compound
gacattgcctacaacttcgg

SEQ ID NO: 6406 - DNA, 20 bp, Artificial Sequence
  Antisense compound
tgacattgcctacaacttcg

SEQ ID NO: 6407 - DNA, 20 bp, Artificial Sequence
  Antisense compound
atgacattgcctacaacttc

SEQ ID NO: 6408 - DNA, 20 bp, Artificial Sequence
  Antisense compound
tatgacattgcctacaactt

SEQ ID NO: 6409 - DNA, 20 bp, Artificial Sequence
  Antisense compound
gtatgacattgcctacaact

SEQ ID NO: 6410 - DNA, 20 bp, Artificial Sequence
  Antisense compound
agtatgacattgcctacaac

SEQ ID NO: 6411 - DNA, 20 bp, Artificial Sequence
  Antisense compound
aagtatgacattgcctacaa

SEQ ID NO: 6412 - DNA, 20 bp, Artificial Sequence
  Antisense compound
taagtatgacattgcctaca

SEQ ID NO: 6413 - DNA, 20 bp, Artificial Sequence
  Antisense compound
ttaagtatgacattgcctac

SEQ ID NO: 6414 - DNA, 20 bp, Artificial Sequence
  Antisense compound
tttaagtatgacattgccta

SEQ ID NO: 6415 - DNA, 20 bp, Artificial Sequence
  Antisense compound
gtttaagtatgacattgcct

SEQ ID NO: 6416 - DNA, 20 bp, Artificial Sequence
  Antisense compound
ggtttaagtatgacattgcc

SEQ ID NO: 6417 - DNA, 20 bp, Artificial Sequence
  Antisense compound
tggtttaagtatgacattgc

SEQ ID NO: 6418 - DNA, 20 bp, Artificial Sequence
  Antisense compound
atggtttaagtatgacattg

SEQ ID NO: 6419 - DNA, 20 bp, Artificial Sequence
  Antisense compound
gatggtttaagtatgacatt

SEQ ID NO: 6420 - DNA, 20 bp, Artificial Sequence
  Antisense compound
tgatggtttaagtatgacat

SEQ ID NO: 6421 - DNA, 20 bp, Artificial Sequence
  Antisense compound
ctgatggtttaagtatgaca

SEQ ID NO: 6422 - DNA, 20 bp, Artificial Sequence
  Antisense compound
tctgatggtttaagtatgac

SEQ ID NO: 6423 - DNA, 20 bp, Artificial Sequence
  Antisense compound
atctgatggtttaagtatga

SEQ ID NO: 6424 - DNA, 20 bp, Artificial Sequence
  Antisense compound
catctgatggtttaagtatg

SEQ ID NO: 6425 - DNA, 20 bp, Artificial Sequence
  Antisense compound
tcatctgatggtttaagtat

SEQ ID NO: 6426 - DNA, 20 bp, Artificial Sequence
  Antisense compound
ttcatctgatggtttaagta

SEQ ID NO: 6427 - DNA, 20 bp, Artificial Sequence
  Antisense compound
cttcatctgatggtttaagt

SEQ ID NO: 6428 - DNA, 20 bp, Artificial Sequence
  Antisense compound
ccttcatctgatggtttaag

SEQ ID NO: 6429 - DNA, 20 bp, Artificial Sequence
  Antisense compound
accttcatctgatggtttaa

SEQ ID NO: 6430 - DNA, 20 bp, Artificial Sequence
  Antisense compound
caccttcatctgatggttta

SEQ ID NO: 6431 - DNA, 20 bp, Artificial Sequence
  Antisense compound
acaccttcatctgatggttt

SEQ ID NO: 6432 - DNA, 20 bp, Artificial Sequence
  Antisense compound
aacaccttcatctgatggtt

SEQ ID NO: 6433 - DNA, 20 bp, Artificial Sequence
  Antisense compound
taacaccttcatctgatggt

SEQ ID NO: 6434 - DNA, 20 bp, Artificial Sequence
  Antisense compound
ttaacaccttcatctgatgg

SEQ ID NO: 6435 - DNA, 20 bp, Artificial Sequence
  Antisense compound
tttaacaccttcatctgatg

SEQ ID NO: 6436 - DNA, 20 bp, Artificial Sequence
  Antisense compound
ctttaacaccttcatctgat

SEQ ID NO: 6437 - DNA, 20 bp, Artificial Sequence
  Antisense compound
actttaacaccttcatctga

SEQ ID NO: 6438 - DNA, 20 bp, Artificial Sequence
  Antisense compound
tactttaacaccttcatctg

SEQ ID NO: 6439 - DNA, 20 bp, Artificial Sequence
  Antisense compound
ttactttaacaccttcatct

SEQ ID NO: 6440 - DNA, 20 bp, Artificial Sequence
  Antisense compound
gttactttaacaccttcatc

SEQ ID NO: 6441 - DNA, 20 bp, Artificial Sequence
  Antisense compound
tgttactttaacaccttcat

SEQ ID NO: 6442 - DNA, 20 bp, Artificial Sequence
  Antisense compound
gtgttactttaacaccttca

SEQ ID NO: 6443 - DNA, 20 bp, Artificial Sequence
  Antisense compound
tgtgttactttaacaccttc

SEQ ID NO: 6444 - DNA, 20 bp, Artificial Sequence
  Antisense compound
ttgtgttactttaacacctt

SEQ ID NO: 6445 - DNA, 20 bp, Artificial Sequence
  Antisense compound
cttgtgttactttaacacct

SEQ ID NO: 6446 - DNA, 20 bp, Artificial Sequence
  Antisense compound
tcttgtgttactttaacacc

SEQ ID NO: 6447 - DNA, 20 bp, Artificial Sequence
  Antisense compound
ctcttgtgttactttaacac

SEQ ID NO: 6448 - DNA, 20 bp, Artificial Sequence
  Antisense compound
actcttgtgttactttaaca

SEQ ID NO: 6449 - DNA, 20 bp, Artificial Sequence
  Antisense compound
aactcttgtgttactttaac

SEQ ID NO: 6450 - DNA, 20 bp, Artificial Sequence
  Antisense compound
taactcttgtgttactttaa

SEQ ID NO: 6451 - DNA, 20 bp, Artificial Sequence
  Antisense compound
ctaactcttgtgttacttta

SEQ ID NO: 6452 - DNA, 20 bp, Artificial Sequence
  Antisense compound
cctaactcttgtgttacttt

SEQ ID NO: 6453 - DNA, 20 bp, Artificial Sequence
  Antisense compound
acctaactcttgtgttactt

SEQ ID NO: 6454 - DNA, 20 bp, Artificial Sequence
  Antisense compound
gacctaactcttgtgttact

SEQ ID NO: 6455 - DNA, 20 bp, Artificial Sequence
  Antisense compound
tgacctaactcttgtgttac

SEQ ID NO: 6456 - DNA, 20 bp, Artificial Sequence
  Antisense compound
atgacctaactcttgtgtta

SEQ ID NO: 6457 - DNA, 20 bp, Artificial Sequence
  Antisense compound
catgacctaactcttgtgtt

SEQ ID NO: 6458 - DNA, 20 bp, Artificial Sequence
  Antisense compound
tcatgacctaactcttgtgt

SEQ ID NO: 6459 - DNA, 20 bp, Artificial Sequence
  Antisense compound
ctcatgacctaactcttgtg

SEQ ID NO: 6460 - DNA, 20 bp, Artificial Sequence
  Antisense compound
cctcatgacctaactcttgt

SEQ ID NO: 6461 - DNA, 20 bp, Artificial Sequence
  Antisense compound
tcctcatgacctaactcttg

SEQ ID NO: 6462 - DNA, 20 bp, Artificial Sequence
  Antisense compound
atcctcatgacctaactctt

SEQ ID NO: 6463 - DNA, 20 bp, Artificial Sequence
  Antisense compound
gatcctcatgacctaactct

SEQ ID NO: 6464 - DNA, 20 bp, Artificial Sequence
  Antisense compound
agatcctcatgacctaactc

SEQ ID NO: 6465 - DNA, 20 bp, Artificial Sequence
  Antisense compound
aagatcctcatgacctaact

SEQ ID NO: 6466 - DNA, 20 bp, Artificial Sequence
  Antisense compound
taagatcctcatgacctaac

SEQ ID NO: 6467 - DNA, 20 bp, Artificial Sequence
  Antisense compound
ataagatcctcatgacctaa

SEQ ID NO: 6468 - DNA, 20 bp, Artificial Sequence
  Antisense compound
cataagatcctcatgaccta

SEQ ID NO: 6469 - DNA, 20 bp, Artificial Sequence
  Antisense compound
ccataagatcctcatgacct

SEQ ID NO: 6470 - DNA, 20 bp, Artificial Sequence
  Antisense compound
gccataagatcctcatgacc

SEQ ID NO: 6471 - DNA, 20 bp, Artificial Sequence
  Antisense compound
agccataagatcctcatgac

SEQ ID NO: 6472 - DNA, 20 bp, Artificial Sequence
  Antisense compound
cagccataagatcctcatga

SEQ ID NO: 6473 - DNA, 20 bp, Artificial Sequence
  Antisense compound
gcagccataagatcctcatg

SEQ ID NO: 6474 - DNA, 20 bp, Artificial Sequence
  Antisense compound
agcagccataagatcctcat

SEQ ID NO: 6475 - DNA, 20 bp, Artificial Sequence
  Antisense compound
aagcagccataagatcctca

SEQ ID NO: 6476 - DNA, 20 bp, Artificial Sequence
  Antisense compound
taagcagccataagatcctc

SEQ ID NO: 6477 - DNA, 20 bp, Artificial Sequence
  Antisense compound
ataagcagccataagatcct

SEQ ID NO: 6478 - DNA, 20 bp, Artificial Sequence
  Antisense compound
cataagcagccataagatcc

SEQ ID NO: 6479 - DNA, 20 bp, Artificial Sequence
  Antisense compound
acataagcagccataagatc

SEQ ID NO: 6480 - DNA, 20 bp, Artificial Sequence
  Antisense compound
cacataagcagccataagat

SEQ ID NO: 6481 - DNA, 20 bp, Artificial Sequence
  Antisense compound
ccacataagcagccataaga

SEQ ID NO: 6482 - DNA, 20 bp, Artificial Sequence
  Antisense compound
tccacataagcagccataag

SEQ ID NO: 6483 - DNA, 20 bp, Artificial Sequence
  Antisense compound
ttccacataagcagccataa

SEQ ID NO: 6484 - DNA, 20 bp, Artificial Sequence
  Antisense compound
tttccacataagcagccata

SEQ ID NO: 6485 - DNA, 20 bp, Artificial Sequence
  Antisense compound
ttttccacataagcagccat

SEQ ID NO: 6486 - DNA, 20 bp, Artificial Sequence
  Antisense compound
gttttccacataagcagcca

SEQ ID NO: 6487 - DNA, 20 bp, Artificial Sequence
  Antisense compound
tgttttccacataagcagcc

SEQ ID NO: 6488 - DNA, 20 bp, Artificial Sequence
  Antisense compound
gtgttttccacataagcagc

SEQ ID NO: 6489 - DNA, 20 bp, Artificial Sequence
  Antisense compound
tgtgttttccacataagcag

SEQ ID NO: 6490 - DNA, 20 bp, Artificial Sequence
  Antisense compound
ttgtgttttccacataagca

SEQ ID NO: 6491 - DNA, 20 bp, Artificial Sequence
  Antisense compound
cttgtgttttccacataagc

SEQ ID NO: 6492 - DNA, 20 bp, Artificial Sequence
  Antisense compound
gcttgtgttttccacataag

SEQ ID NO: 6493 - DNA, 20 bp, Artificial Sequence
  Antisense compound
tgcttgtgttttccacataa

SEQ ID NO: 6494 - DNA, 20 bp, Artificial Sequence
  Antisense compound
atgcttgtgttttccacata

SEQ ID NO: 6495 - DNA, 20 bp, Artificial Sequence
  Antisense compound
aatgcttgtgttttccacat

SEQ ID NO: 6496 - DNA, 20 bp, Artificial Sequence
  Antisense compound
taatgcttgtgttttccaca

SEQ ID NO: 6497 - DNA, 20 bp, Artificial Sequence
  Antisense compound
gtaatgcttgtgttttccac

SEQ ID NO: 6498 - DNA, 20 bp, Artificial Sequence
  Antisense compound
ggtaatgcttgtgttttcca

SEQ ID NO: 6499 - DNA, 20 bp, Artificial Sequence
  Antisense compound
tggtaatgcttgtgttttcc

SEQ ID NO: 6500 - DNA, 20 bp, Artificial Sequence
  Antisense compound
atggtaatgcttgtgttttc

SEQ ID NO: 6501 - DNA, 20 bp, Artificial Sequence
  Antisense compound
aatggtaatgcttgtgtttt

SEQ ID NO: 6502 - DNA, 20 bp, Artificial Sequence
  Antisense compound
taatggtaatgcttgtgttt

SEQ ID NO: 6503 - DNA, 20 bp, Artificial Sequence
  Antisense compound
ttaatggtaatgcttgtgtt

SEQ ID NO: 6504 - DNA, 20 bp, Artificial Sequence
  Antisense compound
cttaatggtaatgcttgtgt

SEQ ID NO: 6505 - DNA, 20 bp, Artificial Sequence
  Antisense compound
tcttaatggtaatgcttgtg

SEQ ID NO: 6506 - DNA, 20 bp, Artificial Sequence
  Antisense compound
ttcttaatggtaatgcttgt

SEQ ID NO: 6507 - DNA, 20 bp, Artificial Sequence
  Antisense compound
tttcttaatggtaatgcttg

SEQ ID NO: 6508 - DNA, 20 bp, Artificial Sequence
  Antisense compound
gtttcttaatggtaatgctt

SEQ ID NO: 6509 - DNA, 20 bp, Artificial Sequence
  Antisense compound
ggtttcttaatggtaatgct

SEQ ID NO: 6510 - DNA, 20 bp, Artificial Sequence
  Antisense compound
aggtttcttaatggtaatgc

SEQ ID NO: 6511 - DNA, 20 bp, Artificial Sequence
  Antisense compound
taggtttcttaatggtaatg

SEQ ID NO: 6512 - DNA, 20 bp, Artificial Sequence
  Antisense compound
ttaggtttcttaatggtaat

SEQ ID NO: 6513 - DNA, 20 bp, Artificial Sequence
  Antisense compound
attaggtttcttaatggtaa

SEQ ID NO: 6514 - DNA, 20 bp, Artificial Sequence
  Antisense compound
cattaggtttcttaatggta

SEQ ID NO: 6515 - DNA, 20 bp, Artificial Sequence
  Antisense compound
tcattaggtttcttaatggt

SEQ ID NO: 6516 - DNA, 20 bp, Artificial Sequence
  Antisense compound
ctcattaggtttcttaatgg

SEQ ID NO: 6517 - DNA, 20 bp, Artificial Sequence
  Antisense compound
gctcattaggtttcttaatg

SEQ ID NO: 6518 - DNA, 20 bp, Artificial Sequence
  Antisense compound
agctcattaggtttcttaat

SEQ ID NO: 6519 - DNA, 20 bp, Artificial Sequence
  Antisense compound
aagctcattaggtttcttaa

SEQ ID NO: 6520 - DNA, 20 bp, Artificial Sequence
  Antisense compound
aaagctcattaggtttctta

SEQ ID NO: 6521 - DNA, 20 bp, Artificial Sequence
  Antisense compound
gaaagctcattaggtttctt

SEQ ID NO: 6522 - DNA, 20 bp, Artificial Sequence
  Antisense compound
tgaaagctcattaggtttct

SEQ ID NO: 6523 - DNA, 20 bp, Artificial Sequence
  Antisense compound
gtgaaagctcattaggtttc

SEQ ID NO: 6524 - DNA, 20 bp, Artificial Sequence
  Antisense compound
agtgaaagctcattaggttt

SEQ ID NO: 6525 - DNA, 20 bp, Artificial Sequence
  Antisense compound
tagtgaaagctcattaggtt

SEQ ID NO: 6526 - DNA, 20 bp, Artificial Sequence
  Antisense compound
ctagtgaaagctcattaggt

SEQ ID NO: 6527 - DNA, 20 bp, Artificial Sequence
  Antisense compound
gctagtgaaagctcattagg

SEQ ID NO: 6528 - DNA, 20 bp, Artificial Sequence
  Antisense compound
ggctagtgaaagctcattag

SEQ ID NO: 6529 - DNA, 20 bp, Artificial Sequence
  Antisense compound
aggctagtgaaagctcatta

SEQ ID NO: 6530 - DNA, 20 bp, Artificial Sequence
  Antisense compound
aaggctagtgaaagctcatt

SEQ ID NO: 6531 - DNA, 20 bp, Artificial Sequence
  Antisense compound
taaggctagtgaaagctcat

SEQ ID NO: 6532 - DNA, 20 bp, Artificial Sequence
  Antisense compound
ctaaggctagtgaaagctca

SEQ ID NO: 6533 - DNA, 20 bp, Artificial Sequence
  Antisense compound
cctaaggctagtgaaagctc

SEQ ID NO: 6534 - DNA, 20 bp, Artificial Sequence
  Antisense compound
acctaaggctagtgaaagct

SEQ ID NO: 6535 - DNA, 20 bp, Artificial Sequence
  Antisense compound
aacctaaggctagtgaaagc

SEQ ID NO: 6536 - DNA, 20 bp, Artificial Sequence
  Antisense compound
aaacctaaggctagtgaaag

SEQ ID NO: 6537 - DNA, 20 bp, Artificial Sequence
  Antisense compound
taaacctaaggctagtgaaa

SEQ ID NO: 6538 - DNA, 20 bp, Artificial Sequence
  Antisense compound
ttaaacctaaggctagtgaa

SEQ ID NO: 6539 - DNA, 20 bp, Artificial Sequence
  Antisense compound
tttaaacctaaggctagtga

SEQ ID NO: 6540 - DNA, 20 bp, Artificial Sequence
  Antisense compound
ttttaaacctaaggctagtg

SEQ ID NO: 6541 - DNA, 20 bp, Artificial Sequence
  Antisense compound
tttttaaacctaaggctagt

SEQ ID NO: 6542 - DNA, 20 bp, Artificial Sequence
  Antisense compound
gtttttaaacctaaggctag

SEQ ID NO: 6543 - DNA, 20 bp, Artificial Sequence
  Antisense compound
tgtttttaaacctaaggcta

SEQ ID NO: 6544 - DNA, 20 bp, Artificial Sequence
  Antisense compound
ttgtttttaaacctaaggct

SEQ ID NO: 6545 - DNA, 20 bp, Artificial Sequence
  Antisense compound
attgtttttaaacctaaggc

SEQ ID NO: 6546 - DNA, 20 bp, Artificial Sequence
  Antisense compound
aattgtttttaaacctaagg

SEQ ID NO: 6547 - DNA, 20 bp, Artificial Sequence
  Antisense compound
caattgtttttaaacctaag

SEQ ID NO: 6548 - DNA, 20 bp, Artificial Sequence
  Antisense compound
gcaattgtttttaaacctaa

SEQ ID NO: 6549 - DNA, 20 bp, Artificial Sequence
  Antisense compound
ggcaattgtttttaaaccta

SEQ ID NO: 6550 - DNA, 20 bp, Artificial Sequence
  Antisense compound
tggcaattgtttttaaacct

SEQ ID NO: 6551 - DNA, 20 bp, Artificial Sequence
  Antisense compound
gtggcaattgtttttaaacc

SEQ ID NO: 6552 - DNA, 20 bp, Artificial Sequence
  Antisense compound
agtggcaattgtttttaaac

SEQ ID NO: 6553 - DNA, 20 bp, Artificial Sequence
  Antisense compound
gagtggcaattgtttttaaa

SEQ ID NO: 6554 - DNA, 20 bp, Artificial Sequence
  Antisense compound
tgagtggcaattgtttttaa

SEQ ID NO: 6555 - DNA, 20 bp, Artificial Sequence
  Antisense compound
atgagtggcaattgttttta

SEQ ID NO: 6556 - DNA, 20 bp, Artificial Sequence
  Antisense compound
catgagtggcaattgttttt

SEQ ID NO: 6557 - DNA, 20 bp, Artificial Sequence
  Antisense compound
ccatgagtggcaattgtttt

SEQ ID NO: 6558 - DNA, 20 bp, Artificial Sequence
  Antisense compound
accatgagtggcaattgttt

SEQ ID NO: 6559 - DNA, 20 bp, Artificial Sequence
  Antisense compound
taccatgagtggcaattgtt

SEQ ID NO: 6560 - DNA, 20 bp, Artificial Sequence
  Antisense compound
ataccatgagtggcaattgt

SEQ ID NO: 6561 - DNA, 20 bp, Artificial Sequence
  Antisense compound
aataccatgagtggcaattg

SEQ ID NO: 6562 - DNA, 20 bp, Artificial Sequence
  Antisense compound
caataccatgagtggcaatt

SEQ ID NO: 6563 - DNA, 20 bp, Artificial Sequence
  Antisense compound
gcaataccatgagtggcaat

SEQ ID NO: 6564 - DNA, 20 bp, Artificial Sequence
  Antisense compound
agcaataccatgagtggcaa

SEQ ID NO: 6565 - DNA, 20 bp, Artificial Sequence
  Antisense compound
cagcaataccatgagtggca

SEQ ID NO: 6566 - DNA, 20 bp, Artificial Sequence
  Antisense compound
gcagcaataccatgagtggc

SEQ ID NO: 6567 - DNA, 20 bp, Artificial Sequence
  Antisense compound
tgcagcaataccatgagtgg

SEQ ID NO: 6568 - DNA, 20 bp, Artificial Sequence
  Antisense compound
ttgcagcaataccatgagtg

SEQ ID NO: 6569 - DNA, 20 bp, Artificial Sequence
  Antisense compound
attgcagcaataccatgagt

SEQ ID NO: 6570 - DNA, 20 bp, Artificial Sequence
  Antisense compound
aattgcagcaataccatgag

SEQ ID NO: 6571 - DNA, 20 bp, Artificial Sequence
  Antisense compound
taattgcagcaataccatga

SEQ ID NO: 6572 - DNA, 20 bp, Artificial Sequence
  Antisense compound
ttaattgcagcaataccatg

SEQ ID NO: 6573 - DNA, 20 bp, Artificial Sequence
  Antisense compound
attaattgcagcaataccat

SEQ ID NO: 6574 - DNA, 20 bp, Artificial Sequence
  Antisense compound
tattaattgcagcaatacca

SEQ ID NO: 6575 - DNA, 20 bp, Artificial Sequence
  Antisense compound
ctattaattgcagcaatacc

SEQ ID NO: 6576 - DNA, 20 bp, Artificial Sequence
  Antisense compound
actattaattgcagcaatac

SEQ ID NO: 6577 - DNA, 20 bp, Artificial Sequence
  Antisense compound
cactattaattgcagcaata

SEQ ID NO: 6578 - DNA, 20 bp, Artificial Sequence
  Antisense compound
acactattaattgcagcaat

SEQ ID NO: 6579 - DNA, 20 bp, Artificial Sequence
  Antisense compound
aacactattaattgcagcaa

SEQ ID NO: 6580 - DNA, 20 bp, Artificial Sequence
  Antisense compound
gaacactattaattgcagca

SEQ ID NO: 6581 - DNA, 20 bp, Artificial Sequence
  Antisense compound
ggaacactattaattgcagc

SEQ ID NO: 6582 - DNA, 20 bp, Artificial Sequence
  Antisense compound
aggaacactattaattgcag

SEQ ID NO: 6583 - DNA, 20 bp, Artificial Sequence
  Antisense compound
aaggaacactattaattgca

SEQ ID NO: 6584 - DNA, 20 bp, Artificial Sequence
  Antisense compound
caaggaacactattaattgc

SEQ ID NO: 6585 - DNA, 20 bp, Artificial Sequence
  Antisense compound
ccaaggaacactattaattg

SEQ ID NO: 6586 - DNA, 20 bp, Artificial Sequence
  Antisense compound
tccaaggaacactattaatt

SEQ ID NO: 6587 - DNA, 20 bp, Artificial Sequence
  Antisense compound
ctccaaggaacactattaat

SEQ ID NO: 6588 - DNA, 20 bp, Artificial Sequence
  Antisense compound
actccaaggaacactattaa

SEQ ID NO: 6589 - DNA, 20 bp, Artificial Sequence
  Antisense compound
tactccaaggaacactatta

SEQ ID NO: 6590 - DNA, 20 bp, Artificial Sequence
  Antisense compound
ttactccaaggaacactatt

SEQ ID NO: 6591 - DNA, 20 bp, Artificial Sequence
  Antisense compound
tttactccaaggaacactat

SEQ ID NO: 6592 - DNA, 20 bp, Artificial Sequence
  Antisense compound
ttttactccaaggaacacta

SEQ ID NO: 6593 - DNA, 20 bp, Artificial Sequence
  Antisense compound
attttactccaaggaacact

SEQ ID NO: 6594 - DNA, 20 bp, Artificial Sequence
  Antisense compound
aattttactccaaggaacac

SEQ ID NO: 6595 - DNA, 20 bp, Artificial Sequence
  Antisense compound
aaattttactccaaggaaca

SEQ ID NO: 6596 - DNA, 20 bp, Artificial Sequence
  Antisense compound
aaaattttactccaaggaac

SEQ ID NO: 6597 - DNA, 20 bp, Artificial Sequence
  Antisense compound
caaaattttactccaaggaa

SEQ ID NO: 6598 - DNA, 20 bp, Artificial Sequence
  Antisense compound
ccaaaattttactccaagga

SEQ ID NO: 6599 - DNA, 20 bp, Artificial Sequence
  Antisense compound
gccaaaattttactccaagg

SEQ ID NO: 6600 - DNA, 20 bp, Artificial Sequence
  Antisense compound
agccaaaattttactccaag

SEQ ID NO: 6601 - DNA, 20 bp, Artificial Sequence
  Antisense compound
aagccaaaattttactccaa

SEQ ID NO: 6602 - DNA, 20 bp, Artificial Sequence
  Antisense compound
taagccaaaattttactcca

SEQ ID NO: 6603 - DNA, 20 bp, Artificial Sequence
  Antisense compound
ataagccaaaattttactcc

SEQ ID NO: 6604 - DNA, 20 bp, Artificial Sequence
  Antisense compound
cataagccaaaattttactc

SEQ ID NO: 6605 - DNA, 20 bp, Artificial Sequence
  Antisense compound
acataagccaaaattttact

SEQ ID NO: 6606 - DNA, 20 bp, Artificial Sequence
  Antisense compound
gacataagccaaaattttac

SEQ ID NO: 6607 - DNA, 20 bp, Artificial Sequence
  Antisense compound
tgacataagccaaaatttta

SEQ ID NO: 6608 - DNA, 20 bp, Artificial Sequence
  Antisense compound
ttgacataagccaaaatttt

SEQ ID NO: 6609 - DNA, 20 bp, Artificial Sequence
  Antisense compound
tttgacataagccaaaattt

SEQ ID NO: 6610 - DNA, 20 bp, Artificial Sequence
  Antisense compound
gtttgacataagccaaaatt

SEQ ID NO: 6611 - DNA, 20 bp, Artificial Sequence
  Antisense compound
ggtttgacataagccaaaat

SEQ ID NO: 6612 - DNA, 20 bp, Artificial Sequence
  Antisense compound
tggtttgacataagccaaaa

SEQ ID NO: 6613 - DNA, 20 bp, Artificial Sequence
  Antisense compound
atggtttgacataagccaaa

SEQ ID NO: 6614 - DNA, 20 bp, Artificial Sequence
  Antisense compound
aatggtttgacataagccaa

SEQ ID NO: 6615 - DNA, 20 bp, Artificial Sequence
  Antisense compound
gaatggtttgacataagcca

SEQ ID NO: 6616 - DNA, 20 bp, Artificial Sequence
  Antisense compound
agaatggtttgacataagcc

SEQ ID NO: 6617 - DNA, 20 bp, Artificial Sequence
  Antisense compound
aagaatggtttgacataagc

SEQ ID NO: 6618 - DNA, 20 bp, Artificial Sequence
  Antisense compound
taagaatggtttgacataag

SEQ ID NO: 6619 - DNA, 20 bp, Artificial Sequence
  Antisense compound
ctaagaatggtttgacataa

SEQ ID NO: 6620 - DNA, 20 bp, Artificial Sequence
  Antisense compound
cctaagaatggtttgacata

SEQ ID NO: 6621 - DNA, 20 bp, Artificial Sequence
  Antisense compound
tcctaagaatggtttgacat

SEQ ID NO: 6622 - DNA, 20 bp, Artificial Sequence
  Antisense compound
gtcctaagaatggtttgaca

SEQ ID NO: 6623 - DNA, 20 bp, Artificial Sequence
  Antisense compound
tgtcctaagaatggtttgac

SEQ ID NO: 6624 - DNA, 20 bp, Artificial Sequence
  Antisense compound
ttgtcctaagaatggtttga

SEQ ID NO: 6625 - DNA, 20 bp, Artificial Sequence
  Antisense compound
cttgtcctaagaatggtttg

SEQ ID NO: 6626 - DNA, 20 bp, Artificial Sequence
  Antisense compound
gcttgtcctaagaatggttt

SEQ ID NO: 6627 - DNA, 20 bp, Artificial Sequence
  Antisense compound
tgcttgtcctaagaatggtt

SEQ ID NO: 6628 - DNA, 20 bp, Artificial Sequence
  Antisense compound
ctgcttgtcctaagaatggt

SEQ ID NO: 6629 - DNA, 20 bp, Artificial Sequence
  Antisense compound
gctgcttgtcctaagaatgg

SEQ ID NO: 6630 - DNA, 20 bp, Artificial Sequence
  Antisense compound
tgctgcttgtcctaagaatg

SEQ ID NO: 6631 - DNA, 20 bp, Artificial Sequence
  Antisense compound
ttgctgcttgtcctaagaat

SEQ ID NO: 6632 - DNA, 20 bp, Artificial Sequence
  Antisense compound
attgctgcttgtcctaagaa

SEQ ID NO: 6633 - DNA, 20 bp, Artificial Sequence
  Antisense compound
aattgctgcttgtcctaaga

SEQ ID NO: 6634 - DNA, 20 bp, Artificial Sequence
  Antisense compound
taattgctgcttgtcctaag

SEQ ID NO: 6635 - DNA, 20 bp, Artificial Sequence
  Antisense compound
gtaattgctgcttgtcctaa

SEQ ID NO: 6636 - DNA, 20 bp, Artificial Sequence
  Antisense compound
tgtaattgctgcttgtccta

SEQ ID NO: 6637 - DNA, 20 bp, Artificial Sequence
  Antisense compound
ttgtaattgctgcttgtcct

SEQ ID NO: 6638 - DNA, 20 bp, Artificial Sequence
  Antisense compound
gttgtaattgctgcttgtcc

SEQ ID NO: 6639 - DNA, 20 bp, Artificial Sequence
  Antisense compound
tgttgtaattgctgcttgtc

SEQ ID NO: 6640 - DNA, 20 bp, Artificial Sequence
  Antisense compound
atgttgtaattgctgcttgt

SEQ ID NO: 6641 - DNA, 20 bp, Artificial Sequence
  Antisense compound
gatgttgtaattgctgcttg

SEQ ID NO: 6642 - DNA, 20 bp, Artificial Sequence
  Antisense compound
tgatgttgtaattgctgctt

SEQ ID NO: 6643 - DNA, 20 bp, Artificial Sequence
  Antisense compound
ttgatgttgtaattgctgct

SEQ ID NO: 6644 - DNA, 20 bp, Artificial Sequence
  Antisense compound
tttgatgttgtaattgctgc

SEQ ID NO: 6645 - DNA, 20 bp, Artificial Sequence
  Antisense compound
atttgatgttgtaattgctg

SEQ ID NO: 6646 - DNA, 20 bp, Artificial Sequence
  Antisense compound
aatttgatgttgtaattgct

SEQ ID NO: 6647 - DNA, 20 bp, Artificial Sequence
  Antisense compound
caatttgatgttgtaattgc

SEQ ID NO: 6648 - DNA, 20 bp, Artificial Sequence
  Antisense compound
gcaatttgatgttgtaattg

SEQ ID NO: 6649 - DNA, 20 bp, Artificial Sequence
  Antisense compound
cgcaatttgatgttgtaatt

SEQ ID NO: 6650 - DNA, 20 bp, Artificial Sequence
  Antisense compound
gcgcaatttgatgttgtaat

SEQ ID NO: 6651 - DNA, 20 bp, Artificial Sequence
  Antisense compound
agcgcaatttgatgttgtaa

SEQ ID NO: 6652 - DNA, 20 bp, Artificial Sequence
  Antisense compound
tagcgcaatttgatgttgta

SEQ ID NO: 6653 - DNA, 20 bp, Artificial Sequence
  Antisense compound
ttagcgcaatttgatgttgt

SEQ ID NO: 6654 - DNA, 20 bp, Artificial Sequence
  Antisense compound
cttagcgcaatttgatgttg

SEQ ID NO: 6655 - DNA, 20 bp, Artificial Sequence
  Antisense compound
tcttagcgcaatttgatgtt

SEQ ID NO: 6656 - DNA, 20 bp, Artificial Sequence
  Antisense compound
ctcttagcgcaatttgatgt

SEQ ID NO: 6657 - DNA, 20 bp, Artificial Sequence
  Antisense compound
tctcttagcgcaatttgatg

SEQ ID NO: 6658 - DNA, 20 bp, Artificial Sequence
  Antisense compound
atctcttagcgcaatttgat

SEQ ID NO: 6659 - DNA, 20 bp, Artificial Sequence
  Antisense compound
aatctcttagcgcaatttga

SEQ ID NO: 6660 - DNA, 20 bp, Artificial Sequence
  Antisense compound
taatctcttagcgcaatttg

SEQ ID NO: 6661 - DNA, 20 bp, Artificial Sequence
  Antisense compound
ctaatctcttagcgcaattt

SEQ ID NO: 6662 - DNA, 20 bp, Artificial Sequence
  Antisense compound
gctaatctcttagcgcaatt

SEQ ID NO: 6663 - DNA, 20 bp, Artificial Sequence
  Antisense compound
tgctaatctcttagcgcaat

SEQ ID NO: 6664 - DNA, 20 bp, Artificial Sequence
  Antisense compound
gtgctaatctcttagcgcaa

SEQ ID NO: 6665 - DNA, 20 bp, Artificial Sequence
  Antisense compound
tgtgctaatctcttagcgca

SEQ ID NO: 6666 - DNA, 20 bp, Artificial Sequence
  Antisense compound
ttgtgctaatctcttagcgc

SEQ ID NO: 6667 - DNA, 20 bp, Artificial Sequence
  Antisense compound
gttgtgctaatctcttagcg

SEQ ID NO: 6668 - DNA, 20 bp, Artificial Sequence
  Antisense compound
cgttgtgctaatctcttagc

SEQ ID NO: 6669 - DNA, 20 bp, Artificial Sequence
  Antisense compound
acgttgtgctaatctcttag

SEQ ID NO: 6670 - DNA, 20 bp, Artificial Sequence
  Antisense compound
cacgttgtgctaatctctta

SEQ ID NO: 6671 - DNA, 20 bp, Artificial Sequence
  Antisense compound
acacgttgtgctaatctctt

SEQ ID NO: 6672 - DNA, 20 bp, Artificial Sequence
  Antisense compound
cacacgttgtgctaatctct

SEQ ID NO: 6673 - DNA, 20 bp, Artificial Sequence
  Antisense compound
acacacgttgtgctaatctc

SEQ ID NO: 6674 - DNA, 20 bp, Artificial Sequence
  Antisense compound
aacacacgttgtgctaatct

SEQ ID NO: 6675 - DNA, 20 bp, Artificial Sequence
  Antisense compound
aaacacacgttgtgctaatc

SEQ ID NO: 6676 - DNA, 20 bp, Artificial Sequence
  Antisense compound
taaacacacgttgtgctaat

SEQ ID NO: 6677 - DNA, 20 bp, Artificial Sequence
  Antisense compound
ttaaacacacgttgtgctaa

SEQ ID NO: 6678 - DNA, 20 bp, Artificial Sequence
  Antisense compound
gttaaacacacgttgtgcta

SEQ ID NO: 6679 - DNA, 20 bp, Artificial Sequence
  Antisense compound
tgttaaacacacgttgtgct

SEQ ID NO: 6680 - DNA, 20 bp, Artificial Sequence
  Antisense compound
ttgttaaacacacgttgtgc

SEQ ID NO: 6681 - DNA, 20 bp, Artificial Sequence
  Antisense compound
attgttaaacacacgttgtg

SEQ ID NO: 6682 - DNA, 20 bp, Artificial Sequence
  Antisense compound
aattgttaaacacacgttgt

SEQ ID NO: 6683 - DNA, 20 bp, Artificial Sequence
  Antisense compound
taattgttaaacacacgttg

SEQ ID NO: 6684 - DNA, 20 bp, Artificial Sequence
  Antisense compound
ataattgttaaacacacgtt

SEQ ID NO: 6685 - DNA, 20 bp, Artificial Sequence
  Antisense compound
tataattgttaaacacacgt

SEQ ID NO: 6686 - DNA, 20 bp, Artificial Sequence
  Antisense compound
atataattgttaaacacacg

SEQ ID NO: 6687 - DNA, 20 bp, Artificial Sequence
  Antisense compound
catataattgttaaacacac

SEQ ID NO: 6688 - DNA, 20 bp, Artificial Sequence
  Antisense compound
gcatataattgttaaacaca

SEQ ID NO: 6689 - DNA, 20 bp, Artificial Sequence
  Antisense compound
ggcatataattgttaaacac

SEQ ID NO: 6690 - DNA, 20 bp, Artificial Sequence
  Antisense compound
aggcatataattgttaaaca

SEQ ID NO: 6691 - DNA, 20 bp, Artificial Sequence
  Antisense compound
aaggcatataattgttaaac

SEQ ID NO: 6692 - DNA, 20 bp, Artificial Sequence
  Antisense compound
taaggcatataattgttaaa

SEQ ID NO: 6693 - DNA, 20 bp, Artificial Sequence
  Antisense compound
ataaggcatataattgttaa

SEQ ID NO: 6694 - DNA, 20 bp, Artificial Sequence
  Antisense compound
cataaggcatataattgtta

SEQ ID NO: 6695 - DNA, 20 bp, Artificial Sequence
  Antisense compound
acataaggcatataattgtt

SEQ ID NO: 6696 - DNA, 20 bp, Artificial Sequence
  Antisense compound
cacataaggcatataattgt

SEQ ID NO: 6697 - DNA, 20 bp, Artificial Sequence
  Antisense compound
acacataaggcatataattg

SEQ ID NO: 6698 - DNA, 20 bp, Artificial Sequence
  Antisense compound
aacacataaggcatataatt

SEQ ID NO: 6699 - DNA, 20 bp, Artificial Sequence
  Antisense compound
aaacacataaggcatataat

SEQ ID NO: 6700 - DNA, 20 bp, Artificial Sequence
  Antisense compound
taaacacataaggcatataa

SEQ ID NO: 6701 - DNA, 20 bp, Artificial Sequence
  Antisense compound
gtaaacacataaggcatata

SEQ ID NO: 6702 - DNA, 20 bp, Artificial Sequence
  Antisense compound
tgtaaacacataaggcatat

SEQ ID NO: 6703 - DNA, 20 bp, Artificial Sequence
  Antisense compound
atgtaaacacataaggcata

SEQ ID NO: 6704 - DNA, 20 bp, Artificial Sequence
  Antisense compound
aatgtaaacacataaggcat

SEQ ID NO: 6705 - DNA, 20 bp, Artificial Sequence
  Antisense compound
taatgtaaacacataaggca

SEQ ID NO: 6706 - DNA, 20 bp, Artificial Sequence
  Antisense compound
ataatgtaaacacataaggc

SEQ ID NO: 6707 - DNA, 20 bp, Artificial Sequence
  Antisense compound
aataatgtaaacacataagg

SEQ ID NO: 6708 - DNA, 20 bp, Artificial Sequence
  Antisense compound
caataatgtaaacacataag

SEQ ID NO: 6709 - DNA, 20 bp, Artificial Sequence
  Antisense compound
acaataatgtaaacacataa

SEQ ID NO: 6710 - DNA, 20 bp, Artificial Sequence
  Antisense compound
aacaataatgtaaacacata

SEQ ID NO: 6711 - DNA, 20 bp, Artificial Sequence
  Antisense compound
gaacaataatgtaaacacat

SEQ ID NO: 6712 - DNA, 20 bp, Artificial Sequence
  Antisense compound
ggaacaataatgtaaacaca

SEQ ID NO: 6713 - DNA, 20 bp, Artificial Sequence
  Antisense compound
tggaacaataatgtaaacac

SEQ ID NO: 6714 - DNA, 20 bp, Artificial Sequence
  Antisense compound
ttggaacaataatgtaaaca

SEQ ID NO: 6715 - DNA, 20 bp, Artificial Sequence
  Antisense compound
attggaacaataatgtaaac

SEQ ID NO: 6716 - DNA, 20 bp, Artificial Sequence
  Antisense compound
aattggaacaataatgtaaa

SEQ ID NO: 6717 - DNA, 20 bp, Artificial Sequence
  Antisense compound
caattggaacaataatgtaa

SEQ ID NO: 6718 - DNA, 20 bp, Artificial Sequence
  Antisense compound
acaattggaacaataatgta

SEQ ID NO: 6719 - DNA, 20 bp, Artificial Sequence
  Antisense compound
cacaattggaacaataatgt

SEQ ID NO: 6720 - DNA, 20 bp, Artificial Sequence
  Antisense compound
acacaattggaacaataatg

SEQ ID NO: 6721 - DNA, 20 bp, Artificial Sequence
  Antisense compound
tacacaattggaacaataat

SEQ ID NO: 6722 - DNA, 20 bp, Artificial Sequence
  Antisense compound
gtacacaattggaacaataa

SEQ ID NO: 6723 - DNA, 20 bp, Artificial Sequence
  Antisense compound
agtacacaattggaacaata

SEQ ID NO: 6724 - DNA, 20 bp, Artificial Sequence
  Antisense compound
aagtacacaattggaacaat

SEQ ID NO: 6725 - DNA, 20 bp, Artificial Sequence
  Antisense compound
aaagtacacaattggaacaa

SEQ ID NO: 6726 - DNA, 20 bp, Artificial Sequence
  Antisense compound
aaaagtacacaattggaaca

SEQ ID NO: 6727 - DNA, 20 bp, Artificial Sequence
  Antisense compound
taaaagtacacaattggaac

SEQ ID NO: 6728 - DNA, 20 bp, Artificial Sequence
  Antisense compound
gtaaaagtacacaattggaa

SEQ ID NO: 6729 - DNA, 20 bp, Artificial Sequence
  Antisense compound
agtaaaagtacacaattgga

SEQ ID NO: 6730 - DNA, 20 bp, Artificial Sequence
  Antisense compound
tagtaaaagtacacaattgg

SEQ ID NO: 6731 - DNA, 20 bp, Artificial Sequence
  Antisense compound
ttagtaaaagtacacaattg

SEQ ID NO: 6732 - DNA, 20 bp, Artificial Sequence
  Antisense compound
tttagtaaaagtacacaatt

SEQ ID NO: 6733 - DNA, 20 bp, Artificial Sequence
  Antisense compound
ttttagtaaaagtacacaat

SEQ ID NO: 6734 - DNA, 20 bp, Artificial Sequence
  Antisense compound
cttttagtaaaagtacacaa

SEQ ID NO: 6735 - DNA, 20 bp, Artificial Sequence
  Antisense compound
acttttagtaaaagtacaca

SEQ ID NO: 6736 - DNA, 20 bp, Artificial Sequence
  Antisense compound
tacttttagtaaaagtacac

SEQ ID NO: 6737 - DNA, 20 bp, Artificial Sequence
  Antisense compound
gtacttttagtaaaagtaca

SEQ ID NO: 6738 - DNA, 20 bp, Artificial Sequence
  Antisense compound
ggtacttttagtaaaagtac

SEQ ID NO: 6739 - DNA, 20 bp, Artificial Sequence
  Antisense compound
tggtacttttagtaaaagta

SEQ ID NO: 6740 - DNA, 20 bp, Artificial Sequence
  Antisense compound
ttggtacttttagtaaaagt

SEQ ID NO: 6741 - DNA, 20 bp, Artificial Sequence
  Antisense compound
attggtacttttagtaaaag

SEQ ID NO: 6742 - DNA, 20 bp, Artificial Sequence
  Antisense compound
aattggtacttttagtaaaa

SEQ ID NO: 6743 - DNA, 20 bp, Artificial Sequence
  Antisense compound
gaattggtacttttagtaaa

SEQ ID NO: 6744 - DNA, 20 bp, Artificial Sequence
  Antisense compound
agaattggtacttttagtaa

SEQ ID NO: 6745 - DNA, 20 bp, Artificial Sequence
  Antisense compound
tagaattggtacttttagta

SEQ ID NO: 6746 - DNA, 20 bp, Artificial Sequence
  Antisense compound
ctagaattggtacttttagt

SEQ ID NO: 6747 - DNA, 20 bp, Artificial Sequence
  Antisense compound
tctagaattggtacttttag

SEQ ID NO: 6748 - DNA, 20 bp, Artificial Sequence
  Antisense compound
ttctagaattggtactttta

SEQ ID NO: 6749 - DNA, 20 bp, Artificial Sequence
  Antisense compound
attctagaattggtactttt

SEQ ID NO: 6750 - DNA, 20 bp, Artificial Sequence
  Antisense compound
aattctagaattggtacttt

SEQ ID NO: 6751 - DNA, 20 bp, Artificial Sequence
  Antisense compound
taattctagaattggtactt

SEQ ID NO: 6752 - DNA, 20 bp, Artificial Sequence
  Antisense compound
ctaattctagaattggtact

SEQ ID NO: 6753 - DNA, 20 bp, Artificial Sequence
  Antisense compound
tctaattctagaattggtac

SEQ ID NO: 6754 - DNA, 20 bp, Artificial Sequence
  Antisense compound
ctctaattctagaattggta

SEQ ID NO: 6755 - DNA, 20 bp, Artificial Sequence
  Antisense compound
gctctaattctagaattggt

SEQ ID NO: 6756 - DNA, 20 bp, Artificial Sequence
  Antisense compound
agctctaattctagaattgg

SEQ ID NO: 6757 - DNA, 20 bp, Artificial Sequence
  Antisense compound
aagctctaattctagaattg

SEQ ID NO: 6758 - DNA, 20 bp, Artificial Sequence
  Antisense compound
gaagctctaattctagaatt

SEQ ID NO: 6759 - DNA, 20 bp, Artificial Sequence
  Antisense compound
tgaagctctaattctagaat

SEQ ID NO: 6760 - DNA, 20 bp, Artificial Sequence
  Antisense compound
gtgaagctctaattctagaa

SEQ ID NO: 6761 - DNA, 20 bp, Artificial Sequence
  Antisense compound
agtgaagctctaattctaga

SEQ ID NO: 6762 - DNA, 20 bp, Artificial Sequence
  Antisense compound
tagtgaagctctaattctag

SEQ ID NO: 6763 - DNA, 20 bp, Artificial Sequence
  Antisense compound
gtagtgaagctctaattcta

SEQ ID NO: 6764 - DNA, 20 bp, Artificial Sequence
  Antisense compound
ggtagtgaagctctaattct

SEQ ID NO: 6765 - DNA, 20 bp, Artificial Sequence
  Antisense compound
aggtagtgaagctctaattc

SEQ ID NO: 6766 - DNA, 20 bp, Artificial Sequence
  Antisense compound
taggtagtgaagctctaatt

SEQ ID NO: 6767 - DNA, 20 bp, Artificial Sequence
  Antisense compound
gtaggtagtgaagctctaat

SEQ ID NO: 6768 - DNA, 20 bp, Artificial Sequence
  Antisense compound
tgtaggtagtgaagctctaa

SEQ ID NO: 6769 - DNA, 20 bp, Artificial Sequence
  Antisense compound
ttgtaggtagtgaagctcta

SEQ ID NO: 6770 - DNA, 20 bp, Artificial Sequence
  Antisense compound
gttgtaggtagtgaagctct

SEQ ID NO: 6771 - DNA, 20 bp, Artificial Sequence
  Antisense compound
agttgtaggtagtgaagctc

SEQ ID NO: 6772 - DNA, 20 bp, Artificial Sequence
  Antisense compound
tagttgtaggtagtgaagct

SEQ ID NO: 6773 - DNA, 20 bp, Artificial Sequence
  Antisense compound
atagttgtaggtagtgaagc

SEQ ID NO: 6774 - DNA, 20 bp, Artificial Sequence
  Antisense compound
aatagttgtaggtagtgaag

SEQ ID NO: 6775 - DNA, 20 bp, Artificial Sequence
  Antisense compound
caatagttgtaggtagtgaa

SEQ ID NO: 6776 - DNA, 20 bp, Artificial Sequence
  Antisense compound
gcaatagttgtaggtagtga

SEQ ID NO: 6777 - DNA, 20 bp, Artificial Sequence
  Antisense compound
agcaatagttgtaggtagtg

SEQ ID NO: 6778 - DNA, 20 bp, Artificial Sequence
  Antisense compound
tagcaatagttgtaggtagt

SEQ ID NO: 6779 - DNA, 20 bp, Artificial Sequence
  Antisense compound
ttagcaatagttgtaggtag

SEQ ID NO: 6780 - DNA, 20 bp, Artificial Sequence
  Antisense compound
tttagcaatagttgtaggta

SEQ ID NO: 6781 - DNA, 20 bp, Artificial Sequence
  Antisense compound
ttttagcaatagttgtaggt

SEQ ID NO: 6782 - DNA, 20 bp, Artificial Sequence
  Antisense compound
tttttagcaatagttgtagg

SEQ ID NO: 6783 - DNA, 20 bp, Artificial Sequence
  Antisense compound
atttttagcaatagttgtag

SEQ ID NO: 6784 - DNA, 20 bp, Artificial Sequence
  Antisense compound
tatttttagcaatagttgta

SEQ ID NO: 6785 - DNA, 20 bp, Artificial Sequence
  Antisense compound
ctatttttagcaatagttgt

SEQ ID NO: 6786 - DNA, 20 bp, Artificial Sequence
  Antisense compound
actatttttagcaatagttg

SEQ ID NO: 6787 - DNA, 20 bp, Artificial Sequence
  Antisense compound
cactatttttagcaatagtt

SEQ ID NO: 6788 - DNA, 20 bp, Artificial Sequence
  Antisense compound
acactatttttagcaatagt

SEQ ID NO: 6789 - DNA, 20 bp, Artificial Sequence
  Antisense compound
aacactatttttagcaatag

SEQ ID NO: 6790 - DNA, 20 bp, Artificial Sequence
  Antisense compound
taacactatttttagcaata

SEQ ID NO: 6791 - DNA, 20 bp, Artificial Sequence
  Antisense compound
ttaacactatttttagcaat

SEQ ID NO: 6792 - DNA, 20 bp, Artificial Sequence
  Antisense compound
cttaacactatttttagcaa

SEQ ID NO: 6793 - DNA, 20 bp, Artificial Sequence
  Antisense compound
tcttaacactatttttagca

SEQ ID NO: 6794 - DNA, 20 bp, Artificial Sequence
  Antisense compound
ctcttaacactatttttagc

SEQ ID NO: 6795 - DNA, 20 bp, Artificial Sequence
  Antisense compound
actcttaacactatttttag

SEQ ID NO: 6796 - DNA, 20 bp, Artificial Sequence
  Antisense compound
cactcttaacactattttta

SEQ ID NO: 6797 - DNA, 20 bp, Artificial Sequence
  Antisense compound
acactcttaacactattttt

SEQ ID NO: 6798 - DNA, 20 bp, Artificial Sequence
  Antisense compound
aacactcttaacactatttt

SEQ ID NO: 6799 - DNA, 20 bp, Artificial Sequence
  Antisense compound
caacactcttaacactattt

SEQ ID NO: 6800 - DNA, 20 bp, Artificial Sequence
  Antisense compound
gcaacactcttaacactatt

SEQ ID NO: 6801 - DNA, 20 bp, Artificial Sequence
  Antisense compound
agcaacactcttaacactat

SEQ ID NO: 6802 - DNA, 20 bp, Artificial Sequence
  Antisense compound
tagcaacactcttaacacta

SEQ ID NO: 6803 - DNA, 20 bp, Artificial Sequence
  Antisense compound
ttagcaacactcttaacact

SEQ ID NO: 6804 - DNA, 20 bp, Artificial Sequence
  Antisense compound
tttagcaacactcttaacac

SEQ ID NO: 6805 - DNA, 20 bp, Artificial Sequence
  Antisense compound
atttagcaacactcttaaca

SEQ ID NO: 6806 - DNA, 20 bp, Artificial Sequence
  Antisense compound
aatttagcaacactcttaac

SEQ ID NO: 6807 - DNA, 20 bp, Artificial Sequence
  Antisense compound
taatttagcaacactcttaa

SEQ ID NO: 6808 - DNA, 20 bp, Artificial Sequence
  Antisense compound
ataatttagcaacactctta

SEQ ID NO: 6809 - DNA, 20 bp, Artificial Sequence
  Antisense compound
cataatttagcaacactctt

SEQ ID NO: 6810 - DNA, 20 bp, Artificial Sequence
  Antisense compound
acataatttagcaacactct

SEQ ID NO: 6811 - DNA, 20 bp, Artificial Sequence
  Antisense compound
aacataatttagcaacactc

SEQ ID NO: 6812 - DNA, 20 bp, Artificial Sequence
  Antisense compound
aaacataatttagcaacact

SEQ ID NO: 6813 - DNA, 20 bp, Artificial Sequence
  Antisense compound
caaacataatttagcaacac

SEQ ID NO: 6814 - DNA, 20 bp, Artificial Sequence
  Antisense compound
ccaaacataatttagcaaca

SEQ ID NO: 6815 - DNA, 20 bp, Artificial Sequence
  Antisense compound
tccaaacataatttagcaac

SEQ ID NO: 6816 - DNA, 20 bp, Artificial Sequence
  Antisense compound
atccaaacataatttagcaa

SEQ ID NO: 6817 - DNA, 20 bp, Artificial Sequence
  Antisense compound
catccaaacataatttagca

SEQ ID NO: 6818 - DNA, 20 bp, Artificial Sequence
  Antisense compound
gcatccaaacataatttagc

SEQ ID NO: 6819 - DNA, 20 bp, Artificial Sequence
  Antisense compound
ggcatccaaacataatttag

SEQ ID NO: 6820 - DNA, 20 bp, Artificial Sequence
  Antisense compound
cggcatccaaacataattta

SEQ ID NO: 6821 - DNA, 20 bp, Artificial Sequence
  Antisense compound
ccggcatccaaacataattt

SEQ ID NO: 6822 - DNA, 20 bp, Artificial Sequence
  Antisense compound
gccggcatccaaacataatt

SEQ ID NO: 6823 - DNA, 20 bp, Artificial Sequence
  Antisense compound
tgccggcatccaaacataat

SEQ ID NO: 6824 - DNA, 20 bp, Artificial Sequence
  Antisense compound
atgccggcatccaaacataa

SEQ ID NO: 6825 - DNA, 20 bp, Artificial Sequence
  Antisense compound
aatgccggcatccaaacata

SEQ ID NO: 6826 - DNA, 20 bp, Artificial Sequence
  Antisense compound
taatgccggcatccaaacat

SEQ ID NO: 6827 - DNA, 20 bp, Artificial Sequence
  Antisense compound
ttaatgccggcatccaaaca

SEQ ID NO: 6828 - DNA, 20 bp, Artificial Sequence
  Antisense compound
attaatgccggcatccaaac

SEQ ID NO: 6829 - DNA, 20 bp, Artificial Sequence
  Antisense compound
aattaatgccggcatccaaa

SEQ ID NO: 6830 - DNA, 20 bp, Artificial Sequence
  Antisense compound
taattaatgccggcatccaa

SEQ ID NO: 6831 - DNA, 20 bp, Artificial Sequence
  Antisense compound
ataattaatgccggcatcca

SEQ ID NO: 6832 - DNA, 20 bp, Artificial Sequence
  Antisense compound
cataattaatgccggcatcc

SEQ ID NO: 6833 - DNA, 20 bp, Artificial Sequence
  Antisense compound
acataattaatgccggcatc

SEQ ID NO: 6834 - DNA, 20 bp, Artificial Sequence
  Antisense compound
cacataattaatgccggcat

SEQ ID NO: 6835 - DNA, 20 bp, Artificial Sequence
  Antisense compound
tcacataattaatgccggca

SEQ ID NO: 6836 - DNA, 20 bp, Artificial Sequence
  Antisense compound
ttcacataattaatgccggc

SEQ ID NO: 6837 - DNA, 20 bp, Artificial Sequence
  Antisense compound
cttcacataattaatgccgg

SEQ ID NO: 6838 - DNA, 20 bp, Artificial Sequence
  Antisense compound
acttcacataattaatgccg

SEQ ID NO: 6839 - DNA, 20 bp, Artificial Sequence
  Antisense compound
gacttcacataattaatgcc

SEQ ID NO: 6840 - DNA, 20 bp, Artificial Sequence
  Antisense compound
tgacttcacataattaatgc

SEQ ID NO: 6841 - DNA, 20 bp, Artificial Sequence
  Antisense compound
gtgacttcacataattaatg

SEQ ID NO: 6842 - DNA, 20 bp, Artificial Sequence
  Antisense compound
ggtgacttcacataattaat

SEQ ID NO: 6843 - DNA, 20 bp, Artificial Sequence
  Antisense compound
gggtgacttcacataattaa

SEQ ID NO: 6844 - DNA, 20 bp, Artificial Sequence
  Antisense compound
tgggtgacttcacataatta

SEQ ID NO: 6845 - DNA, 20 bp, Artificial Sequence
  Antisense compound
ttgggtgacttcacataatt

SEQ ID NO: 6846 - DNA, 20 bp, Artificial Sequence
  Antisense compound
tttgggtgacttcacataat

SEQ ID NO: 6847 - DNA, 20 bp, Artificial Sequence
  Antisense compound
atttgggtgacttcacataa

SEQ ID NO: 6848 - DNA, 20 bp, Artificial Sequence
  Antisense compound
aatttgggtgacttcacata

SEQ ID NO: 6849 - DNA, 20 bp, Artificial Sequence
  Antisense compound
aaatttgggtgacttcacat

SEQ ID NO: 6850 - DNA, 20 bp, Artificial Sequence
  Antisense compound
aaaatttgggtgacttcaca

SEQ ID NO: 6851 - DNA, 20 bp, Artificial Sequence
  Antisense compound
gaaaatttgggtgacttcac

SEQ ID NO: 6852 - DNA, 20 bp, Artificial Sequence
  Antisense compound
agaaaatttgggtgacttca

SEQ ID NO: 6853 - DNA, 20 bp, Artificial Sequence
  Antisense compound
tagaaaatttgggtgacttc

SEQ ID NO: 6854 - DNA, 20 bp, Artificial Sequence
  Antisense compound
ttagaaaatttgggtgactt

SEQ ID NO: 6855 - DNA, 20 bp, Artificial Sequence
  Antisense compound
tttagaaaatttgggtgact

SEQ ID NO: 6856 - DNA, 20 bp, Artificial Sequence
  Antisense compound
atttagaaaatttgggtgac

SEQ ID NO: 6857 - DNA, 20 bp, Artificial Sequence
  Antisense compound
aatttagaaaatttgggtga

SEQ ID NO: 6858 - DNA, 20 bp, Artificial Sequence
  Antisense compound
caatttagaaaatttgggtg

SEQ ID NO: 6859 - DNA, 20 bp, Artificial Sequence
  Antisense compound
acaatttagaaaatttgggt

SEQ ID NO: 6860 - DNA, 20 bp, Artificial Sequence
  Antisense compound
aacaatttagaaaatttggg

SEQ ID NO: 6861 - DNA, 20 bp, Artificial Sequence
  Antisense compound
gaacaatttagaaaatttgg

SEQ ID NO: 6862 - DNA, 20 bp, Artificial Sequence
  Antisense compound
tgaacaatttagaaaatttg

SEQ ID NO: 6863 - DNA, 20 bp, Artificial Sequence
  Antisense compound
gtgaacaatttagaaaattt

SEQ ID NO: 6864 - DNA, 20 bp, Artificial Sequence
  Antisense compound
tgtgaacaatttagaaaatt

SEQ ID NO: 6865 - DNA, 20 bp, Artificial Sequence
  Antisense compound
ttgtgaacaatttagaaaat

SEQ ID NO: 6866 - DNA, 20 bp, Artificial Sequence
  Antisense compound
attgtgaacaatttagaaaa

SEQ ID NO: 6867 - DNA, 20 bp, Artificial Sequence
  Antisense compound
gattgtgaacaatttagaaa

SEQ ID NO: 6868 - DNA, 20 bp, Artificial Sequence
  Antisense compound
cgattgtgaacaatttagaa

SEQ ID NO: 6869 - DNA, 20 bp, Artificial Sequence
  Antisense compound
gcgattgtgaacaatttaga

SEQ ID NO: 6870 - DNA, 20 bp, Artificial Sequence
  Antisense compound
agcgattgtgaacaatttag

SEQ ID NO: 6871 - DNA, 20 bp, Artificial Sequence
  Antisense compound
tagcgattgtgaacaattta

SEQ ID NO: 6872 - DNA, 20 bp, Artificial Sequence
  Antisense compound
atagcgattgtgaacaattt

SEQ ID NO: 6873 - DNA, 20 bp, Artificial Sequence
  Antisense compound
catagcgattgtgaacaatt

SEQ ID NO: 6874 - DNA, 20 bp, Artificial Sequence
  Antisense compound
acatagcgattgtgaacaat

SEQ ID NO: 6875 - DNA, 20 bp, Artificial Sequence
  Antisense compound
cacatagcgattgtgaacaa

SEQ ID NO: 6876 - DNA, 20 bp, Artificial Sequence
  Antisense compound
ccacatagcgattgtgaaca

SEQ ID NO: 6877 - DNA, 20 bp, Artificial Sequence
  Antisense compound
gccacatagcgattgtgaac

SEQ ID NO: 6878 - DNA, 20 bp, Artificial Sequence
  Antisense compound
agccacatagcgattgtgaa

SEQ ID NO: 6879 - DNA, 20 bp, Artificial Sequence
  Antisense compound
tagccacatagcgattgtga

SEQ ID NO: 6880 - DNA, 20 bp, Artificial Sequence
  Antisense compound
atagccacatagcgattgtg

SEQ ID NO: 6881 - DNA, 20 bp, Artificial Sequence
  Antisense compound
aatagccacatagcgattgt

SEQ ID NO: 6882 - DNA, 20 bp, Artificial Sequence
  Antisense compound
caatagccacatagcgattg

SEQ ID NO: 6883 - DNA, 20 bp, Artificial Sequence
  Antisense compound
acaatagccacatagcgatt

SEQ ID NO: 6884 - DNA, 20 bp, Artificial Sequence
  Antisense compound
aacaatagccacatagcgat

SEQ ID NO: 6885 - DNA, 20 bp, Artificial Sequence
  Antisense compound
caacaatagccacatagcga

SEQ ID NO: 6886 - DNA, 20 bp, Artificial Sequence
  Antisense compound
acaacaatagccacatagcg

SEQ ID NO: 6887 - DNA, 20 bp, Artificial Sequence
  Antisense compound
aacaacaatagccacatagc

SEQ ID NO: 6888 - DNA, 20 bp, Artificial Sequence
  Antisense compound
taacaacaatagccacatag

SEQ ID NO: 6889 - DNA, 20 bp, Artificial Sequence
  Antisense compound
ttaacaacaatagccacata

SEQ ID NO: 6890 - DNA, 20 bp, Artificial Sequence
  Antisense compound
cttaacaacaatagccacat

SEQ ID NO: 6891 - DNA, 20 bp, Artificial Sequence
  Antisense compound
acttaacaacaatagccaca

SEQ ID NO: 6892 - DNA, 20 bp, Artificial Sequence
  Antisense compound
tacttaacaacaatagccac

SEQ ID NO: 6893 - DNA, 20 bp, Artificial Sequence
  Antisense compound
atacttaacaacaatagcca

SEQ ID NO: 6894 - DNA, 20 bp, Artificial Sequence
  Antisense compound
aatacttaacaacaatagcc

SEQ ID NO: 6895 - DNA, 20 bp, Artificial Sequence
  Antisense compound
aaatacttaacaacaatagc

SEQ ID NO: 6896 - DNA, 20 bp, Artificial Sequence
  Antisense compound
caaatacttaacaacaatag

SEQ ID NO: 6897 - DNA, 20 bp, Artificial Sequence
  Antisense compound
gcaaatacttaacaacaata

SEQ ID NO: 6898 - DNA, 20 bp, Artificial Sequence
  Antisense compound
agcaaatacttaacaacaat

SEQ ID NO: 6899 - DNA, 20 bp, Artificial Sequence
  Antisense compound
aagcaaatacttaacaacaa

SEQ ID NO: 6900 - DNA, 20 bp, Artificial Sequence
  Antisense compound
taagcaaatacttaacaaca

SEQ ID NO: 6901 - DNA, 20 bp, Artificial Sequence
  Antisense compound
ctaagcaaatacttaacaac

SEQ ID NO: 6902 - DNA, 20 bp, Artificial Sequence
  Antisense compound
cctaagcaaatacttaacaa

SEQ ID NO: 6903 - DNA, 20 bp, Artificial Sequence
  Antisense compound
acctaagcaaatacttaaca

SEQ ID NO: 6904 - DNA, 20 bp, Artificial Sequence
  Antisense compound
aacctaagcaaatacttaac

SEQ ID NO: 6905 - DNA, 20 bp, Artificial Sequence
  Antisense compound
gaacctaagcaaatacttaa

SEQ ID NO: 6906 - DNA, 20 bp, Artificial Sequence
  Antisense compound
agaacctaagcaaatactta

SEQ ID NO: 6907 - DNA, 20 bp, Artificial Sequence
  Antisense compound
gagaacctaagcaaatactt

SEQ ID NO: 6908 - DNA, 20 bp, Artificial Sequence
  Antisense compound
agagaacctaagcaaatact

SEQ ID NO: 6909 - DNA, 20 bp, Artificial Sequence
  Antisense compound
tagagaacctaagcaaatac

SEQ ID NO: 6910 - DNA, 20 bp, Artificial Sequence
  Antisense compound
ttagagaacctaagcaaata

SEQ ID NO: 6911 - DNA, 20 bp, Artificial Sequence
  Antisense compound
attagagaacctaagcaaat

SEQ ID NO: 6912 - DNA, 20 bp, Artificial Sequence
  Antisense compound
gattagagaacctaagcaaa

SEQ ID NO: 6913 - DNA, 20 bp, Artificial Sequence
  Antisense compound
agattagagaacctaagcaa

SEQ ID NO: 6914 - DNA, 20 bp, Artificial Sequence
  Antisense compound
cagattagagaacctaagca

SEQ ID NO: 6915 - DNA, 20 bp, Artificial Sequence
  Antisense compound
acagattagagaacctaagc

SEQ ID NO: 6916 - DNA, 20 bp, Artificial Sequence
  Antisense compound
cacagattagagaacctaag

SEQ ID NO: 6917 - DNA, 20 bp, Artificial Sequence
  Antisense compound
acacagattagagaacctaa

SEQ ID NO: 6918 - DNA, 20 bp, Artificial Sequence
  Antisense compound
tacacagattagagaaccta

SEQ ID NO: 6919 - DNA, 20 bp, Artificial Sequence
  Antisense compound
ttacacagattagagaacct

SEQ ID NO: 6920 - DNA, 20 bp, Artificial Sequence
  Antisense compound
gttacacagattagagaacc

SEQ ID NO: 6921 - DNA, 20 bp, Artificial Sequence
  Antisense compound
agttacacagattagagaac

SEQ ID NO: 6922 - DNA, 20 bp, Artificial Sequence
  Antisense compound
cagttacacagattagagaa

SEQ ID NO: 6923 - DNA, 20 bp, Artificial Sequence
  Antisense compound
gcagttacacagattagaga

SEQ ID NO: 6924 - DNA, 20 bp, Artificial Sequence
  Antisense compound
agcagttacacagattagag

SEQ ID NO: 6925 - DNA, 20 bp, Artificial Sequence
  Antisense compound
cagcagttacacagattaga

SEQ ID NO: 6926 - DNA, 20 bp, Artificial Sequence
  Antisense compound
gcagcagttacacagattag

SEQ ID NO: 6927 - DNA, 20 bp, Artificial Sequence
  Antisense compound
agcagcagttacacagatta

SEQ ID NO: 6928 - DNA, 20 bp, Artificial Sequence
  Antisense compound
aagcagcagttacacagatt

SEQ ID NO: 6929 - DNA, 20 bp, Artificial Sequence
  Antisense compound
aaagcagcagttacacagat

SEQ ID NO: 6930 - DNA, 20 bp, Artificial Sequence
  Antisense compound
aaaagcagcagttacacaga

SEQ ID NO: 6931 - DNA, 20 bp, Artificial Sequence
  Antisense compound
caaaagcagcagttacacag

SEQ ID NO: 6932 - DNA, 20 bp, Artificial Sequence
  Antisense compound
ccaaaagcagcagttacaca

SEQ ID NO: 6933 - DNA, 20 bp, Artificial Sequence
  Antisense compound
accaaaagcagcagttacac

SEQ ID NO: 6934 - DNA, 20 bp, Artificial Sequence
  Antisense compound
caccaaaagcagcagttaca

SEQ ID NO: 6935 - DNA, 20 bp, Artificial Sequence
  Antisense compound
acaccaaaagcagcagttac

SEQ ID NO: 6936 - DNA, 20 bp, Artificial Sequence
  Antisense compound
tacaccaaaagcagcagtta

SEQ ID NO: 6937 - DNA, 20 bp, Artificial Sequence
  Antisense compound
gtacaccaaaagcagcagtt

SEQ ID NO: 6938 - DNA, 20 bp, Artificial Sequence
  Antisense compound
agtacaccaaaagcagcagt

SEQ ID NO: 6939 - DNA, 20 bp, Artificial Sequence
  Antisense compound
gagtacaccaaaagcagcag

SEQ ID NO: 6940 - DNA, 20 bp, Artificial Sequence
  Antisense compound
agagtacaccaaaagcagca

SEQ ID NO: 6941 - DNA, 20 bp, Artificial Sequence
  Antisense compound
aagagtacaccaaaagcagc

SEQ ID NO: 6942 - DNA, 20 bp, Artificial Sequence
  Antisense compound
taagagtacaccaaaagcag

SEQ ID NO: 6943 - DNA, 20 bp, Artificial Sequence
  Antisense compound
ataagagtacaccaaaagca

SEQ ID NO: 6944 - DNA, 20 bp, Artificial Sequence
  Antisense compound
gataagagtacaccaaaagc

SEQ ID NO: 6945 - DNA, 20 bp, Artificial Sequence
  Antisense compound
agataagagtacaccaaaag

SEQ ID NO: 6946 - DNA, 20 bp, Artificial Sequence
  Antisense compound
tagataagagtacaccaaaa

SEQ ID NO: 6947 - DNA, 20 bp, Artificial Sequence
  Antisense compound
ttagataagagtacaccaaa

SEQ ID NO: 6948 - DNA, 20 bp, Artificial Sequence
  Antisense compound
attagataagagtacaccaa

SEQ ID NO: 6949 - DNA, 20 bp, Artificial Sequence
  Antisense compound
aattagataagagtacacca

SEQ ID NO: 6950 - DNA, 20 bp, Artificial Sequence
  Antisense compound
aaattagataagagtacacc

SEQ ID NO: 6951 - DNA, 20 bp, Artificial Sequence
  Antisense compound
aaaattagataagagtacac

SEQ ID NO: 6952 - DNA, 20 bp, Artificial Sequence
  Antisense compound
caaaattagataagagtaca

SEQ ID NO: 6953 - DNA, 20 bp, Artificial Sequence
  Antisense compound
ccaaaattagataagagtac

SEQ ID NO: 6954 - DNA, 20 bp, Artificial Sequence
  Antisense compound
accaaaattagataagagta

SEQ ID NO: 6955 - DNA, 20 bp, Artificial Sequence
  Antisense compound
caccaaaattagataagagt

SEQ ID NO: 6956 - DNA, 20 bp, Artificial Sequence
  Antisense compound
gcaccaaaattagataagag

SEQ ID NO: 6957 - DNA, 20 bp, Artificial Sequence
  Antisense compound
agcaccaaaattagataaga

SEQ ID NO: 6958 - DNA, 20 bp, Artificial Sequence
  Antisense compound
gagcaccaaaattagataag

SEQ ID NO: 6959 - DNA, 20 bp, Artificial Sequence
  Antisense compound
ggagcaccaaaattagataa

SEQ ID NO: 6960 - DNA, 20 bp, Artificial Sequence
  Antisense compound
aggagcaccaaaattagata

SEQ ID NO: 6961 - DNA, 20 bp, Artificial Sequence
  Antisense compound
aaggagcaccaaaattagat

SEQ ID NO: 6962 - DNA, 20 bp, Artificial Sequence
  Antisense compound
gaaggagcaccaaaattaga

SEQ ID NO: 6963 - DNA, 20 bp, Artificial Sequence
  Antisense compound
agaaggagcaccaaaattag

SEQ ID NO: 6964 - DNA, 20 bp, Artificial Sequence
  Antisense compound
aagaaggagcaccaaaatta

SEQ ID NO: 6965 - DNA, 20 bp, Artificial Sequence
  Antisense compound
taagaaggagcaccaaaatt

SEQ ID NO: 6966 - DNA, 20 bp, Artificial Sequence
  Antisense compound
ataagaaggagcaccaaaat

SEQ ID NO: 6967 - DNA, 20 bp, Artificial Sequence
  Antisense compound
aataagaaggagcaccaaaa

SEQ ID NO: 6968 - DNA, 20 bp, Artificial Sequence
  Antisense compound
caataagaaggagcaccaaa

SEQ ID NO: 6969 - DNA, 20 bp, Artificial Sequence
  Antisense compound
acaataagaaggagcaccaa

SEQ ID NO: 6970 - DNA, 20 bp, Artificial Sequence
  Antisense compound
tacaataagaaggagcacca

SEQ ID NO: 6971 - DNA, 20 bp, Artificial Sequence
  Antisense compound
ttacaataagaaggagcacc

SEQ ID NO: 6972 - DNA, 20 bp, Artificial Sequence
  Antisense compound
attacaataagaaggagcac

SEQ ID NO: 6973 - DNA, 20 bp, Artificial Sequence
  Antisense compound
cattacaataagaaggagca

SEQ ID NO: 6974 - DNA, 20 bp, Artificial Sequence
  Antisense compound
ccattacaataagaaggagc

SEQ ID NO: 6975 - DNA, 20 bp, Artificial Sequence
  Antisense compound
gccattacaataagaaggag

SEQ ID NO: 6976 - DNA, 20 bp, Artificial Sequence
  Antisense compound
cgccattacaataagaagga

SEQ ID NO: 6977 - DNA, 20 bp, Artificial Sequence
  Antisense compound
acgccattacaataagaagg

SEQ ID NO: 6978 - DNA, 20 bp, Artificial Sequence
  Antisense compound
aacgccattacaataagaag

SEQ ID NO: 6979 - DNA, 20 bp, Artificial Sequence
  Antisense compound
taacgccattacaataagaa

SEQ ID NO: 6980 - DNA, 20 bp, Artificial Sequence
  Antisense compound
ctaacgccattacaataaga

SEQ ID NO: 6981 - DNA, 20 bp, Artificial Sequence
  Antisense compound
tctaacgccattacaataag

SEQ ID NO: 6982 - DNA, 20 bp, Artificial Sequence
  Antisense compound
ctctaacgccattacaataa

SEQ ID NO: 6983 - DNA, 20 bp, Artificial Sequence
  Antisense compound
tctctaacgccattacaata

SEQ ID NO: 6984 - DNA, 20 bp, Artificial Sequence
  Antisense compound
ttctctaacgccattacaat

SEQ ID NO: 6985 - DNA, 20 bp, Artificial Sequence
  Antisense compound
attctctaacgccattacaa

SEQ ID NO: 6986 - DNA, 20 bp, Artificial Sequence
  Antisense compound
aattctctaacgccattaca

SEQ ID NO: 6987 - DNA, 20 bp, Artificial Sequence
  Antisense compound
caattctctaacgccattac

SEQ ID NO: 6988 - DNA, 20 bp, Artificial Sequence
  Antisense compound
acaattctctaacgccatta

SEQ ID NO: 6989 - DNA, 20 bp, Artificial Sequence
  Antisense compound
tacaattctctaacgccatt

SEQ ID NO: 6990 - DNA, 20 bp, Artificial Sequence
  Antisense compound
atacaattctctaacgccat

SEQ ID NO: 6991 - DNA, 20 bp, Artificial Sequence
  Antisense compound
gatacaattctctaacgcca

SEQ ID NO: 6992 - DNA, 20 bp, Artificial Sequence
  Antisense compound
agatacaattctctaacgcc

SEQ ID NO: 6993 - DNA, 20 bp, Artificial Sequence
  Antisense compound
aagatacaattctctaacgc

SEQ ID NO: 6994 - DNA, 20 bp, Artificial Sequence
  Antisense compound
taagatacaattctctaacg

SEQ ID NO: 6995 - DNA, 20 bp, Artificial Sequence
  Antisense compound
ttaagatacaattctctaac

SEQ ID NO: 6996 - DNA, 20 bp, Artificial Sequence
  Antisense compound
attaagatacaattctctaa

SEQ ID NO: 6997 - DNA, 20 bp, Artificial Sequence
  Antisense compound
aattaagatacaattctcta

SEQ ID NO: 6998 - DNA, 20 bp, Artificial Sequence
  Antisense compound
gaattaagatacaattctct

SEQ ID NO: 6999 - DNA, 20 bp, Artificial Sequence
  Antisense compound
cgaattaagatacaattctc

SEQ ID NO: 7000 - DNA, 20 bp, Artificial Sequence
  Antisense compound
acgaattaagatacaattct

SEQ ID NO: 7001 - DNA, 20 bp, Artificial Sequence
  Antisense compound
gacgaattaagatacaattc

SEQ ID NO: 7002 - DNA, 20 bp, Artificial Sequence
  Antisense compound
agacgaattaagatacaatt

SEQ ID NO: 7003 - DNA, 20 bp, Artificial Sequence
  Antisense compound
tagacgaattaagatacaat

SEQ ID NO: 7004 - DNA, 20 bp, Artificial Sequence
  Antisense compound
ttagacgaattaagatacaa

SEQ ID NO: 7005 - DNA, 20 bp, Artificial Sequence
  Antisense compound
gttagacgaattaagataca

SEQ ID NO: 7006 - DNA, 20 bp, Artificial Sequence
  Antisense compound
cgttagacgaattaagatac

SEQ ID NO: 7007 - DNA, 20 bp, Artificial Sequence
  Antisense compound
acgttagacgaattaagata

SEQ ID NO: 7008 - DNA, 20 bp, Artificial Sequence
  Antisense compound
aacgttagacgaattaagat

SEQ ID NO: 7009 - DNA, 20 bp, Artificial Sequence
  Antisense compound
taacgttagacgaattaaga

SEQ ID NO: 7010 - DNA, 20 bp, Artificial Sequence
  Antisense compound
gtaacgttagacgaattaag

SEQ ID NO: 7011 - DNA, 20 bp, Artificial Sequence
  Antisense compound
agtaacgttagacgaattaa

SEQ ID NO: 7012 - DNA, 20 bp, Artificial Sequence
  Antisense compound
tagtaacgttagacgaatta

SEQ ID NO: 7013 - DNA, 20 bp, Artificial Sequence
  Antisense compound
gtagtaacgttagacgaatt

SEQ ID NO: 7014 - DNA, 20 bp, Artificial Sequence
  Antisense compound
agtagtaacgttagacgaat

SEQ ID NO: 7015 - DNA, 20 bp, Artificial Sequence
  Antisense compound
tagtagtaacgttagacgaa

SEQ ID NO: 7016 - DNA, 20 bp, Artificial Sequence
  Antisense compound
atagtagtaacgttagacga

SEQ ID NO: 7017 - DNA, 20 bp, Artificial Sequence
  Antisense compound
catagtagtaacgttagacg

SEQ ID NO: 7018 - DNA, 20 bp, Artificial Sequence
  Antisense compound
ccatagtagtaacgttagac

SEQ ID NO: 7019 - DNA, 20 bp, Artificial Sequence
  Antisense compound
tccatagtagtaacgttaga

SEQ ID NO: 7020 - DNA, 20 bp, Artificial Sequence
  Antisense compound
atccatagtagtaacgttag

SEQ ID NO: 7021 - DNA, 20 bp, Artificial Sequence
  Antisense compound
aatccatagtagtaacgtta

SEQ ID NO: 7022 - DNA, 20 bp, Artificial Sequence
  Antisense compound
aaatccatagtagtaacgtt

SEQ ID NO: 7023 - DNA, 20 bp, Artificial Sequence
  Antisense compound
gaaatccatagtagtaacgt

SEQ ID NO: 7024 - DNA, 20 bp, Artificial Sequence
  Antisense compound
agaaatccatagtagtaacg

SEQ ID NO: 7025 - DNA, 20 bp, Artificial Sequence
  Antisense compound
cagaaatccatagtagtaac

SEQ ID NO: 7026 - DNA, 20 bp, Artificial Sequence
  Antisense compound
acagaaatccatagtagtaa

SEQ ID NO: 7027 - DNA, 20 bp, Artificial Sequence
  Antisense compound
cacagaaatccatagtagta

SEQ ID NO: 7028 - DNA, 20 bp, Artificial Sequence
  Antisense compound
tcacagaaatccatagtagt

SEQ ID NO: 7029 - DNA, 20 bp, Artificial Sequence
  Antisense compound
ttcacagaaatccatagtag

SEQ ID NO: 7030 - DNA, 20 bp, Artificial Sequence
  Antisense compound
cttcacagaaatccatagta

SEQ ID NO: 7031 - DNA, 20 bp, Artificial Sequence
  Antisense compound
ccttcacagaaatccatagt

SEQ ID NO: 7032 - DNA, 20 bp, Artificial Sequence
  Antisense compound
accttcacagaaatccatag

SEQ ID NO: 7033 - DNA, 20 bp, Artificial Sequence
  Antisense compound
aaccttcacagaaatccata

SEQ ID NO: 7034 - DNA, 20 bp, Artificial Sequence
  Antisense compound
gaaccttcacagaaatccat

SEQ ID NO: 7035 - DNA, 20 bp, Artificial Sequence
  Antisense compound
agaaccttcacagaaatcca

SEQ ID NO: 7036 - DNA, 20 bp, Artificial Sequence
  Antisense compound
aagaaccttcacagaaatcc

SEQ ID NO: 7037 - DNA, 20 bp, Artificial Sequence
  Antisense compound
aaagaaccttcacagaaatc

SEQ ID NO: 7038 - DNA, 20 bp, Artificial Sequence
  Antisense compound
aaaagaaccttcacagaaat

SEQ ID NO: 7039 - DNA, 20 bp, Artificial Sequence
  Antisense compound
gaaaagaaccttcacagaaa

SEQ ID NO: 7040 - DNA, 20 bp, Artificial Sequence
  Antisense compound
ggaaaagaaccttcacagaa

SEQ ID NO: 7041 - DNA, 20 bp, Artificial Sequence
  Antisense compound
aggaaaagaaccttcacaga

SEQ ID NO: 7042 - DNA, 20 bp, Artificial Sequence
  Antisense compound
aaggaaaagaaccttcacag

SEQ ID NO: 7043 - DNA, 20 bp, Artificial Sequence
  Antisense compound
caaggaaaagaaccttcaca

SEQ ID NO: 7044 - DNA, 20 bp, Artificial Sequence
  Antisense compound
gcaaggaaaagaaccttcac

SEQ ID NO: 7045 - DNA, 20 bp, Artificial Sequence
  Antisense compound
tgcaaggaaaagaaccttca

SEQ ID NO: 7046 - DNA, 20 bp, Artificial Sequence
  Antisense compound
ctgcaaggaaaagaaccttc

SEQ ID NO: 7047 - DNA, 20 bp, Artificial Sequence
  Antisense compound
gctgcaaggaaaagaacctt

SEQ ID NO: 7048 - DNA, 20 bp, Artificial Sequence
  Antisense compound
tgctgcaaggaaaagaacct

SEQ ID NO: 7049 - DNA, 20 bp, Artificial Sequence
  Antisense compound
atgctgcaaggaaaagaacc

SEQ ID NO: 7050 - DNA, 20 bp, Artificial Sequence
  Antisense compound
aatgctgcaaggaaaagaac

SEQ ID NO: 7051 - DNA, 20 bp, Artificial Sequence
  Antisense compound
aaatgctgcaaggaaaagaa

SEQ ID NO: 7052 - DNA, 20 bp, Artificial Sequence
  Antisense compound
caaatgctgcaaggaaaaga

SEQ ID NO: 7053 - DNA, 20 bp, Artificial Sequence
  Antisense compound
acaaatgctgcaaggaaaag

SEQ ID NO: 7054 - DNA, 20 bp, Artificial Sequence
  Antisense compound
aacaaatgctgcaaggaaaa

SEQ ID NO: 7055 - DNA, 20 bp, Artificial Sequence
  Antisense compound
aaacaaatgctgcaaggaaa

SEQ ID NO: 7056 - DNA, 20 bp, Artificial Sequence
  Antisense compound
taaacaaatgctgcaaggaa

SEQ ID NO: 7057 - DNA, 20 bp, Artificial Sequence
  Antisense compound
ttaaacaaatgctgcaagga

SEQ ID NO: 7058 - DNA, 20 bp, Artificial Sequence
  Antisense compound
cttaaacaaatgctgcaagg

SEQ ID NO: 7059 - DNA, 20 bp, Artificial Sequence
  Antisense compound
acttaaacaaatgctgcaag

SEQ ID NO: 7060 - DNA, 20 bp, Artificial Sequence
  Antisense compound
cacttaaacaaatgctgcaa

SEQ ID NO: 7061 - DNA, 20 bp, Artificial Sequence
  Antisense compound
ccacttaaacaaatgctgca

SEQ ID NO: 7062 - DNA, 20 bp, Artificial Sequence
  Antisense compound
tccacttaaacaaatgctgc

SEQ ID NO: 7063 - DNA, 20 bp, Artificial Sequence
  Antisense compound
atccacttaaacaaatgctg

SEQ ID NO: 7064 - DNA, 20 bp, Artificial Sequence
  Antisense compound
aatccacttaaacaaatgct

SEQ ID NO: 7065 - DNA, 20 bp, Artificial Sequence
  Antisense compound
taatccacttaaacaaatgc

SEQ ID NO: 7066 - DNA, 20 bp, Artificial Sequence
  Antisense compound
ctaatccacttaaacaaatg

SEQ ID NO: 7067 - DNA, 20 bp, Artificial Sequence
  Antisense compound
tctaatccacttaaacaaat

SEQ ID NO: 7068 - DNA, 20 bp, Artificial Sequence
  Antisense compound
gtctaatccacttaaacaaa

SEQ ID NO: 7069 - DNA, 20 bp, Artificial Sequence
  Antisense compound
agtctaatccacttaaacaa

SEQ ID NO: 7070 - DNA, 20 bp, Artificial Sequence
  Antisense compound
gagtctaatccacttaaaca

SEQ ID NO: 7071 - DNA, 20 bp, Artificial Sequence
  Antisense compound
ggagtctaatccacttaaac

SEQ ID NO: 7072 - DNA, 20 bp, Artificial Sequence
  Antisense compound
gggagtctaatccacttaaa

SEQ ID NO: 7073 - DNA, 20 bp, Artificial Sequence
  Antisense compound
agggagtctaatccacttaa

SEQ ID NO: 7074 - DNA, 20 bp, Artificial Sequence
  Antisense compound
aagggagtctaatccactta

SEQ ID NO: 7075 - DNA, 20 bp, Artificial Sequence
  Antisense compound
caagggagtctaatccactt

SEQ ID NO: 7076 - DNA, 20 bp, Artificial Sequence
  Antisense compound
tcaagggagtctaatccact

SEQ ID NO: 7077 - DNA, 20 bp, Artificial Sequence
  Antisense compound
atcaagggagtctaatccac

SEQ ID NO: 7078 - DNA, 20 bp, Artificial Sequence
  Antisense compound
aatcaagggagtctaatcca

SEQ ID NO: 7079 - DNA, 20 bp, Artificial Sequence
  Antisense compound
gaatcaagggagtctaatcc

SEQ ID NO: 7080 - DNA, 20 bp, Artificial Sequence
  Antisense compound
agaatcaagggagtctaatc

SEQ ID NO: 7081 - DNA, 20 bp, Artificial Sequence
  Antisense compound
aagaatcaagggagtctaat

SEQ ID NO: 7082 - DNA, 20 bp, Artificial Sequence
  Antisense compound
taagaatcaagggagtctaa

SEQ ID NO: 7083 - DNA, 20 bp, Artificial Sequence
  Antisense compound
ataagaatcaagggagtcta

SEQ ID NO: 7084 - DNA, 20 bp, Artificial Sequence
  Antisense compound
gataagaatcaagggagtct

SEQ ID NO: 7085 - DNA, 20 bp, Artificial Sequence
  Antisense compound
ggataagaatcaagggagtc

SEQ ID NO: 7086 - DNA, 20 bp, Artificial Sequence
  Antisense compound
tggataagaatcaagggagt

SEQ ID NO: 7087 - DNA, 20 bp, Artificial Sequence
  Antisense compound
ctggataagaatcaagggag

SEQ ID NO: 7088 - DNA, 20 bp, Artificial Sequence
  Antisense compound
gctggataagaatcaaggga

SEQ ID NO: 7089 - DNA, 20 bp, Artificial Sequence
  Antisense compound
agctggataagaatcaaggg

SEQ ID NO: 7090 - DNA, 20 bp, Artificial Sequence
  Antisense compound
gagctggataagaatcaagg

SEQ ID NO: 7091 - DNA, 20 bp, Artificial Sequence
  Antisense compound
agagctggataagaatcaag

SEQ ID NO: 7092 - DNA, 20 bp, Artificial Sequence
  Antisense compound
aagagctggataagaatcaa

SEQ ID NO: 7093 - DNA, 20 bp, Artificial Sequence
  Antisense compound
caagagctggataagaatca

SEQ ID NO: 7094 - DNA, 20 bp, Artificial Sequence
  Antisense compound
tcaagagctggataagaatc

SEQ ID NO: 7095 - DNA, 20 bp, Artificial Sequence
  Antisense compound
ttcaagagctggataagaat

SEQ ID NO: 7096 - DNA, 20 bp, Artificial Sequence
  Antisense compound
tttcaagagctggataagaa

SEQ ID NO: 7097 - DNA, 20 bp, Artificial Sequence
  Antisense compound
gtttcaagagctggataaga

SEQ ID NO: 7098 - DNA, 20 bp, Artificial Sequence
  Antisense compound
ggtttcaagagctggataag

SEQ ID NO: 7099 - DNA, 20 bp, Artificial Sequence
  Antisense compound
tggtttcaagagctggataa

SEQ ID NO: 7100 - DNA, 20 bp, Artificial Sequence
  Antisense compound
atggtttcaagagctggata

SEQ ID NO: 7101 - DNA, 20 bp, Artificial Sequence
  Antisense compound
aatggtttcaagagctggat

SEQ ID NO: 7102 - DNA, 20 bp, Artificial Sequence
  Antisense compound
gaatggtttcaagagctgga

SEQ ID NO: 7103 - DNA, 20 bp, Artificial Sequence
  Antisense compound
tgaatggtttcaagagctgg

SEQ ID NO: 7104 - DNA, 20 bp, Artificial Sequence
  Antisense compound
ctgaatggtttcaagagctg

SEQ ID NO: 7105 - DNA, 20 bp, Artificial Sequence
  Antisense compound
cctgaatggtttcaagagct

SEQ ID NO: 7106 - DNA, 20 bp, Artificial Sequence
  Antisense compound
acctgaatggtttcaagagc

SEQ ID NO: 7107 - DNA, 20 bp, Artificial Sequence
  Antisense compound
cacctgaatggtttcaagag

SEQ ID NO: 7108 - DNA, 20 bp, Artificial Sequence
  Antisense compound
tcacctgaatggtttcaaga

SEQ ID NO: 7109 - DNA, 20 bp, Artificial Sequence
  Antisense compound
gtcacctgaatggtttcaag

SEQ ID NO: 7110 - DNA, 20 bp, Artificial Sequence
  Antisense compound
cgtcacctgaatggtttcaa

SEQ ID NO: 7111 - DNA, 20 bp, Artificial Sequence
  Antisense compound
tcgtcacctgaatggtttca

SEQ ID NO: 7112 - DNA, 20 bp, Artificial Sequence
  Antisense compound
atcgtcacctgaatggtttc

SEQ ID NO: 7113 - DNA, 20 bp, Artificial Sequence
  Antisense compound
aatcgtcacctgaatggttt

SEQ ID NO: 7114 - DNA, 20 bp, Artificial Sequence
  Antisense compound
aaatcgtcacctgaatggtt

SEQ ID NO: 7115 - DNA, 20 bp, Artificial Sequence
  Antisense compound
gaaatcgtcacctgaatggt

SEQ ID NO: 7116 - DNA, 20 bp, Artificial Sequence
  Antisense compound
tgaaatcgtcacctgaatgg

SEQ ID NO: 7117 - DNA, 20 bp, Artificial Sequence
  Antisense compound
atgaaatcgtcacctgaatg

SEQ ID NO: 7118 - DNA, 20 bp, Artificial Sequence
  Antisense compound
gatgaaatcgtcacctgaat

SEQ ID NO: 7119 - DNA, 20 bp, Artificial Sequence
  Antisense compound
cgatgaaatcgtcacctgaa

SEQ ID NO: 7120 - DNA, 20 bp, Artificial Sequence
  Antisense compound
acgatgaaatcgtcacctga

SEQ ID NO: 7121 - DNA, 20 bp, Artificial Sequence
  Antisense compound
tacgatgaaatcgtcacctg

SEQ ID NO: 7122 - DNA, 20 bp, Artificial Sequence
  Antisense compound
gtacgatgaaatcgtcacct

SEQ ID NO: 7123 - DNA, 20 bp, Artificial Sequence
  Antisense compound
tgtacgatgaaatcgtcacc

SEQ ID NO: 7124 - DNA, 20 bp, Artificial Sequence
  Antisense compound
ttgtacgatgaaatcgtcac

SEQ ID NO: 7125 - DNA, 20 bp, Artificial Sequence
  Antisense compound
cttgtacgatgaaatcgtca

SEQ ID NO: 7126 - DNA, 20 bp, Artificial Sequence
  Antisense compound
gcttgtacgatgaaatcgtc

SEQ ID NO: 7127 - DNA, 20 bp, Artificial Sequence
  Antisense compound
agcttgtacgatgaaatcgt

SEQ ID NO: 7128 - DNA, 20 bp, Artificial Sequence
  Antisense compound
tagcttgtacgatgaaatcg

SEQ ID NO: 7129 - DNA, 20 bp, Artificial Sequence
  Antisense compound
ctagcttgtacgatgaaatc

SEQ ID NO: 7130 - DNA, 20 bp, Artificial Sequence
  Antisense compound
tctagcttgtacgatgaaat

SEQ ID NO: 7131 - DNA, 20 bp, Artificial Sequence
  Antisense compound
gtctagcttgtacgatgaaa

SEQ ID NO: 7132 - DNA, 20 bp, Artificial Sequence
  Antisense compound
agtctagcttgtacgatgaa

SEQ ID NO: 7133 - DNA, 20 bp, Artificial Sequence
  Antisense compound
aagtctagcttgtacgatga

SEQ ID NO: 7134 - DNA, 20 bp, Artificial Sequence
  Antisense compound
caagtctagcttgtacgatg

SEQ ID NO: 7135 - DNA, 20 bp, Artificial Sequence
  Antisense compound
tcaagtctagcttgtacgat

SEQ ID NO: 7136 - DNA, 20 bp, Artificial Sequence
  Antisense compound
gtcaagtctagcttgtacga

SEQ ID NO: 7137 - DNA, 20 bp, Artificial Sequence
  Antisense compound
tgtcaagtctagcttgtacg

SEQ ID NO: 7138 - DNA, 20 bp, Artificial Sequence
  Antisense compound
ttgtcaagtctagcttgtac

SEQ ID NO: 7139 - DNA, 20 bp, Artificial Sequence
  Antisense compound
attgtcaagtctagcttgta

SEQ ID NO: 7140 - DNA, 20 bp, Artificial Sequence
  Antisense compound
aattgtcaagtctagcttgt

SEQ ID NO: 7141 - DNA, 20 bp, Artificial Sequence
  Antisense compound
aaattgtcaagtctagcttg

SEQ ID NO: 7142 - DNA, 20 bp, Artificial Sequence
  Antisense compound
aaaattgtcaagtctagctt

SEQ ID NO: 7143 - DNA, 20 bp, Artificial Sequence
  Antisense compound
taaaattgtcaagtctagct

SEQ ID NO: 7144 - DNA, 20 bp, Artificial Sequence
  Antisense compound
ctaaaattgtcaagtctagc

SEQ ID NO: 7145 - DNA, 20 bp, Artificial Sequence
  Antisense compound
cctaaaattgtcaagtctag

SEQ ID NO: 7146 - DNA, 20 bp, Artificial Sequence
  Antisense compound
acctaaaattgtcaagtcta

SEQ ID NO: 7147 - DNA, 20 bp, Artificial Sequence
  Antisense compound
gacctaaaattgtcaagtct

SEQ ID NO: 7148 - DNA, 20 bp, Artificial Sequence
  Antisense compound
agacctaaaattgtcaagtc

SEQ ID NO: 7149 - DNA, 20 bp, Artificial Sequence
  Antisense compound
cagacctaaaattgtcaagt

SEQ ID NO: 7150 - DNA, 20 bp, Artificial Sequence
  Antisense compound
ccagacctaaaattgtcaag

SEQ ID NO: 7151 - DNA, 20 bp, Artificial Sequence
  Antisense compound
gccagacctaaaattgtcaa

SEQ ID NO: 7152 - DNA, 20 bp, Artificial Sequence
  Antisense compound
ggccagacctaaaattgtca

SEQ ID NO: 7153 - DNA, 20 bp, Artificial Sequence
  Antisense compound
cggccagacctaaaattgtc

SEQ ID NO: 7154 - DNA, 20 bp, Artificial Sequence
  Antisense compound
gcggccagacctaaaattgt

SEQ ID NO: 7155 - DNA, 20 bp, Artificial Sequence
  Antisense compound
agcggccagacctaaaattg

SEQ ID NO: 7156 - DNA, 20 bp, Artificial Sequence
  Antisense compound
cagcggccagacctaaaatt

SEQ ID NO: 7157 - DNA, 20 bp, Artificial Sequence
  Antisense compound
tcagcggccagacctaaaat

SEQ ID NO: 7158 - DNA, 20 bp, Artificial Sequence
  Antisense compound
ctcagcggccagacctaaaa

SEQ ID NO: 7159 - DNA, 20 bp, Artificial Sequence
  Antisense compound
actcagcggccagacctaaa

SEQ ID NO: 7160 - DNA, 20 bp, Artificial Sequence
  Antisense compound
cactcagcggccagacctaa

SEQ ID NO: 7161 - DNA, 20 bp, Artificial Sequence
  Antisense compound
ccactcagcggccagaccta

SEQ ID NO: 7162 - DNA, 20 bp, Artificial Sequence
  Antisense compound
cccactcagcggccagacct

SEQ ID NO: 7163 - DNA, 20 bp, Artificial Sequence
  Antisense compound
acccactcagcggccagacc

SEQ ID NO: 7164 - DNA, 20 bp, Artificial Sequence
  Antisense compound
aacccactcagcggccagac

SEQ ID NO: 7165 - DNA, 20 bp, Artificial Sequence
  Antisense compound
aaacccactcagcggccaga

SEQ ID NO: 7166 - DNA, 20 bp, Artificial Sequence
  Antisense compound
aaaacccactcagcggccag

SEQ ID NO: 7167 - DNA, 20 bp, Artificial Sequence
  Antisense compound
caaaacccactcagcggcca

SEQ ID NO: 7168 - DNA, 20 bp, Artificial Sequence
  Antisense compound
ccaaaacccactcagcggcc

SEQ ID NO: 7169 - DNA, 20 bp, Artificial Sequence
  Antisense compound
gccaaaacccactcagcggc

SEQ ID NO: 7170 - DNA, 20 bp, Artificial Sequence
  Antisense compound
tgccaaaacccactcagcgg

SEQ ID NO: 7171 - DNA, 20 bp, Artificial Sequence
  Antisense compound
atgccaaaacccactcagcg

SEQ ID NO: 7172 - DNA, 20 bp, Artificial Sequence
  Antisense compound
tatgccaaaacccactcagc

SEQ ID NO: 7173 - DNA, 20 bp, Artificial Sequence
  Antisense compound
atatgccaaaacccactcag

SEQ ID NO: 7174 - DNA, 20 bp, Artificial Sequence
  Antisense compound
tatatgccaaaacccactca

SEQ ID NO: 7175 - DNA, 20 bp, Artificial Sequence
  Antisense compound
atatatgccaaaacccactc

SEQ ID NO: 7176 - DNA, 20 bp, Artificial Sequence
  Antisense compound
catatatgccaaaacccact

SEQ ID NO: 7177 - DNA, 20 bp, Artificial Sequence
  Antisense compound
acatatatgccaaaacccac

SEQ ID NO: 7178 - DNA, 20 bp, Artificial Sequence
  Antisense compound
aacatatatgccaaaaccca

SEQ ID NO: 7179 - DNA, 20 bp, Artificial Sequence
  Antisense compound
caacatatatgccaaaaccc

SEQ ID NO: 7180 - DNA, 20 bp, Artificial Sequence
  Antisense compound
acaacatatatgccaaaacc

SEQ ID NO: 7181 - DNA, 20 bp, Artificial Sequence
  Antisense compound
aacaacatatatgccaaaac

SEQ ID NO: 7182 - DNA, 20 bp, Artificial Sequence
  Antisense compound
gaacaacatatatgccaaaa

SEQ ID NO: 7183 - DNA, 20 bp, Artificial Sequence
  Antisense compound
tgaacaacatatatgccaaa

SEQ ID NO: 7184 - DNA, 20 bp, Artificial Sequence
  Antisense compound
gtgaacaacatatatgccaa

SEQ ID NO: 7185 - DNA, 20 bp, Artificial Sequence
  Antisense compound
tgtgaacaacatatatgcca

SEQ ID NO: 7186 - DNA, 20 bp, Artificial Sequence
  Antisense compound
ttgtgaacaacatatatgcc

SEQ ID NO: 7187 - DNA, 20 bp, Artificial Sequence
  Antisense compound
tttgtgaacaacatatatgc

SEQ ID NO: 7188 - DNA, 20 bp, Artificial Sequence
  Antisense compound
ttttgtgaacaacatatatg

SEQ ID NO: 7189 - DNA, 20 bp, Artificial Sequence
  Antisense compound
attttgtgaacaacatatat

SEQ ID NO: 7190 - DNA, 20 bp, Artificial Sequence
  Antisense compound
aattttgtgaacaacatata

SEQ ID NO: 7191 - DNA, 20 bp, Artificial Sequence
  Antisense compound
gaattttgtgaacaacatat

SEQ ID NO: 7192 - DNA, 20 bp, Artificial Sequence
  Antisense compound
agaattttgtgaacaacata

SEQ ID NO: 7193 - DNA, 20 bp, Artificial Sequence
  Antisense compound
aagaattttgtgaacaacat

SEQ ID NO: 7194 - DNA, 20 bp, Artificial Sequence
  Antisense compound
aaagaattttgtgaacaaca

SEQ ID NO: 7195 - DNA, 20 bp, Artificial Sequence
  Antisense compound
aaaagaattttgtgaacaac

SEQ ID NO: 7196 - DNA, 20 bp, Artificial Sequence
  Antisense compound
taaaagaattttgtgaacaa

SEQ ID NO: 7197 - DNA, 20 bp, Artificial Sequence
  Antisense compound
ataaaagaattttgtgaaca

SEQ ID NO: 7198 - DNA, 20 bp, Artificial Sequence
  Antisense compound
aataaaagaattttgtgaac

SEQ ID NO: 7199 - DNA, 20 bp, Artificial Sequence
  Antisense compound
aaataaaagaattttgtgaa

SEQ ID NO: 7200 - DNA, 20 bp, Artificial Sequence
  Antisense compound
taaataaaagaattttgtga

SEQ ID NO: 7201 - DNA, 20 bp, Artificial Sequence
  Antisense compound
ataaataaaagaattttgtg

SEQ ID NO: 7202 - DNA, 20 bp, Artificial Sequence
  Antisense compound
aataaataaaagaattttgt

SEQ ID NO: 7203 - DNA, 20 bp, Artificial Sequence
  Antisense compound
taataaataaaagaattttg

SEQ ID NO: 7204 - DNA, 20 bp, Artificial Sequence
  Antisense compound
ctaataaataaaagaatttt

SEQ ID NO: 7205 - DNA, 20 bp, Artificial Sequence
  Antisense compound
cctaataaataaaagaattt

SEQ ID NO: 7206 - DNA, 20 bp, Artificial Sequence
  Antisense compound
acctaataaataaaagaatt

SEQ ID NO: 7207 - DNA, 20 bp, Artificial Sequence
  Antisense compound
gacctaataaataaaagaat

SEQ ID NO: 7208 - DNA, 20 bp, Artificial Sequence
  Antisense compound
agacctaataaataaaagaa

SEQ ID NO: 7209 - DNA, 20 bp, Artificial Sequence
  Antisense compound
aagacctaataaataaaaga

SEQ ID NO: 7210 - DNA, 20 bp, Artificial Sequence
  Antisense compound
aaagacctaataaataaaag

SEQ ID NO: 7211 - DNA, 20 bp, Artificial Sequence
  Antisense compound
gaaagacctaataaataaaa

SEQ ID NO: 7212 - DNA, 20 bp, Artificial Sequence
  Antisense compound
tgaaagacctaataaataaa

SEQ ID NO: 7213 - DNA, 20 bp, Artificial Sequence
  Antisense compound
ctgaaagacctaataaataa

SEQ ID NO: 7214 - DNA, 20 bp, Artificial Sequence
  Antisense compound
gctgaaagacctaataaata

SEQ ID NO: 7215 - DNA, 20 bp, Artificial Sequence
  Antisense compound
agctgaaagacctaataaat

SEQ ID NO: 7216 - DNA, 20 bp, Artificial Sequence
  Antisense compound
tagctgaaagacctaataaa

SEQ ID NO: 7217 - DNA, 20 bp, Artificial Sequence
  Antisense compound
atagctgaaagacctaataa

SEQ ID NO: 7218 - DNA, 20 bp, Artificial Sequence
  Antisense compound
tatagctgaaagacctaata

SEQ ID NO: 7219 - DNA, 20 bp, Artificial Sequence
  Antisense compound
ttatagctgaaagacctaat

SEQ ID NO: 7220 - DNA, 20 bp, Artificial Sequence
  Antisense compound
attatagctgaaagacctaa

SEQ ID NO: 7221 - DNA, 20 bp, Artificial Sequence
  Antisense compound
cattatagctgaaagaccta

SEQ ID NO: 7222 - DNA, 20 bp, Artificial Sequence
  Antisense compound
gcattatagctgaaagacct

SEQ ID NO: 7223 - DNA, 20 bp, Artificial Sequence
  Antisense compound
tgcattatagctgaaagacc

SEQ ID NO: 7224 - DNA, 20 bp, Artificial Sequence
  Antisense compound
ctgcattatagctgaaagac

SEQ ID NO: 7225 - DNA, 20 bp, Artificial Sequence
  Antisense compound
cctgcattatagctgaaaga

SEQ ID NO: 7226 - DNA, 20 bp, Artificial Sequence
  Antisense compound
acctgcattatagctgaaag

SEQ ID NO: 7227 - DNA, 20 bp, Artificial Sequence
  Antisense compound
cacctgcattatagctgaaa

SEQ ID NO: 7228 - DNA, 20 bp, Artificial Sequence
  Antisense compound
acacctgcattatagctgaa

SEQ ID NO: 7229 - DNA, 20 bp, Artificial Sequence
  Antisense compound
aacacctgcattatagctga

SEQ ID NO: 7230 - DNA, 20 bp, Artificial Sequence
  Antisense compound
gaacacctgcattatagctg

SEQ ID NO: 7231 - DNA, 20 bp, Artificial Sequence
  Antisense compound
agaacacctgcattatagct

SEQ ID NO: 7232 - DNA, 20 bp, Artificial Sequence
  Antisense compound
aagaacacctgcattatagc

SEQ ID NO: 7233 - DNA, 20 bp, Artificial Sequence
  Antisense compound
aaagaacacctgcattatag

SEQ ID NO: 7234 - DNA, 20 bp, Artificial Sequence
  Antisense compound
caaagaacacctgcattata

SEQ ID NO: 7235 - DNA, 20 bp, Artificial Sequence
  Antisense compound
ccaaagaacacctgcattat

SEQ ID NO: 7236 - DNA, 20 bp, Artificial Sequence
  Antisense compound
gccaaagaacacctgcatta

SEQ ID NO: 7237 - DNA, 20 bp, Artificial Sequence
  Antisense compound
agccaaagaacacctgcatt

SEQ ID NO: 7238 - DNA, 20 bp, Artificial Sequence
  Antisense compound
tagccaaagaacacctgcat

SEQ ID NO: 7239 - DNA, 20 bp, Artificial Sequence
  Antisense compound
atagccaaagaacacctgca

SEQ ID NO: 7240 - DNA, 20 bp, Artificial Sequence
  Antisense compound
aatagccaaagaacacctgc

SEQ ID NO: 7241 - DNA, 20 bp, Artificial Sequence
  Antisense compound
aaatagccaaagaacacctg

SEQ ID NO: 7242 - DNA, 20 bp, Artificial Sequence
  Antisense compound
aaaatagccaaagaacacct

SEQ ID NO: 7243 - DNA, 20 bp, Artificial Sequence
  Antisense compound
caaaatagccaaagaacacc

SEQ ID NO: 7244 - DNA, 20 bp, Artificial Sequence
  Antisense compound
gcaaaatagccaaagaacac

SEQ ID NO: 7245 - DNA, 20 bp, Artificial Sequence
  Antisense compound
agcaaaatagccaaagaaca

SEQ ID NO: 7246 - DNA, 20 bp, Artificial Sequence
  Antisense compound
tagcaaaatagccaaagaac

SEQ ID NO: 7247 - DNA, 20 bp, Artificial Sequence
  Antisense compound
ctagcaaaatagccaaagaa

SEQ ID NO: 7248 - DNA, 20 bp, Artificial Sequence
  Antisense compound
actagcaaaatagccaaaga

SEQ ID NO: 7249 - DNA, 20 bp, Artificial Sequence
  Antisense compound
gactagcaaaatagccaaag

SEQ ID NO: 7250 - DNA, 20 bp, Artificial Sequence
  Antisense compound
tgactagcaaaatagccaaa

SEQ ID NO: 7251 - DNA, 20 bp, Artificial Sequence
  Antisense compound
atgactagcaaaatagccaa

SEQ ID NO: 7252 - DNA, 20 bp, Artificial Sequence
  Antisense compound
aatgactagcaaaatagcca

SEQ ID NO: 7253 - DNA, 20 bp, Artificial Sequence
  Antisense compound
aaatgactagcaaaatagcc

SEQ ID NO: 7254 - DNA, 20 bp, Artificial Sequence
  Antisense compound
gaaatgactagcaaaatagc

SEQ ID NO: 7255 - DNA, 20 bp, Artificial Sequence
  Antisense compound
tgaaatgactagcaaaatag

SEQ ID NO: 7256 - DNA, 20 bp, Artificial Sequence
  Antisense compound
atgaaatgactagcaaaata

SEQ ID NO: 7257 - DNA, 20 bp, Artificial Sequence
  Antisense compound
gatgaaatgactagcaaaat

SEQ ID NO: 7258 - DNA, 20 bp, Artificial Sequence
  Antisense compound
tgatgaaatgactagcaaaa

SEQ ID NO: 7259 - DNA, 20 bp, Artificial Sequence
  Antisense compound
ctgatgaaatgactagcaaa

SEQ ID NO: 7260 - DNA, 20 bp, Artificial Sequence
  Antisense compound
gctgatgaaatgactagcaa

SEQ ID NO: 7261 - DNA, 20 bp, Artificial Sequence
  Antisense compound
tgctgatgaaatgactagca

SEQ ID NO: 7262 - DNA, 20 bp, Artificial Sequence
  Antisense compound
ttgctgatgaaatgactagc

SEQ ID NO: 7263 - DNA, 20 bp, Artificial Sequence
  Antisense compound
attgctgatgaaatgactag

SEQ ID NO: 7264 - DNA, 20 bp, Artificial Sequence
  Antisense compound
aattgctgatgaaatgacta

SEQ ID NO: 7265 - DNA, 20 bp, Artificial Sequence
  Antisense compound
gaattgctgatgaaatgact

SEQ ID NO: 7266 - DNA, 20 bp, Artificial Sequence
  Antisense compound
agaattgctgatgaaatgac

SEQ ID NO: 7267 - DNA, 20 bp, Artificial Sequence
  Antisense compound
aagaattgctgatgaaatga

SEQ ID NO: 7268 - DNA, 20 bp, Artificial Sequence
  Antisense compound
caagaattgctgatgaaatg

SEQ ID NO: 7269 - DNA, 20 bp, Artificial Sequence
  Antisense compound
ccaagaattgctgatgaaat

SEQ ID NO: 7270 - DNA, 20 bp, Artificial Sequence
  Antisense compound
gccaagaattgctgatgaaa

SEQ ID NO: 7271 - DNA, 20 bp, Artificial Sequence
  Antisense compound
agccaagaattgctgatgaa

SEQ ID NO: 7272 - DNA, 20 bp, Artificial Sequence
  Antisense compound
gagccaagaattgctgatga

SEQ ID NO: 7273 - DNA, 20 bp, Artificial Sequence
  Antisense compound
tgagccaagaattgctgatg

SEQ ID NO: 7274 - DNA, 20 bp, Artificial Sequence
  Antisense compound
atgagccaagaattgctgat

SEQ ID NO: 7275 - DNA, 20 bp, Artificial Sequence
  Antisense compound
catgagccaagaattgctga

SEQ ID NO: 7276 - DNA, 20 bp, Artificial Sequence
  Antisense compound
acatgagccaagaattgctg

SEQ ID NO: 7277 - DNA, 20 bp, Artificial Sequence
  Antisense compound
cacatgagccaagaattgct

SEQ ID NO: 7278 - DNA, 20 bp, Artificial Sequence
  Antisense compound
ccacatgagccaagaattgc

SEQ ID NO: 7279 - DNA, 20 bp, Artificial Sequence
  Antisense compound
accacatgagccaagaattg

SEQ ID NO: 7280 - DNA, 20 bp, Artificial Sequence
  Antisense compound
aaccacatgagccaagaatt

SEQ ID NO: 7281 - DNA, 20 bp, Artificial Sequence
  Antisense compound
aaaccacatgagccaagaat

SEQ ID NO: 7282 - DNA, 20 bp, Artificial Sequence
  Antisense compound
taaaccacatgagccaagaa

SEQ ID NO: 7283 - DNA, 20 bp, Artificial Sequence
  Antisense compound
ataaaccacatgagccaaga

SEQ ID NO: 7284 - DNA, 20 bp, Artificial Sequence
  Antisense compound
gataaaccacatgagccaag

SEQ ID NO: 7285 - DNA, 20 bp, Artificial Sequence
  Antisense compound
tgataaaccacatgagccaa

SEQ ID NO: 7286 - DNA, 20 bp, Artificial Sequence
  Antisense compound
atgataaaccacatgagcca

SEQ ID NO: 7287 - DNA, 20 bp, Artificial Sequence
  Antisense compound
aatgataaaccacatgagcc

SEQ ID NO: 7288 - DNA, 20 bp, Artificial Sequence
  Antisense compound
taatgataaaccacatgagc

SEQ ID NO: 7289 - DNA, 20 bp, Artificial Sequence
  Antisense compound
ctaatgataaaccacatgag

SEQ ID NO: 7290 - DNA, 20 bp, Artificial Sequence
  Antisense compound
actaatgataaaccacatga

SEQ ID NO: 7291 - DNA, 20 bp, Artificial Sequence
  Antisense compound
tactaatgataaaccacatg

SEQ ID NO: 7292 - DNA, 20 bp, Artificial Sequence
  Antisense compound
atactaatgataaaccacat

SEQ ID NO: 7293 - DNA, 20 bp, Artificial Sequence
  Antisense compound
aatactaatgataaaccaca

SEQ ID NO: 7294 - DNA, 20 bp, Artificial Sequence
  Antisense compound
caatactaatgataaaccac

SEQ ID NO: 7295 - DNA, 20 bp, Artificial Sequence
  Antisense compound
acaatactaatgataaacca

SEQ ID NO: 7296 - DNA, 20 bp, Artificial Sequence
  Antisense compound
tacaatactaatgataaacc

SEQ ID NO: 7297 - DNA, 20 bp, Artificial Sequence
  Antisense compound
gtacaatactaatgataaac

SEQ ID NO: 7298 - DNA, 20 bp, Artificial Sequence
  Antisense compound
tgtacaatactaatgataaa

SEQ ID NO: 7299 - DNA, 20 bp, Artificial Sequence
  Antisense compound
ttgtacaatactaatgataa

SEQ ID NO: 7300 - DNA, 20 bp, Artificial Sequence
  Antisense compound
tttgtacaatactaatgata

SEQ ID NO: 7301 - DNA, 20 bp, Artificial Sequence
  Antisense compound
atttgtacaatactaatgat

SEQ ID NO: 7302 - DNA, 20 bp, Artificial Sequence
  Antisense compound
catttgtacaatactaatga

SEQ ID NO: 7303 - DNA, 20 bp, Artificial Sequence
  Antisense compound
ccatttgtacaatactaatg

SEQ ID NO: 7304 - DNA, 20 bp, Artificial Sequence
  Antisense compound
gccatttgtacaatactaat

SEQ ID NO: 7305 - DNA, 20 bp, Artificial Sequence
  Antisense compound
tgccatttgtacaatactaa

SEQ ID NO: 7306 - DNA, 20 bp, Artificial Sequence
  Antisense compound
gtgccatttgtacaatacta

SEQ ID NO: 7307 - DNA, 20 bp, Artificial Sequence
  Antisense compound
ggtgccatttgtacaatact

SEQ ID NO: 7308 - DNA, 20 bp, Artificial Sequence
  Antisense compound
gggtgccatttgtacaatac

SEQ ID NO: 7309 - DNA, 20 bp, Artificial Sequence
  Antisense compound
cgggtgccatttgtacaata

SEQ ID NO: 7310 - DNA, 20 bp, Artificial Sequence
  Antisense compound
acgggtgccatttgtacaat

SEQ ID NO: 7311 - DNA, 20 bp, Artificial Sequence
  Antisense compound
aacgggtgccatttgtacaa

SEQ ID NO: 7312 - DNA, 20 bp, Artificial Sequence
  Antisense compound
aaacgggtgccatttgtaca

SEQ ID NO: 7313 - DNA, 20 bp, Artificial Sequence
  Antisense compound
gaaacgggtgccatttgtac

SEQ ID NO: 7314 - DNA, 20 bp, Artificial Sequence
  Antisense compound
agaaacgggtgccatttgta

SEQ ID NO: 7315 - DNA, 20 bp, Artificial Sequence
  Antisense compound
cagaaacgggtgccatttgt

SEQ ID NO: 7316 - DNA, 20 bp, Artificial Sequence
  Antisense compound
gcagaaacgggtgccatttg

SEQ ID NO: 7317 - DNA, 20 bp, Artificial Sequence
  Antisense compound
tgcagaaacgggtgccattt

SEQ ID NO: 7318 - DNA, 20 bp, Artificial Sequence
  Antisense compound
ttgcagaaacgggtgccatt

SEQ ID NO: 7319 - DNA, 20 bp, Artificial Sequence
  Antisense compound
attgcagaaacgggtgccat

SEQ ID NO: 7320 - DNA, 20 bp, Artificial Sequence
  Antisense compound
cattgcagaaacgggtgcca

SEQ ID NO: 7321 - DNA, 20 bp, Artificial Sequence
  Antisense compound
ccattgcagaaacgggtgcc

SEQ ID NO: 7322 - DNA, 20 bp, Artificial Sequence
  Antisense compound
accattgcagaaacgggtgc

SEQ ID NO: 7323 - DNA, 20 bp, Artificial Sequence
  Antisense compound
aaccattgcagaaacgggtg

SEQ ID NO: 7324 - DNA, 20 bp, Artificial Sequence
  Antisense compound
taaccattgcagaaacgggt

SEQ ID NO: 7325 - DNA, 20 bp, Artificial Sequence
  Antisense compound
ctaaccattgcagaaacggg

SEQ ID NO: 7326 - DNA, 20 bp, Artificial Sequence
  Antisense compound
cctaaccattgcagaaacgg

SEQ ID NO: 7327 - DNA, 20 bp, Artificial Sequence
  Antisense compound
tcctaaccattgcagaaacg

SEQ ID NO: 7328 - DNA, 20 bp, Artificial Sequence
  Antisense compound
atcctaaccattgcagaaac

SEQ ID NO: 7329 - DNA, 20 bp, Artificial Sequence
  Antisense compound
catcctaaccattgcagaaa

SEQ ID NO: 7330 - DNA, 20 bp, Artificial Sequence
  Antisense compound
acatcctaaccattgcagaa

SEQ ID NO: 7331 - DNA, 20 bp, Artificial Sequence
  Antisense compound
tacatcctaaccattgcaga

SEQ ID NO: 7332 - DNA, 20 bp, Artificial Sequence
  Antisense compound
gtacatcctaaccattgcag

SEQ ID NO: 7333 - DNA, 20 bp, Artificial Sequence
  Antisense compound
tgtacatcctaaccattgca

SEQ ID NO: 7334 - DNA, 20 bp, Artificial Sequence
  Antisense compound
atgtacatcctaaccattgc

SEQ ID NO: 7335 - DNA, 20 bp, Artificial Sequence
  Antisense compound
gatgtacatcctaaccattg

SEQ ID NO: 7336 - DNA, 20 bp, Artificial Sequence
  Antisense compound
agatgtacatcctaaccatt

SEQ ID NO: 7337 - DNA, 20 bp, Artificial Sequence
  Antisense compound
aagatgtacatcctaaccat

SEQ ID NO: 7338 - DNA, 20 bp, Artificial Sequence
  Antisense compound
gaagatgtacatcctaacca

SEQ ID NO: 7339 - DNA, 20 bp, Artificial Sequence
  Antisense compound
agaagatgtacatcctaacc

SEQ ID NO: 7340 - DNA, 20 bp, Artificial Sequence
  Antisense compound
aagaagatgtacatcctaac

SEQ ID NO: 7341 - DNA, 20 bp, Artificial Sequence
  Antisense compound
aaagaagatgtacatcctaa

SEQ ID NO: 7342 - DNA, 20 bp, Artificial Sequence
  Antisense compound
caaagaagatgtacatccta

SEQ ID NO: 7343 - DNA, 20 bp, Artificial Sequence
  Antisense compound
gcaaagaagatgtacatcct

SEQ ID NO: 7344 - DNA, 20 bp, Artificial Sequence
  Antisense compound
agcaaagaagatgtacatcc

SEQ ID NO: 7345 - DNA, 20 bp, Artificial Sequence
  Antisense compound
aagcaaagaagatgtacatc

SEQ ID NO: 7346 - DNA, 20 bp, Artificial Sequence
  Antisense compound
gaagcaaagaagatgtacat

SEQ ID NO: 7347 - DNA, 20 bp, Artificial Sequence
  Antisense compound
agaagcaaagaagatgtaca

SEQ ID NO: 7348 - DNA, 20 bp, Artificial Sequence
  Antisense compound
aagaagcaaagaagatgtac

SEQ ID NO: 7349 - DNA, 20 bp, Artificial Sequence
  Antisense compound
aaagaagcaaagaagatgta

SEQ ID NO: 7350 - DNA, 20 bp, Artificial Sequence
  Antisense compound
gaaagaagcaaagaagatgt

SEQ ID NO: 7351 - DNA, 20 bp, Artificial Sequence
  Antisense compound
agaaagaagcaaagaagatg

SEQ ID NO: 7352 - DNA, 20 bp, Artificial Sequence
  Antisense compound
tagaaagaagcaaagaagat

SEQ ID NO: 7353 - DNA, 20 bp, Artificial Sequence
  Antisense compound
gtagaaagaagcaaagaaga

SEQ ID NO: 7354 - DNA, 20 bp, Artificial Sequence
  Antisense compound
agtagaaagaagcaaagaag

SEQ ID NO: 7355 - DNA, 20 bp, Artificial Sequence
  Antisense compound
tagtagaaagaagcaaagaa

SEQ ID NO: 7356 - DNA, 20 bp, Artificial Sequence
  Antisense compound
gtagtagaaagaagcaaaga

SEQ ID NO: 7357 - DNA, 20 bp, Artificial Sequence
  Antisense compound
tgtagtagaaagaagcaaag

SEQ ID NO: 7358 - DNA, 20 bp, Artificial Sequence
  Antisense compound
atgtagtagaaagaagcaaa

SEQ ID NO: 7359 - DNA, 20 bp, Artificial Sequence
  Antisense compound
tatgtagtagaaagaagcaa

SEQ ID NO: 7360 - DNA, 20 bp, Artificial Sequence
  Antisense compound
atatgtagtagaaagaagca

SEQ ID NO: 7361 - DNA, 20 bp, Artificial Sequence
  Antisense compound
catatgtagtagaaagaagc

SEQ ID NO: 7362 - DNA, 20 bp, Artificial Sequence
  Antisense compound
ccatatgtagtagaaagaag

SEQ ID NO: 7363 - DNA, 20 bp, Artificial Sequence
  Antisense compound
tccatatgtagtagaaagaa

SEQ ID NO: 7364 - DNA, 20 bp, Artificial Sequence
  Antisense compound
ttccatatgtagtagaaaga

SEQ ID NO: 7365 - DNA, 20 bp, Artificial Sequence
  Antisense compound
cttccatatgtagtagaaag

SEQ ID NO: 7366 - DNA, 20 bp, Artificial Sequence
  Antisense compound
tcttccatatgtagtagaaa

SEQ ID NO: 7367 - DNA, 20 bp, Artificial Sequence
  Antisense compound
ctcttccatatgtagtagaa

SEQ ID NO: 7368 - DNA, 20 bp, Artificial Sequence
  Antisense compound
gctcttccatatgtagtaga

SEQ ID NO: 7369 - DNA, 20 bp, Artificial Sequence
  Antisense compound
agctcttccatatgtagtag

SEQ ID NO: 7370 - DNA, 20 bp, Artificial Sequence
  Antisense compound
tagctcttccatatgtagta

SEQ ID NO: 7371 - DNA, 20 bp, Artificial Sequence
  Antisense compound
atagctcttccatatgtagt

SEQ ID NO: 7372 - DNA, 20 bp, Artificial Sequence
  Antisense compound
catagctcttccatatgtag

SEQ ID NO: 7373 - DNA, 20 bp, Artificial Sequence
  Antisense compound
acatagctcttccatatgta

SEQ ID NO: 7374 - DNA, 20 bp, Artificial Sequence
  Antisense compound
aacatagctcttccatatgt

SEQ ID NO: 7375 - DNA, 20 bp, Artificial Sequence
  Antisense compound
gaacatagctcttccatatg

SEQ ID NO: 7376 - DNA, 20 bp, Artificial Sequence
  Antisense compound
tgaacatagctcttccatat

SEQ ID NO: 7377 - DNA, 20 bp, Artificial Sequence
  Antisense compound
atgaacatagctcttccata

SEQ ID NO: 7378 - DNA, 20 bp, Artificial Sequence
  Antisense compound
tatgaacatagctcttccat

SEQ ID NO: 7379 - DNA, 20 bp, Artificial Sequence
  Antisense compound
atatgaacatagctcttcca

SEQ ID NO: 7380 - DNA, 20 bp, Artificial Sequence
  Antisense compound
gatatgaacatagctcttcc

SEQ ID NO: 7381 - DNA, 20 bp, Artificial Sequence
  Antisense compound
tgatatgaacatagctcttc

SEQ ID NO: 7382 - DNA, 20 bp, Artificial Sequence
  Antisense compound
atgatatgaacatagctctt

SEQ ID NO: 7383 - DNA, 20 bp, Artificial Sequence
  Antisense compound
catgatatgaacatagctct

SEQ ID NO: 7384 - DNA, 20 bp, Artificial Sequence
  Antisense compound
ccatgatatgaacatagctc

SEQ ID NO: 7385 - DNA, 20 bp, Artificial Sequence
  Antisense compound
tccatgatatgaacatagct

SEQ ID NO: 7386 - DNA, 20 bp, Artificial Sequence
  Antisense compound
atccatgatatgaacatagc

SEQ ID NO: 7387 - DNA, 20 bp, Artificial Sequence
  Antisense compound
catccatgatatgaacatag

SEQ ID NO: 7388 - DNA, 20 bp, Artificial Sequence
  Antisense compound
ccatccatgatatgaacata

SEQ ID NO: 7389 - DNA, 20 bp, Artificial Sequence
  Antisense compound
accatccatgatatgaacat

SEQ ID NO: 7390 - DNA, 20 bp, Artificial Sequence
  Antisense compound
aaccatccatgatatgaaca

SEQ ID NO: 7391 - DNA, 20 bp, Artificial Sequence
  Antisense compound
caaccatccatgatatgaac

SEQ ID NO: 7392 - DNA, 20 bp, Artificial Sequence
  Antisense compound
gcaaccatccatgatatgaa

SEQ ID NO: 7393 - DNA, 20 bp, Artificial Sequence
  Antisense compound
tgcaaccatccatgatatga

SEQ ID NO: 7394 - DNA, 20 bp, Artificial Sequence
  Antisense compound
gtgcaaccatccatgatatg

SEQ ID NO: 7395 - DNA, 20 bp, Artificial Sequence
  Antisense compound
ggtgcaaccatccatgatat

SEQ ID NO: 7396 - DNA, 20 bp, Artificial Sequence
  Antisense compound
aggtgcaaccatccatgata

SEQ ID NO: 7397 - DNA, 20 bp, Artificial Sequence
  Antisense compound
gaggtgcaaccatccatgat

SEQ ID NO: 7398 - DNA, 20 bp, Artificial Sequence
  Antisense compound
agaggtgcaaccatccatga

SEQ ID NO: 7399 - DNA, 20 bp, Artificial Sequence
  Antisense compound
aagaggtgcaaccatccatg

SEQ ID NO: 7400 - DNA, 20 bp, Artificial Sequence
  Antisense compound
gaagaggtgcaaccatccat

SEQ ID NO: 7401 - DNA, 20 bp, Artificial Sequence
  Antisense compound
cgaagaggtgcaaccatcca

SEQ ID NO: 7402 - DNA, 20 bp, Artificial Sequence
  Antisense compound
tcgaagaggtgcaaccatcc

SEQ ID NO: 7403 - DNA, 20 bp, Artificial Sequence
  Antisense compound
gtcgaagaggtgcaaccatc

SEQ ID NO: 7404 - DNA, 20 bp, Artificial Sequence
  Antisense compound
agtcgaagaggtgcaaccat

SEQ ID NO: 7405 - DNA, 20 bp, Artificial Sequence
  Antisense compound
aagtcgaagaggtgcaacca

SEQ ID NO: 7406 - DNA, 20 bp, Artificial Sequence
  Antisense compound
caagtcgaagaggtgcaacc

SEQ ID NO: 7407 - DNA, 20 bp, Artificial Sequence
  Antisense compound
gcaagtcgaagaggtgcaac

SEQ ID NO: 7408 - DNA, 20 bp, Artificial Sequence
  Antisense compound
tgcaagtcgaagaggtgcaa

SEQ ID NO: 7409 - DNA, 20 bp, Artificial Sequence
  Antisense compound
atgcaagtcgaagaggtgca

SEQ ID NO: 7410 - DNA, 20 bp, Artificial Sequence
  Antisense compound
catgcaagtcgaagaggtgc

SEQ ID NO: 7411 - DNA, 20 bp, Artificial Sequence
  Antisense compound
tcatgcaagtcgaagaggtg

SEQ ID NO: 7412 - DNA, 20 bp, Artificial Sequence
  Antisense compound
atcatgcaagtcgaagaggt

SEQ ID NO: 7413 - DNA, 20 bp, Artificial Sequence
  Antisense compound
catcatgcaagtcgaagagg

SEQ ID NO: 7414 - DNA, 20 bp, Artificial Sequence
  Antisense compound
acatcatgcaagtcgaagag

SEQ ID NO: 7415 - DNA, 20 bp, Artificial Sequence
  Antisense compound
cacatcatgcaagtcgaaga

SEQ ID NO: 7416 - DNA, 20 bp, Artificial Sequence
  Antisense compound
gcacatcatgcaagtcgaag

SEQ ID NO: 7417 - DNA, 20 bp, Artificial Sequence
  Antisense compound
agcacatcatgcaagtcgaa

SEQ ID NO: 7418 - DNA, 20 bp, Artificial Sequence
  Antisense compound
tagcacatcatgcaagtcga

SEQ ID NO: 7419 - DNA, 20 bp, Artificial Sequence
  Antisense compound
atagcacatcatgcaagtcg

SEQ ID NO: 7420 - DNA, 20 bp, Artificial Sequence
  Antisense compound
tatagcacatcatgcaagtc

SEQ ID NO: 7421 - DNA, 20 bp, Artificial Sequence
  Antisense compound
ttatagcacatcatgcaagt

SEQ ID NO: 7422 - DNA, 20 bp, Artificial Sequence
  Antisense compound
cttatagcacatcatgcaag

SEQ ID NO: 7423 - DNA, 20 bp, Artificial Sequence
  Antisense compound
gcttatagcacatcatgcaa

SEQ ID NO: 7424 - DNA, 20 bp, Artificial Sequence
  Antisense compound
cgcttatagcacatcatgca

SEQ ID NO: 7425 - DNA, 20 bp, Artificial Sequence
  Antisense compound
gcgcttatagcacatcatgc

SEQ ID NO: 7426 - DNA, 20 bp, Artificial Sequence
  Antisense compound
tgcgcttatagcacatcatg

SEQ ID NO: 7427 - DNA, 20 bp, Artificial Sequence
  Antisense compound
ttgcgcttatagcacatcat

SEQ ID NO: 7428 - DNA, 20 bp, Artificial Sequence
  Antisense compound
attgcgcttatagcacatca

SEQ ID NO: 7429 - DNA, 20 bp, Artificial Sequence
  Antisense compound
gattgcgcttatagcacatc

SEQ ID NO: 7430 - DNA, 20 bp, Artificial Sequence
  Antisense compound
cgattgcgcttatagcacat

SEQ ID NO: 7431 - DNA, 20 bp, Artificial Sequence
  Antisense compound
acgattgcgcttatagcaca

SEQ ID NO: 7432 - DNA, 20 bp, Artificial Sequence
  Antisense compound
cacgattgcgcttatagcac

SEQ ID NO: 7433 - DNA, 20 bp, Artificial Sequence
  Antisense compound
gcacgattgcgcttatagca

SEQ ID NO: 7434 - DNA, 20 bp, Artificial Sequence
  Antisense compound
ggcacgattgcgcttatagc

SEQ ID NO: 7435 - DNA, 20 bp, Artificial Sequence
  Antisense compound
tggcacgattgcgcttatag

SEQ ID NO: 7436 - DNA, 20 bp, Artificial Sequence
  Antisense compound
gtggcacgattgcgcttata

SEQ ID NO: 7437 - DNA, 20 bp, Artificial Sequence
  Antisense compound
tgtggcacgattgcgcttat

SEQ ID NO: 7438 - DNA, 20 bp, Artificial Sequence
  Antisense compound
gtgtggcacgattgcgctta

SEQ ID NO: 7439 - DNA, 20 bp, Artificial Sequence
  Antisense compound
cgtgtggcacgattgcgctt

SEQ ID NO: 7440 - DNA, 20 bp, Artificial Sequence
  Antisense compound
gcgtgtggcacgattgcgct

SEQ ID NO: 7441 - DNA, 20 bp, Artificial Sequence
  Antisense compound
cgcgtgtggcacgattgcgc

SEQ ID NO: 7442 - DNA, 20 bp, Artificial Sequence
  Antisense compound
acgcgtgtggcacgattgcg

SEQ ID NO: 7443 - DNA, 20 bp, Artificial Sequence
  Antisense compound
aacgcgtgtggcacgattgc

SEQ ID NO: 7444 - DNA, 20 bp, Artificial Sequence
  Antisense compound
caacgcgtgtggcacgattg

SEQ ID NO: 7445 - DNA, 20 bp, Artificial Sequence
  Antisense compound
tcaacgcgtgtggcacgatt

SEQ ID NO: 7446 - DNA, 20 bp, Artificial Sequence
  Antisense compound
ctcaacgcgtgtggcacgat

SEQ ID NO: 7447 - DNA, 20 bp, Artificial Sequence
  Antisense compound
actcaacgcgtgtggcacga

SEQ ID NO: 7448 - DNA, 20 bp, Artificial Sequence
  Antisense compound
cactcaacgcgtgtggcacg

SEQ ID NO: 7449 - DNA, 20 bp, Artificial Sequence
  Antisense compound
acactcaacgcgtgtggcac

SEQ ID NO: 7450 - DNA, 20 bp, Artificial Sequence
  Antisense compound
tacactcaacgcgtgtggca

SEQ ID NO: 7451 - DNA, 20 bp, Artificial Sequence
  Antisense compound
gtacactcaacgcgtgtggc

SEQ ID NO: 7452 - DNA, 20 bp, Artificial Sequence
  Antisense compound
tgtacactcaacgcgtgtgg

SEQ ID NO: 7453 - DNA, 20 bp, Artificial Sequence
  Antisense compound
ttgtacactcaacgcgtgtg

SEQ ID NO: 7454 - DNA, 20 bp, Artificial Sequence
  Antisense compound
gttgtacactcaacgcgtgt

SEQ ID NO: 7455 - DNA, 20 bp, Artificial Sequence
  Antisense compound
agttgtacactcaacgcgtg

SEQ ID NO: 7456 - DNA, 20 bp, Artificial Sequence
  Antisense compound
tagttgtacactcaacgcgt

SEQ ID NO: 7457 - DNA, 20 bp, Artificial Sequence
  Antisense compound
atagttgtacactcaacgcg

SEQ ID NO: 7458 - DNA, 20 bp, Artificial Sequence
  Antisense compound
aatagttgtacactcaacgc

SEQ ID NO: 7459 - DNA, 20 bp, Artificial Sequence
  Antisense compound
caatagttgtacactcaacg

SEQ ID NO: 7460 - DNA, 20 bp, Artificial Sequence
  Antisense compound
acaatagttgtacactcaac

SEQ ID NO: 7461 - DNA, 20 bp, Artificial Sequence
  Antisense compound
aacaatagttgtacactcaa

SEQ ID NO: 7462 - DNA, 20 bp, Artificial Sequence
  Antisense compound
taacaatagttgtacactca

SEQ ID NO: 7463 - DNA, 20 bp, Artificial Sequence
  Antisense compound
ttaacaatagttgtacactc

SEQ ID NO: 7464 - DNA, 20 bp, Artificial Sequence
  Antisense compound
attaacaatagttgtacact

SEQ ID NO: 7465 - DNA, 20 bp, Artificial Sequence
  Antisense compound
cattaacaatagttgtacac

SEQ ID NO: 7466 - DNA, 20 bp, Artificial Sequence
  Antisense compound
ccattaacaatagttgtaca

SEQ ID NO: 7467 - DNA, 20 bp, Artificial Sequence
  Antisense compound
gccattaacaatagttgtac

SEQ ID NO: 7468 - DNA, 20 bp, Artificial Sequence
  Antisense compound
tgccattaacaatagttgta

SEQ ID NO: 7469 - DNA, 20 bp, Artificial Sequence
  Antisense compound
atgccattaacaatagttgt

SEQ ID NO: 7470 - DNA, 20 bp, Artificial Sequence
  Antisense compound
catgccattaacaatagttg

SEQ ID NO: 7471 - DNA, 20 bp, Artificial Sequence
  Antisense compound
tcatgccattaacaatagtt

SEQ ID NO: 7472 - DNA, 20 bp, Artificial Sequence
  Antisense compound
ttcatgccattaacaatagt

SEQ ID NO: 7473 - DNA, 20 bp, Artificial Sequence
  Antisense compound
cttcatgccattaacaatag

SEQ ID NO: 7474 - DNA, 20 bp, Artificial Sequence
  Antisense compound
tcttcatgccattaacaata

SEQ ID NO: 7475 - DNA, 20 bp, Artificial Sequence
  Antisense compound
ctcttcatgccattaacaat

SEQ ID NO: 7476 - DNA, 20 bp, Artificial Sequence
  Antisense compound
tctcttcatgccattaacaa

SEQ ID NO: 7477 - DNA, 20 bp, Artificial Sequence
  Antisense compound
atctcttcatgccattaaca

SEQ ID NO: 7478 - DNA, 20 bp, Artificial Sequence
  Antisense compound
gatctcttcatgccattaac

SEQ ID NO: 7479 - DNA, 20 bp, Artificial Sequence
  Antisense compound
agatctcttcatgccattaa

SEQ ID NO: 7480 - DNA, 20 bp, Artificial Sequence
  Antisense compound
aagatctcttcatgccatta

SEQ ID NO: 7481 - DNA, 20 bp, Artificial Sequence
  Antisense compound
aaagatctcttcatgccatt

SEQ ID NO: 7482 - DNA, 20 bp, Artificial Sequence
  Antisense compound
gaaagatctcttcatgccat

SEQ ID NO: 7483 - DNA, 20 bp, Artificial Sequence
  Antisense compound
agaaagatctcttcatgcca

SEQ ID NO: 7484 - DNA, 20 bp, Artificial Sequence
  Antisense compound
tagaaagatctcttcatgcc

SEQ ID NO: 7485 - DNA, 20 bp, Artificial Sequence
  Antisense compound
atagaaagatctcttcatgc

SEQ ID NO: 7486 - DNA, 20 bp, Artificial Sequence
  Antisense compound
catagaaagatctcttcatg

SEQ ID NO: 7487 - DNA, 20 bp, Artificial Sequence
  Antisense compound
acatagaaagatctcttcat

SEQ ID NO: 7488 - DNA, 20 bp, Artificial Sequence
  Antisense compound
gacatagaaagatctcttca

SEQ ID NO: 7489 - DNA, 20 bp, Artificial Sequence
  Antisense compound
agacatagaaagatctcttc

SEQ ID NO: 7490 - DNA, 20 bp, Artificial Sequence
  Antisense compound
tagacatagaaagatctctt

SEQ ID NO: 7491 - DNA, 20 bp, Artificial Sequence
  Antisense compound
atagacatagaaagatctct

SEQ ID NO: 7492 - DNA, 20 bp, Artificial Sequence
  Antisense compound
catagacatagaaagatctc

SEQ ID NO: 7493 - DNA, 20 bp, Artificial Sequence
  Antisense compound
gcatagacatagaaagatct

SEQ ID NO: 7494 - DNA, 20 bp, Artificial Sequence
  Antisense compound
tgcatagacatagaaagatc

SEQ ID NO: 7495 - DNA, 20 bp, Artificial Sequence
  Antisense compound
ttgcatagacatagaaagat

SEQ ID NO: 7496 - DNA, 20 bp, Artificial Sequence
  Antisense compound
tttgcatagacatagaaaga

SEQ ID NO: 7497 - DNA, 20 bp, Artificial Sequence
  Antisense compound
atttgcatagacatagaaag

SEQ ID NO: 7498 - DNA, 20 bp, Artificial Sequence
  Antisense compound
catttgcatagacatagaaa

SEQ ID NO: 7499 - DNA, 20 bp, Artificial Sequence
  Antisense compound
ccatttgcatagacatagaa

SEQ ID NO: 7500 - DNA, 20 bp, Artificial Sequence
  Antisense compound
tccatttgcatagacataga

SEQ ID NO: 7501 - DNA, 20 bp, Artificial Sequence
  Antisense compound
ctccatttgcatagacatag

SEQ ID NO: 7502 - DNA, 20 bp, Artificial Sequence
  Antisense compound
cctccatttgcatagacata

SEQ ID NO: 7503 - DNA, 20 bp, Artificial Sequence
  Antisense compound
gcctccatttgcatagacat

SEQ ID NO: 7504 - DNA, 20 bp, Artificial Sequence
  Antisense compound
ggcctccatttgcatagaca

SEQ ID NO: 7505 - DNA, 20 bp, Artificial Sequence
  Antisense compound
cggcctccatttgcatagac

SEQ ID NO: 7506 - DNA, 20 bp, Artificial Sequence
  Antisense compound
acggcctccatttgcataga

SEQ ID NO: 7507 - DNA, 20 bp, Artificial Sequence
  Antisense compound
cacggcctccatttgcatag

SEQ ID NO: 7508 - DNA, 20 bp, Artificial Sequence
  Antisense compound
ccacggcctccatttgcata

SEQ ID NO: 7509 - DNA, 20 bp, Artificial Sequence
  Antisense compound
gccacggcctccatttgcat

SEQ ID NO: 7510 - DNA, 20 bp, Artificial Sequence
  Antisense compound
agccacggcctccatttgca

SEQ ID NO: 7511 - DNA, 20 bp, Artificial Sequence
  Antisense compound
aagccacggcctccatttgc

SEQ ID NO: 7512 - DNA, 20 bp, Artificial Sequence
  Antisense compound
gaagccacggcctccatttg

SEQ ID NO: 7513 - DNA, 20 bp, Artificial Sequence
  Antisense compound
agaagccacggcctccattt

SEQ ID NO: 7514 - DNA, 20 bp, Artificial Sequence
  Antisense compound
cagaagccacggcctccatt

SEQ ID NO: 7515 - DNA, 20 bp, Artificial Sequence
  Antisense compound
gcagaagccacggcctccat

SEQ ID NO: 7516 - DNA, 20 bp, Artificial Sequence
  Antisense compound
tgcagaagccacggcctcca

SEQ ID NO: 7517 - DNA, 20 bp, Artificial Sequence
  Antisense compound
ttgcagaagccacggcctcc

SEQ ID NO: 7518 - DNA, 20 bp, Artificial Sequence
  Antisense compound
cttgcagaagccacggcctc

SEQ ID NO: 7519 - DNA, 20 bp, Artificial Sequence
  Antisense compound
tcttgcagaagccacggcct

SEQ ID NO: 7520 - DNA, 20 bp, Artificial Sequence
  Antisense compound
gtcttgcagaagccacggcc

SEQ ID NO: 7521 - DNA, 20 bp, Artificial Sequence
  Antisense compound
agtcttgcagaagccacggc

SEQ ID NO: 7522 - DNA, 20 bp, Artificial Sequence
  Antisense compound
gagtcttgcagaagccacgg

SEQ ID NO: 7523 - DNA, 20 bp, Artificial Sequence
  Antisense compound
tgagtcttgcagaagccacg

SEQ ID NO: 7524 - DNA, 20 bp, Artificial Sequence
  Antisense compound
gtgagtcttgcagaagccac

SEQ ID NO: 7525 - DNA, 20 bp, Artificial Sequence
  Antisense compound
tgtgagtcttgcagaagcca

SEQ ID NO: 7526 - DNA, 20 bp, Artificial Sequence
  Antisense compound
ttgtgagtcttgcagaagcc

SEQ ID NO: 7527 - DNA, 20 bp, Artificial Sequence
  Antisense compound
attgtgagtcttgcagaagc

SEQ ID NO: 7528 - DNA, 20 bp, Artificial Sequence
  Antisense compound
aattgtgagtcttgcagaag

SEQ ID NO: 7529 - DNA, 20 bp, Artificial Sequence
  Antisense compound
caattgtgagtcttgcagaa

SEQ ID NO: 7530 - DNA, 20 bp, Artificial Sequence
  Antisense compound
ccaattgtgagtcttgcaga

SEQ ID NO: 7531 - DNA, 20 bp, Artificial Sequence
  Antisense compound
tccaattgtgagtcttgcag

SEQ ID NO: 7532 - DNA, 20 bp, Artificial Sequence
  Antisense compound
ttccaattgtgagtcttgca

SEQ ID NO: 7533 - DNA, 20 bp, Artificial Sequence
  Antisense compound
attccaattgtgagtcttgc

SEQ ID NO: 7534 - DNA, 20 bp, Artificial Sequence
  Antisense compound
aattccaattgtgagtcttg

SEQ ID NO: 7535 - DNA, 20 bp, Artificial Sequence
  Antisense compound
caattccaattgtgagtctt

SEQ ID NO: 7536 - DNA, 20 bp, Artificial Sequence
  Antisense compound
acaattccaattgtgagtct

SEQ ID NO: 7537 - DNA, 20 bp, Artificial Sequence
  Antisense compound
gacaattccaattgtgagtc

SEQ ID NO: 7538 - DNA, 20 bp, Artificial Sequence
  Antisense compound
agacaattccaattgtgagt

SEQ ID NO: 7539 - DNA, 20 bp, Artificial Sequence
  Antisense compound
gagacaattccaattgtgag

SEQ ID NO: 7540 - DNA, 20 bp, Artificial Sequence
  Antisense compound
tgagacaattccaattgtga

SEQ ID NO: 7541 - DNA, 20 bp, Artificial Sequence
  Antisense compound
ttgagacaattccaattgtg

SEQ ID NO: 7542 - DNA, 20 bp, Artificial Sequence
  Antisense compound
attgagacaattccaattgt

SEQ ID NO: 7543 - DNA, 20 bp, Artificial Sequence
  Antisense compound
aattgagacaattccaattg

SEQ ID NO: 7544 - DNA, 20 bp, Artificial Sequence
  Antisense compound
caattgagacaattccaatt

SEQ ID NO: 7545 - DNA, 20 bp, Artificial Sequence
  Antisense compound
acaattgagacaattccaat

SEQ ID NO: 7546 - DNA, 20 bp, Artificial Sequence
  Antisense compound
cacaattgagacaattccaa

SEQ ID NO: 7547 - DNA, 20 bp, Artificial Sequence
  Antisense compound
tcacaattgagacaattcca

SEQ ID NO: 7548 - DNA, 20 bp, Artificial Sequence
  Antisense compound
gtcacaattgagacaattcc

SEQ ID NO: 7549 - DNA, 20 bp, Artificial Sequence
  Antisense compound
tgtcacaattgagacaattc

SEQ ID NO: 7550 - DNA, 20 bp, Artificial Sequence
  Antisense compound
gtgtcacaattgagacaatt

SEQ ID NO: 7551 - DNA, 20 bp, Artificial Sequence
  Antisense compound
tgtgtcacaattgagacaat

SEQ ID NO: 7552 - DNA, 20 bp, Artificial Sequence
  Antisense compound
atgtgtcacaattgagacaa

SEQ ID NO: 7553 - DNA, 20 bp, Artificial Sequence
  Antisense compound
aatgtgtcacaattgagaca

SEQ ID NO: 7554 - DNA, 20 bp, Artificial Sequence
  Antisense compound
aaatgtgtcacaattgagac

SEQ ID NO: 7555 - DNA, 20 bp, Artificial Sequence
  Antisense compound
aaaatgtgtcacaattgaga

SEQ ID NO: 7556 - DNA, 20 bp, Artificial Sequence
  Antisense compound
caaaatgtgtcacaattgag

SEQ ID NO: 7557 - DNA, 20 bp, Artificial Sequence
  Antisense compound
gcaaaatgtgtcacaattga

SEQ ID NO: 7558 - DNA, 20 bp, Artificial Sequence
  Antisense compound
tgcaaaatgtgtcacaattg

SEQ ID NO: 7559 - DNA, 20 bp, Artificial Sequence
  Antisense compound
gtgcaaaatgtgtcacaatt

SEQ ID NO: 7560 - DNA, 20 bp, Artificial Sequence
  Antisense compound
agtgcaaaatgtgtcacaat

SEQ ID NO: 7561 - DNA, 20 bp, Artificial Sequence
  Antisense compound
cagtgcaaaatgtgtcacaa

SEQ ID NO: 7562 - DNA, 20 bp, Artificial Sequence
  Antisense compound
ccagtgcaaaatgtgtcaca

SEQ ID NO: 7563 - DNA, 20 bp, Artificial Sequence
  Antisense compound
accagtgcaaaatgtgtcac

SEQ ID NO: 7564 - DNA, 20 bp, Artificial Sequence
  Antisense compound
taccagtgcaaaatgtgtca

SEQ ID NO: 7565 - DNA, 20 bp, Artificial Sequence
  Antisense compound
ctaccagtgcaaaatgtgtc

SEQ ID NO: 7566 - DNA, 20 bp, Artificial Sequence
  Antisense compound
actaccagtgcaaaatgtgt

SEQ ID NO: 7567 - DNA, 20 bp, Artificial Sequence
  Antisense compound
tactaccagtgcaaaatgtg

SEQ ID NO: 7568 - DNA, 20 bp, Artificial Sequence
  Antisense compound
gtactaccagtgcaaaatgt

SEQ ID NO: 7569 - DNA, 20 bp, Artificial Sequence
  Antisense compound
tgtactaccagtgcaaaatg

SEQ ID NO: 7570 - DNA, 20 bp, Artificial Sequence
  Antisense compound
atgtactaccagtgcaaaat

SEQ ID NO: 7571 - DNA, 20 bp, Artificial Sequence
  Antisense compound
aatgtactaccagtgcaaaa

SEQ ID NO: 7572 - DNA, 20 bp, Artificial Sequence
  Antisense compound
gaatgtactaccagtgcaaa

SEQ ID NO: 7573 - DNA, 20 bp, Artificial Sequence
  Antisense compound
tgaatgtactaccagtgcaa

SEQ ID NO: 7574 - DNA, 20 bp, Artificial Sequence
  Antisense compound
atgaatgtactaccagtgca

SEQ ID NO: 7575 - DNA, 20 bp, Artificial Sequence
  Antisense compound
aatgaatgtactaccagtgc

SEQ ID NO: 7576 - DNA, 20 bp, Artificial Sequence
  Antisense compound
taatgaatgtactaccagtg

SEQ ID NO: 7577 - DNA, 20 bp, Artificial Sequence
  Antisense compound
ctaatgaatgtactaccagt

SEQ ID NO: 7578 - DNA, 20 bp, Artificial Sequence
  Antisense compound
actaatgaatgtactaccag

SEQ ID NO: 7579 - DNA, 20 bp, Artificial Sequence
  Antisense compound
cactaatgaatgtactacca

SEQ ID NO: 7580 - DNA, 20 bp, Artificial Sequence
  Antisense compound
tcactaatgaatgtactacc

SEQ ID NO: 7581 - DNA, 20 bp, Artificial Sequence
  Antisense compound
atcactaatgaatgtactac

SEQ ID NO: 7582 - DNA, 20 bp, Artificial Sequence
  Antisense compound
catcactaatgaatgtacta

SEQ ID NO: 7583 - DNA, 20 bp, Artificial Sequence
  Antisense compound
tcatcactaatgaatgtact

SEQ ID NO: 7584 - DNA, 20 bp, Artificial Sequence
  Antisense compound
ttcatcactaatgaatgtac

SEQ ID NO: 7585 - DNA, 20 bp, Artificial Sequence
  Antisense compound
cttcatcactaatgaatgta

SEQ ID NO: 7586 - DNA, 20 bp, Artificial Sequence
  Antisense compound
acttcatcactaatgaatgt

SEQ ID NO: 7587 - DNA, 20 bp, Artificial Sequence
  Antisense compound
aacttcatcactaatgaatg

SEQ ID NO: 7588 - DNA, 20 bp, Artificial Sequence
  Antisense compound
caacttcatcactaatgaat

SEQ ID NO: 7589 - DNA, 20 bp, Artificial Sequence
  Antisense compound
gcaacttcatcactaatgaa

SEQ ID NO: 7590 - DNA, 20 bp, Artificial Sequence
  Antisense compound
agcaacttcatcactaatga

SEQ ID NO: 7591 - DNA, 20 bp, Artificial Sequence
  Antisense compound
gagcaacttcatcactaatg

SEQ ID NO: 7592 - DNA, 20 bp, Artificial Sequence
  Antisense compound
cgagcaacttcatcactaat

SEQ ID NO: 7593 - DNA, 20 bp, Artificial Sequence
  Antisense compound
acgagcaacttcatcactaa

SEQ ID NO: 7594 - DNA, 20 bp, Artificial Sequence
  Antisense compound
cacgagcaacttcatcacta

SEQ ID NO: 7595 - DNA, 20 bp, Artificial Sequence
  Antisense compound
tcacgagcaacttcatcact

SEQ ID NO: 7596 - DNA, 20 bp, Artificial Sequence
  Antisense compound
atcacgagcaacttcatcac

SEQ ID NO: 7597 - DNA, 20 bp, Artificial Sequence
  Antisense compound
aatcacgagcaacttcatca

SEQ ID NO: 7598 - DNA, 20 bp, Artificial Sequence
  Antisense compound
aaatcacgagcaacttcatc

SEQ ID NO: 7599 - DNA, 20 bp, Artificial Sequence
  Antisense compound
caaatcacgagcaacttcat

SEQ ID NO: 7600 - DNA, 20 bp, Artificial Sequence
  Antisense compound
acaaatcacgagcaacttca

SEQ ID NO: 7601 - DNA, 20 bp, Artificial Sequence
  Antisense compound
gacaaatcacgagcaacttc

SEQ ID NO: 7602 - DNA, 20 bp, Artificial Sequence
  Antisense compound
tgacaaatcacgagcaactt

SEQ ID NO: 7603 - DNA, 20 bp, Artificial Sequence
  Antisense compound
gtgacaaatcacgagcaact

SEQ ID NO: 7604 - DNA, 20 bp, Artificial Sequence
  Antisense compound
agtgacaaatcacgagcaac

SEQ ID NO: 7605 - DNA, 20 bp, Artificial Sequence
  Antisense compound
gagtgacaaatcacgagcaa

SEQ ID NO: 7606 - DNA, 20 bp, Artificial Sequence
  Antisense compound
ggagtgacaaatcacgagca

SEQ ID NO: 7607 - DNA, 20 bp, Artificial Sequence
  Antisense compound
tggagtgacaaatcacgagc

SEQ ID NO: 7608 - DNA, 20 bp, Artificial Sequence
  Antisense compound
ctggagtgacaaatcacgag

SEQ ID NO: 7609 - DNA, 20 bp, Artificial Sequence
  Antisense compound
actggagtgacaaatcacga

SEQ ID NO: 7610 - DNA, 20 bp, Artificial Sequence
  Antisense compound
aactggagtgacaaatcacg

SEQ ID NO: 7611 - DNA, 20 bp, Artificial Sequence
  Antisense compound
aaactggagtgacaaatcac

SEQ ID NO: 7612 - DNA, 20 bp, Artificial Sequence
  Antisense compound
taaactggagtgacaaatca

SEQ ID NO: 7613 - DNA, 20 bp, Artificial Sequence
  Antisense compound
ttaaactggagtgacaaatc

SEQ ID NO: 7614 - DNA, 20 bp, Artificial Sequence
  Antisense compound
tttaaactggagtgacaaat

SEQ ID NO: 7615 - DNA, 20 bp, Artificial Sequence
  Antisense compound
ttttaaactggagtgacaaa

SEQ ID NO: 7616 - DNA, 20 bp, Artificial Sequence
  Antisense compound
cttttaaactggagtgacaa

SEQ ID NO: 7617 - DNA, 20 bp, Artificial Sequence
  Antisense compound
tcttttaaactggagtgaca

SEQ ID NO: 7618 - DNA, 20 bp, Artificial Sequence
  Antisense compound
gtcttttaaactggagtgac

SEQ ID NO: 7619 - DNA, 20 bp, Artificial Sequence
  Antisense compound
ggtcttttaaactggagtga

SEQ ID NO: 7620 - DNA, 20 bp, Artificial Sequence
  Antisense compound
tggtcttttaaactggagtg

SEQ ID NO: 7621 - DNA, 20 bp, Artificial Sequence
  Antisense compound
ttggtcttttaaactggagt

SEQ ID NO: 7622 - DNA, 20 bp, Artificial Sequence
  Antisense compound
attggtcttttaaactggag

SEQ ID NO: 7623 - DNA, 20 bp, Artificial Sequence
  Antisense compound
gattggtcttttaaactgga

SEQ ID NO: 7624 - DNA, 20 bp, Artificial Sequence
  Antisense compound
tgattggtcttttaaactgg

SEQ ID NO: 7625 - DNA, 20 bp, Artificial Sequence
  Antisense compound
ttgattggtcttttaaactg

SEQ ID NO: 7626 - DNA, 20 bp, Artificial Sequence
  Antisense compound
gttgattggtcttttaaact

SEQ ID NO: 7627 - DNA, 20 bp, Artificial Sequence
  Antisense compound
ggttgattggtcttttaaac

SEQ ID NO: 7628 - DNA, 20 bp, Artificial Sequence
  Antisense compound
gggttgattggtcttttaaa

SEQ ID NO: 7629 - DNA, 20 bp, Artificial Sequence
  Antisense compound
agggttgattggtcttttaa

SEQ ID NO: 7630 - DNA, 20 bp, Artificial Sequence
  Antisense compound
tagggttgattggtctttta

SEQ ID NO: 7631 - DNA, 20 bp, Artificial Sequence
  Antisense compound
gtagggttgattggtctttt

SEQ ID NO: 7632 - DNA, 20 bp, Artificial Sequence
  Antisense compound
agtagggttgattggtcttt

SEQ ID NO: 7633 - DNA, 20 bp, Artificial Sequence
  Antisense compound
cagtagggttgattggtctt

SEQ ID NO: 7634 - DNA, 20 bp, Artificial Sequence
  Antisense compound
tcagtagggttgattggtct

SEQ ID NO: 7635 - DNA, 20 bp, Artificial Sequence
  Antisense compound
gtcagtagggttgattggtc

SEQ ID NO: 7636 - DNA, 20 bp, Artificial Sequence
  Antisense compound
ggtcagtagggttgattggt

SEQ ID NO: 7637 - DNA, 20 bp, Artificial Sequence
  Antisense compound
tggtcagtagggttgattgg

SEQ ID NO: 7638 - DNA, 20 bp, Artificial Sequence
  Antisense compound
ctggtcagtagggttgattg

SEQ ID NO: 7639 - DNA, 20 bp, Artificial Sequence
  Antisense compound
actggtcagtagggttgatt

SEQ ID NO: 7640 - DNA, 20 bp, Artificial Sequence
  Antisense compound
gactggtcagtagggttgat

SEQ ID NO: 7641 - DNA, 20 bp, Artificial Sequence
  Antisense compound
tgactggtcagtagggttga

SEQ ID NO: 7642 - DNA, 20 bp, Artificial Sequence
  Antisense compound
atgactggtcagtagggttg

SEQ ID NO: 7643 - DNA, 20 bp, Artificial Sequence
  Antisense compound
gatgactggtcagtagggtt

SEQ ID NO: 7644 - DNA, 20 bp, Artificial Sequence
  Antisense compound
cgatgactggtcagtagggt

SEQ ID NO: 7645 - DNA, 20 bp, Artificial Sequence
  Antisense compound
acgatgactggtcagtaggg

SEQ ID NO: 7646 - DNA, 20 bp, Artificial Sequence
  Antisense compound
tacgatgactggtcagtagg

SEQ ID NO: 7647 - DNA, 20 bp, Artificial Sequence
  Antisense compound
atacgatgactggtcagtag

SEQ ID NO: 7648 - DNA, 20 bp, Artificial Sequence
  Antisense compound
tatacgatgactggtcagta

SEQ ID NO: 7649 - DNA, 20 bp, Artificial Sequence
  Antisense compound
atatacgatgactggtcagt

SEQ ID NO: 7650 - DNA, 20 bp, Artificial Sequence
  Antisense compound
aatatacgatgactggtcag

SEQ ID NO: 7651 - DNA, 20 bp, Artificial Sequence
  Antisense compound
caatatacgatgactggtca

SEQ ID NO: 7652 - DNA, 20 bp, Artificial Sequence
  Antisense compound
acaatatacgatgactggtc

SEQ ID NO: 7653 - DNA, 20 bp, Artificial Sequence
  Antisense compound
aacaatatacgatgactggt

SEQ ID NO: 7654 - DNA, 20 bp, Artificial Sequence
  Antisense compound
caacaatatacgatgactgg

SEQ ID NO: 7655 - DNA, 20 bp, Artificial Sequence
  Antisense compound
tcaacaatatacgatgactg

SEQ ID NO: 7656 - DNA, 20 bp, Artificial Sequence
  Antisense compound
atcaacaatatacgatgact

SEQ ID NO: 7657 - DNA, 20 bp, Artificial Sequence
  Antisense compound
tatcaacaatatacgatgac

SEQ ID NO: 7658 - DNA, 20 bp, Artificial Sequence
  Antisense compound
ctatcaacaatatacgatga

SEQ ID NO: 7659 - DNA, 20 bp, Artificial Sequence
  Antisense compound
actatcaacaatatacgatg

SEQ ID NO: 7660 - DNA, 20 bp, Artificial Sequence
  Antisense compound
cactatcaacaatatacgat

SEQ ID NO: 7661 - DNA, 20 bp, Artificial Sequence
  Antisense compound
acactatcaacaatatacga

SEQ ID NO: 7662 - DNA, 20 bp, Artificial Sequence
  Antisense compound
aacactatcaacaatatacg

SEQ ID NO: 7663 - DNA, 20 bp, Artificial Sequence
  Antisense compound
caacactatcaacaatatac

SEQ ID NO: 7664 - DNA, 20 bp, Artificial Sequence
  Antisense compound
gcaacactatcaacaatata

SEQ ID NO: 7665 - DNA, 20 bp, Artificial Sequence
  Antisense compound
agcaacactatcaacaatat

SEQ ID NO: 7666 - DNA, 20 bp, Artificial Sequence
  Antisense compound
cagcaacactatcaacaata

SEQ ID NO: 7667 - DNA, 20 bp, Artificial Sequence
  Antisense compound
acagcaacactatcaacaat

SEQ ID NO: 7668 - DNA, 20 bp, Artificial Sequence
  Antisense compound
cacagcaacactatcaacaa

SEQ ID NO: 7669 - DNA, 20 bp, Artificial Sequence
  Antisense compound
tcacagcaacactatcaaca

SEQ ID NO: 7670 - DNA, 20 bp, Artificial Sequence
  Antisense compound
ttcacagcaacactatcaac

SEQ ID NO: 7671 - DNA, 20 bp, Artificial Sequence
  Antisense compound
tttcacagcaacactatcaa

SEQ ID NO: 7672 - DNA, 20 bp, Artificial Sequence
  Antisense compound
ttttcacagcaacactatca

SEQ ID NO: 7673 - DNA, 20 bp, Artificial Sequence
  Antisense compound
tttttcacagcaacactatc

SEQ ID NO: 7674 - DNA, 20 bp, Artificial Sequence
  Antisense compound
atttttcacagcaacactat

SEQ ID NO: 7675 - DNA, 20 bp, Artificial Sequence
  Antisense compound
catttttcacagcaacacta

SEQ ID NO: 7676 - DNA, 20 bp, Artificial Sequence
  Antisense compound
ccatttttcacagcaacact

SEQ ID NO: 7677 - DNA, 20 bp, Artificial Sequence
  Antisense compound
gccatttttcacagcaacac

SEQ ID NO: 7678 - DNA, 20 bp, Artificial Sequence
  Antisense compound
cgccatttttcacagcaaca

SEQ ID NO: 7679 - DNA, 20 bp, Artificial Sequence
  Antisense compound
gcgccatttttcacagcaac

SEQ ID NO: 7680 - DNA, 20 bp, Artificial Sequence
  Antisense compound
cgcgccatttttcacagcaa

SEQ ID NO: 7681 - DNA, 20 bp, Artificial Sequence
  Antisense compound
gcgcgccatttttcacagca

SEQ ID NO: 7682 - DNA, 20 bp, Artificial Sequence
  Antisense compound
agcgcgccatttttcacagc

SEQ ID NO: 7683 - DNA, 20 bp, Artificial Sequence
  Antisense compound
aagcgcgccatttttcacag

SEQ ID NO: 7684 - DNA, 20 bp, Artificial Sequence
  Antisense compound
gaagcgcgccatttttcaca

SEQ ID NO: 7685 - DNA, 20 bp, Artificial Sequence
  Antisense compound
tgaagcgcgccatttttcac

SEQ ID NO: 7686 - DNA, 20 bp, Artificial Sequence
  Antisense compound
gtgaagcgcgccatttttca

SEQ ID NO: 7687 - DNA, 20 bp, Artificial Sequence
  Antisense compound
ggtgaagcgcgccatttttc

SEQ ID NO: 7688 - DNA, 20 bp, Artificial Sequence
  Antisense compound
aggtgaagcgcgccattttt

SEQ ID NO: 7689 - DNA, 20 bp, Artificial Sequence
  Antisense compound
gaggtgaagcgcgccatttt

SEQ ID NO: 7690 - DNA, 20 bp, Artificial Sequence
  Antisense compound
agaggtgaagcgcgccattt

SEQ ID NO: 7691 - DNA, 20 bp, Artificial Sequence
  Antisense compound
tagaggtgaagcgcgccatt

SEQ ID NO: 7692 - DNA, 20 bp, Artificial Sequence
  Antisense compound
gtagaggtgaagcgcgccat

SEQ ID NO: 7693 - DNA, 20 bp, Artificial Sequence
  Antisense compound
agtagaggtgaagcgcgcca

SEQ ID NO: 7694 - DNA, 20 bp, Artificial Sequence
  Antisense compound
aagtagaggtgaagcgcgcc

SEQ ID NO: 7695 - DNA, 20 bp, Artificial Sequence
  Antisense compound
aaagtagaggtgaagcgcgc

SEQ ID NO: 7696 - DNA, 20 bp, Artificial Sequence
  Antisense compound
caaagtagaggtgaagcgcg

SEQ ID NO: 7697 - DNA, 20 bp, Artificial Sequence
  Antisense compound
tcaaagtagaggtgaagcgc

SEQ ID NO: 7698 - DNA, 20 bp, Artificial Sequence
  Antisense compound
gtcaaagtagaggtgaagcg

SEQ ID NO: 7699 - DNA, 20 bp, Artificial Sequence
  Antisense compound
tgtcaaagtagaggtgaagc

SEQ ID NO: 7700 - DNA, 20 bp, Artificial Sequence
  Antisense compound
ttgtcaaagtagaggtgaag

SEQ ID NO: 7701 - DNA, 20 bp, Artificial Sequence
  Antisense compound
cttgtcaaagtagaggtgaa

SEQ ID NO: 7702 - DNA, 20 bp, Artificial Sequence
  Antisense compound
ccttgtcaaagtagaggtga

SEQ ID NO: 7703 - DNA, 20 bp, Artificial Sequence
  Antisense compound
gccttgtcaaagtagaggtg

SEQ ID NO: 7704 - DNA, 20 bp, Artificial Sequence
  Antisense compound
agccttgtcaaagtagaggt

SEQ ID NO: 7705 - DNA, 20 bp, Artificial Sequence
  Antisense compound
cagccttgtcaaagtagagg

SEQ ID NO: 7706 - DNA, 20 bp, Artificial Sequence
  Antisense compound
ccagccttgtcaaagtagag

SEQ ID NO: 7707 - DNA, 20 bp, Artificial Sequence
  Antisense compound
accagccttgtcaaagtaga

SEQ ID NO: 7708 - DNA, 20 bp, Artificial Sequence
  Antisense compound
gaccagccttgtcaaagtag

SEQ ID NO: 7709 - DNA, 20 bp, Artificial Sequence
  Antisense compound
tgaccagccttgtcaaagta

SEQ ID NO: 7710 - DNA, 20 bp, Artificial Sequence
  Antisense compound
ttgaccagccttgtcaaagt

SEQ ID NO: 7711 - DNA, 20 bp, Artificial Sequence
  Antisense compound
tttgaccagccttgtcaaag

SEQ ID NO: 7712 - DNA, 20 bp, Artificial Sequence
  Antisense compound
ttttgaccagccttgtcaaa

SEQ ID NO: 7713 - DNA, 20 bp, Artificial Sequence
  Antisense compound
cttttgaccagccttgtcaa

SEQ ID NO: 7714 - DNA, 20 bp, Artificial Sequence
  Antisense compound
tcttttgaccagccttgtca

SEQ ID NO: 7715 - DNA, 20 bp, Artificial Sequence
  Antisense compound
gtcttttgaccagccttgtc

SEQ ID NO: 7716 - DNA, 20 bp, Artificial Sequence
  Antisense compound
ggtcttttgaccagccttgt

SEQ ID NO: 7717 - DNA, 20 bp, Artificial Sequence
  Antisense compound
aggtcttttgaccagccttg

SEQ ID NO: 7718 - DNA, 20 bp, Artificial Sequence
  Antisense compound
taggtcttttgaccagcctt

SEQ ID NO: 7719 - DNA, 20 bp, Artificial Sequence
  Antisense compound
ataggtcttttgaccagcct

SEQ ID NO: 7720 - DNA, 20 bp, Artificial Sequence
  Antisense compound
cataggtcttttgaccagcc

SEQ ID NO: 7721 - DNA, 20 bp, Artificial Sequence
  Antisense compound
tcataggtcttttgaccagc

SEQ ID NO: 7722 - DNA, 20 bp, Artificial Sequence
  Antisense compound
ctcataggtcttttgaccag

SEQ ID NO: 7723 - DNA, 20 bp, Artificial Sequence
  Antisense compound
tctcataggtcttttgacca

SEQ ID NO: 7724 - DNA, 20 bp, Artificial Sequence
  Antisense compound
ctctcataggtcttttgacc

SEQ ID NO: 7725 - DNA, 20 bp, Artificial Sequence
  Antisense compound
tctctcataggtcttttgac

SEQ ID NO: 7726 - DNA, 20 bp, Artificial Sequence
  Antisense compound
gtctctcataggtcttttga

SEQ ID NO: 7727 - DNA, 20 bp, Artificial Sequence
  Antisense compound
tgtctctcataggtcttttg

SEQ ID NO: 7728 - DNA, 20 bp, Artificial Sequence
  Antisense compound
atgtctctcataggtctttt

SEQ ID NO: 7729 - DNA, 20 bp, Artificial Sequence
  Antisense compound
gatgtctctcataggtcttt

SEQ ID NO: 7730 - DNA, 20 bp, Artificial Sequence
  Antisense compound
ggatgtctctcataggtctt

SEQ ID NO: 7731 - DNA, 20 bp, Artificial Sequence
  Antisense compound
cggatgtctctcataggtct

SEQ ID NO: 7732 - DNA, 20 bp, Artificial Sequence
  Antisense compound
gcggatgtctctcataggtc

SEQ ID NO: 7733 - DNA, 20 bp, Artificial Sequence
  Antisense compound
agcggatgtctctcataggt

SEQ ID NO: 7734 - DNA, 20 bp, Artificial Sequence
  Antisense compound
gagcggatgtctctcatagg

SEQ ID NO: 7735 - DNA, 20 bp, Artificial Sequence
  Antisense compound
agagcggatgtctctcatag

SEQ ID NO: 7736 - DNA, 20 bp, Artificial Sequence
  Antisense compound
gagagcggatgtctctcata

SEQ ID NO: 7737 - DNA, 20 bp, Artificial Sequence
  Antisense compound
ggagagcggatgtctctcat

SEQ ID NO: 7738 - DNA, 20 bp, Artificial Sequence
  Antisense compound
gggagagcggatgtctctca

SEQ ID NO: 7739 - DNA, 20 bp, Artificial Sequence
  Antisense compound
tgggagagcggatgtctctc

SEQ ID NO: 7740 - DNA, 20 bp, Artificial Sequence
  Antisense compound
atgggagagcggatgtctct

SEQ ID NO: 7741 - DNA, 20 bp, Artificial Sequence
  Antisense compound
aatgggagagcggatgtctc

SEQ ID NO: 7742 - DNA, 20 bp, Artificial Sequence
  Antisense compound
aaatgggagagcggatgtct

SEQ ID NO: 7743 - DNA, 20 bp, Artificial Sequence
  Antisense compound
aaaatgggagagcggatgtc

SEQ ID NO: 7744 - DNA, 20 bp, Artificial Sequence
  Antisense compound
caaaatgggagagcggatgt

SEQ ID NO: 7745 - DNA, 20 bp, Artificial Sequence
  Antisense compound
acaaaatgggagagcggatg

SEQ ID NO: 7746 - DNA, 20 bp, Artificial Sequence
  Antisense compound
gacaaaatgggagagcggat

SEQ ID NO: 7747 - DNA, 20 bp, Artificial Sequence
  Antisense compound
tgacaaaatgggagagcgga

SEQ ID NO: 7748 - DNA, 20 bp, Artificial Sequence
  Antisense compound
ttgacaaaatgggagagcgg

SEQ ID NO: 7749 - DNA, 20 bp, Artificial Sequence
  Antisense compound
attgacaaaatgggagagcg

SEQ ID NO: 7750 - DNA, 20 bp, Artificial Sequence
  Antisense compound
aattgacaaaatgggagagc

SEQ ID NO: 7751 - DNA, 20 bp, Artificial Sequence
  Antisense compound
aaattgacaaaatgggagag

SEQ ID NO: 7752 - DNA, 20 bp, Artificial Sequence
  Antisense compound
taaattgacaaaatgggaga

SEQ ID NO: 7753 - DNA, 20 bp, Artificial Sequence
  Antisense compound
ctaaattgacaaaatgggag

SEQ ID NO: 7754 - DNA, 20 bp, Artificial Sequence
  Antisense compound
tctaaattgacaaaatggga

SEQ ID NO: 7755 - DNA, 20 bp, Artificial Sequence
  Antisense compound
gtctaaattgacaaaatggg

SEQ ID NO: 7756 - DNA, 20 bp, Artificial Sequence
  Antisense compound
tgtctaaattgacaaaatgg

SEQ ID NO: 7757 - DNA, 20 bp, Artificial Sequence
  Antisense compound
ttgtctaaattgacaaaatg

SEQ ID NO: 7758 - DNA, 20 bp, Artificial Sequence
  Antisense compound
attgtctaaattgacaaaat

SEQ ID NO: 7759 - DNA, 20 bp, Artificial Sequence
  Antisense compound
aattgtctaaattgacaaaa

SEQ ID NO: 7760 - DNA, 20 bp, Artificial Sequence
  Antisense compound
aaattgtctaaattgacaaa

SEQ ID NO: 7761 - DNA, 20 bp, Artificial Sequence
  Antisense compound
caaattgtctaaattgacaa

SEQ ID NO: 7762 - DNA, 20 bp, Artificial Sequence
  Antisense compound
tcaaattgtctaaattgaca

SEQ ID NO: 7763 - DNA, 20 bp, Artificial Sequence
  Antisense compound
ctcaaattgtctaaattgac

SEQ ID NO: 7764 - DNA, 20 bp, Artificial Sequence
  Antisense compound
tctcaaattgtctaaattga

SEQ ID NO: 7765 - DNA, 20 bp, Artificial Sequence
  Antisense compound
ctctcaaattgtctaaattg

SEQ ID NO: 7766 - DNA, 20 bp, Artificial Sequence
  Antisense compound
gctctcaaattgtctaaatt

SEQ ID NO: 7767 - DNA, 20 bp, Artificial Sequence
  Antisense compound
agctctcaaattgtctaaat

SEQ ID NO: 7768 - DNA, 20 bp, Artificial Sequence
  Antisense compound
tagctctcaaattgtctaaa

SEQ ID NO: 7769 - DNA, 20 bp, Artificial Sequence
  Antisense compound
ttagctctcaaattgtctaa

SEQ ID NO: 7770 - DNA, 20 bp, Artificial Sequence
  Antisense compound
gttagctctcaaattgtcta

SEQ ID NO: 7771 - DNA, 20 bp, Artificial Sequence
  Antisense compound
tgttagctctcaaattgtct

SEQ ID NO: 7772 - DNA, 20 bp, Artificial Sequence
  Antisense compound
ttgttagctctcaaattgtc

SEQ ID NO: 7773 - DNA, 20 bp, Artificial Sequence
  Antisense compound
gttgttagctctcaaattgt

SEQ ID NO: 7774 - DNA, 20 bp, Artificial Sequence
  Antisense compound
tgttgttagctctcaaattg

SEQ ID NO: 7775 - DNA, 20 bp, Artificial Sequence
  Antisense compound
gtgttgttagctctcaaatt

SEQ ID NO: 7776 - DNA, 20 bp, Artificial Sequence
  Antisense compound
agtgttgttagctctcaaat

SEQ ID NO: 7777 - DNA, 20 bp, Artificial Sequence
  Antisense compound
tagtgttgttagctctcaaa

SEQ ID NO: 7778 - DNA, 20 bp, Artificial Sequence
  Antisense compound
ttagtgttgttagctctcaa

SEQ ID NO: 7779 - DNA, 20 bp, Artificial Sequence
  Antisense compound
tttagtgttgttagctctca

SEQ ID NO: 7780 - DNA, 20 bp, Artificial Sequence
  Antisense compound
ctttagtgttgttagctctc

SEQ ID NO: 7781 - DNA, 20 bp, Artificial Sequence
  Antisense compound
cctttagtgttgttagctct

SEQ ID NO: 7782 - DNA, 20 bp, Artificial Sequence
  Antisense compound
acctttagtgttgttagctc

SEQ ID NO: 7783 - DNA, 20 bp, Artificial Sequence
  Antisense compound
aacctttagtgttgttagct

SEQ ID NO: 7784 - DNA, 20 bp, Artificial Sequence
  Antisense compound
gaacctttagtgttgttagc

SEQ ID NO: 7785 - DNA, 20 bp, Artificial Sequence
  Antisense compound
tgaacctttagtgttgttag

SEQ ID NO: 7786 - DNA, 20 bp, Artificial Sequence
  Antisense compound
gtgaacctttagtgttgtta

SEQ ID NO: 7787 - DNA, 20 bp, Artificial Sequence
  Antisense compound
agtgaacctttagtgttgtt

SEQ ID NO: 7788 - DNA, 20 bp, Artificial Sequence
  Antisense compound
cagtgaacctttagtgttgt

SEQ ID NO: 7789 - DNA, 20 bp, Artificial Sequence
  Antisense compound
gcagtgaacctttagtgttg

SEQ ID NO: 7790 - DNA, 20 bp, Artificial Sequence
  Antisense compound
ggcagtgaacctttagtgtt

SEQ ID NO: 7791 - DNA, 20 bp, Artificial Sequence
  Antisense compound
aggcagtgaacctttagtgt

SEQ ID NO: 7792 - DNA, 20 bp, Artificial Sequence
  Antisense compound
taggcagtgaacctttagtg

SEQ ID NO: 7793 - DNA, 20 bp, Artificial Sequence
  Antisense compound
ataggcagtgaacctttagt

SEQ ID NO: 7794 - DNA, 20 bp, Artificial Sequence
  Antisense compound
aataggcagtgaacctttag

SEQ ID NO: 7795 - DNA, 20 bp, Artificial Sequence
  Antisense compound
taataggcagtgaaccttta

SEQ ID NO: 7796 - DNA, 20 bp, Artificial Sequence
  Antisense compound
ttaataggcagtgaaccttt

SEQ ID NO: 7797 - DNA, 20 bp, Artificial Sequence
  Antisense compound
attaataggcagtgaacctt

SEQ ID NO: 7798 - DNA, 20 bp, Artificial Sequence
  Antisense compound
cattaataggcagtgaacct

SEQ ID NO: 7799 - DNA, 20 bp, Artificial Sequence
  Antisense compound
acattaataggcagtgaacc

SEQ ID NO: 7800 - DNA, 20 bp, Artificial Sequence
  Antisense compound
gacattaataggcagtgaac

SEQ ID NO: 7801 - DNA, 20 bp, Artificial Sequence
  Antisense compound
tgacattaataggcagtgaa

SEQ ID NO: 7802 - DNA, 20 bp, Artificial Sequence
  Antisense compound
atgacattaataggcagtga

SEQ ID NO: 7803 - DNA, 20 bp, Artificial Sequence
  Antisense compound
tatgacattaataggcagtg

SEQ ID NO: 7804 - DNA, 20 bp, Artificial Sequence
  Antisense compound
ctatgacattaataggcagt

SEQ ID NO: 7805 - DNA, 20 bp, Artificial Sequence
  Antisense compound
actatgacattaataggcag

SEQ ID NO: 7806 - DNA, 20 bp, Artificial Sequence
  Antisense compound
aactatgacattaataggca

SEQ ID NO: 7807 - DNA, 20 bp, Artificial Sequence
  Antisense compound
aaactatgacattaataggc

SEQ ID NO: 7808 - DNA, 20 bp, Artificial Sequence
  Antisense compound
aaaactatgacattaatagg

SEQ ID NO: 7809 - DNA, 20 bp, Artificial Sequence
  Antisense compound
aaaaactatgacattaatag

SEQ ID NO: 7810 - DNA, 20 bp, Artificial Sequence
  Antisense compound
caaaaactatgacattaata

SEQ ID NO: 7811 - DNA, 20 bp, Artificial Sequence
  Antisense compound
tcaaaaactatgacattaat

SEQ ID NO: 7812 - DNA, 20 bp, Artificial Sequence
  Antisense compound
atcaaaaactatgacattaa

SEQ ID NO: 7813 - DNA, 20 bp, Artificial Sequence
  Antisense compound
catcaaaaactatgacatta

SEQ ID NO: 7814 - DNA, 20 bp, Artificial Sequence
  Antisense compound
ccatcaaaaactatgacatt

SEQ ID NO: 7815 - DNA, 20 bp, Artificial Sequence
  Antisense compound
gccatcaaaaactatgacat

SEQ ID NO: 7816 - DNA, 20 bp, Artificial Sequence
  Antisense compound
tgccatcaaaaactatgaca

SEQ ID NO: 7817 - DNA, 20 bp, Artificial Sequence
  Antisense compound
ttgccatcaaaaactatgac

SEQ ID NO: 7818 - DNA, 20 bp, Artificial Sequence
  Antisense compound
cttgccatcaaaaactatga

SEQ ID NO: 7819 - DNA, 20 bp, Artificial Sequence
  Antisense compound
acttgccatcaaaaactatg

SEQ ID NO: 7820 - DNA, 20 bp, Artificial Sequence
  Antisense compound
gacttgccatcaaaaactat

SEQ ID NO: 7821 - DNA, 20 bp, Artificial Sequence
  Antisense compound
ggacttgccatcaaaaacta

SEQ ID NO: 7822 - DNA, 20 bp, Artificial Sequence
  Antisense compound
tggacttgccatcaaaaact

SEQ ID NO: 7823 - DNA, 20 bp, Artificial Sequence
  Antisense compound
ttggacttgccatcaaaaac

SEQ ID NO: 7824 - DNA, 20 bp, Artificial Sequence
  Antisense compound
tttggacttgccatcaaaaa

SEQ ID NO: 7825 - DNA, 20 bp, Artificial Sequence
  Antisense compound
atttggacttgccatcaaaa

SEQ ID NO: 7826 - DNA, 20 bp, Artificial Sequence
  Antisense compound
catttggacttgccatcaaa

SEQ ID NO: 7827 - DNA, 20 bp, Artificial Sequence
  Antisense compound
gcatttggacttgccatcaa

SEQ ID NO: 7828 - DNA, 20 bp, Artificial Sequence
  Antisense compound
cgcatttggacttgccatca

SEQ ID NO: 7829 - DNA, 20 bp, Artificial Sequence
  Antisense compound
tcgcatttggacttgccatc

SEQ ID NO: 7830 - DNA, 20 bp, Artificial Sequence
  Antisense compound
gtcgcatttggacttgccat

SEQ ID NO: 7831 - DNA, 20 bp, Artificial Sequence
  Antisense compound
cgtcgcatttggacttgcca

SEQ ID NO: 7832 - DNA, 20 bp, Artificial Sequence
  Antisense compound
tcgtcgcatttggacttgcc

SEQ ID NO: 7833 - DNA, 20 bp, Artificial Sequence
  Antisense compound
ctcgtcgcatttggacttgc

SEQ ID NO: 7834 - DNA, 20 bp, Artificial Sequence
  Antisense compound
actcgtcgcatttggacttg

SEQ ID NO: 7835 - DNA, 20 bp, Artificial Sequence
  Antisense compound
gactcgtcgcatttggactt

SEQ ID NO: 7836 - DNA, 20 bp, Artificial Sequence
  Antisense compound
agactcgtcgcatttggact

SEQ ID NO: 7837 - DNA, 20 bp, Artificial Sequence
  Antisense compound
cagactcgtcgcatttggac

SEQ ID NO: 7838 - DNA, 20 bp, Artificial Sequence
  Antisense compound
gcagactcgtcgcatttgga

SEQ ID NO: 7839 - DNA, 20 bp, Artificial Sequence
  Antisense compound
agcagactcgtcgcatttgg

SEQ ID NO: 7840 - DNA, 20 bp, Artificial Sequence
  Antisense compound
aagcagactcgtcgcatttg

SEQ ID NO: 7841 - DNA, 20 bp, Artificial Sequence
  Antisense compound
gaagcagactcgtcgcattt

SEQ ID NO: 7842 - DNA, 20 bp, Artificial Sequence
  Antisense compound
agaagcagactcgtcgcatt

SEQ ID NO: 7843 - DNA, 20 bp, Artificial Sequence
  Antisense compound
tagaagcagactcgtcgcat

SEQ ID NO: 7844 - DNA, 20 bp, Artificial Sequence
  Antisense compound
ttagaagcagactcgtcgca

SEQ ID NO: 7845 - DNA, 20 bp, Artificial Sequence
  Antisense compound
cttagaagcagactcgtcgc

SEQ ID NO: 7846 - DNA, 20 bp, Artificial Sequence
  Antisense compound
acttagaagcagactcgtcg

SEQ ID NO: 7847 - DNA, 20 bp, Artificial Sequence
  Antisense compound
gacttagaagcagactcgtc

SEQ ID NO: 7848 - DNA, 20 bp, Artificial Sequence
  Antisense compound
agacttagaagcagactcgt

SEQ ID NO: 7849 - DNA, 20 bp, Artificial Sequence
  Antisense compound
cagacttagaagcagactcg

SEQ ID NO: 7850 - DNA, 20 bp, Artificial Sequence
  Antisense compound
gcagacttagaagcagactc

SEQ ID NO: 7851 - DNA, 20 bp, Artificial Sequence
  Antisense compound
agcagacttagaagcagact

SEQ ID NO: 7852 - DNA, 20 bp, Artificial Sequence
  Antisense compound
aagcagacttagaagcagac

SEQ ID NO: 7853 - DNA, 20 bp, Artificial Sequence
  Antisense compound
gaagcagacttagaagcaga

SEQ ID NO: 7854 - DNA, 20 bp, Artificial Sequence
  Antisense compound
agaagcagacttagaagcag

SEQ ID NO: 7855 - DNA, 20 bp, Artificial Sequence
  Antisense compound
cagaagcagacttagaagca

SEQ ID NO: 7856 - DNA, 20 bp, Artificial Sequence
  Antisense compound
acagaagcagacttagaagc

SEQ ID NO: 7857 - DNA, 20 bp, Artificial Sequence
  Antisense compound
cacagaagcagacttagaag

SEQ ID NO: 7858 - DNA, 20 bp, Artificial Sequence
  Antisense compound
acacagaagcagacttagaa

SEQ ID NO: 7859 - DNA, 20 bp, Artificial Sequence
  Antisense compound
tacacagaagcagacttaga

SEQ ID NO: 7860 - DNA, 20 bp, Artificial Sequence
  Antisense compound
gtacacagaagcagacttag

SEQ ID NO: 7861 - DNA, 20 bp, Artificial Sequence
  Antisense compound
agtacacagaagcagactta

SEQ ID NO: 7862 - DNA, 20 bp, Artificial Sequence
  Antisense compound
tagtacacagaagcagactt

SEQ ID NO: 7863 - DNA, 20 bp, Artificial Sequence
  Antisense compound
gtagtacacagaagcagact

SEQ ID NO: 7864 - DNA, 20 bp, Artificial Sequence
  Antisense compound
tgtagtacacagaagcagac

SEQ ID NO: 7865 - DNA, 20 bp, Artificial Sequence
  Antisense compound
ctgtagtacacagaagcaga

SEQ ID NO: 7866 - DNA, 20 bp, Artificial Sequence
  Antisense compound
actgtagtacacagaagcag

SEQ ID NO: 7867 - DNA, 20 bp, Artificial Sequence
  Antisense compound
gactgtagtacacagaagca

SEQ ID NO: 7868 - DNA, 20 bp, Artificial Sequence
  Antisense compound
tgactgtagtacacagaagc

SEQ ID NO: 7869 - DNA, 20 bp, Artificial Sequence
  Antisense compound
ctgactgtagtacacagaag

SEQ ID NO: 7870 - DNA, 20 bp, Artificial Sequence
  Antisense compound
gctgactgtagtacacagaa

SEQ ID NO: 7871 - DNA, 20 bp, Artificial Sequence
  Antisense compound
agctgactgtagtacacaga

SEQ ID NO: 7872 - DNA, 20 bp, Artificial Sequence
  Antisense compound
cagctgactgtagtacacag

SEQ ID NO: 7873 - DNA, 20 bp, Artificial Sequence
  Antisense compound
tcagctgactgtagtacaca

SEQ ID NO: 7874 - DNA, 20 bp, Artificial Sequence
  Antisense compound
atcagctgactgtagtacac

SEQ ID NO: 7875 - DNA, 20 bp, Artificial Sequence
  Antisense compound
catcagctgactgtagtaca

SEQ ID NO: 7876 - DNA, 20 bp, Artificial Sequence
  Antisense compound
acatcagctgactgtagtac

SEQ ID NO: 7877 - DNA, 20 bp, Artificial Sequence
  Antisense compound
cacatcagctgactgtagta

SEQ ID NO: 7878 - DNA, 20 bp, Artificial Sequence
  Antisense compound
gcacatcagctgactgtagt

SEQ ID NO: 7879 - DNA, 20 bp, Artificial Sequence
  Antisense compound
ggcacatcagctgactgtag

SEQ ID NO: 7880 - DNA, 20 bp, Artificial Sequence
  Antisense compound
tggcacatcagctgactgta

SEQ ID NO: 7881 - DNA, 20 bp, Artificial Sequence
  Antisense compound
ttggcacatcagctgactgt

SEQ ID NO: 7882 - DNA, 20 bp, Artificial Sequence
  Antisense compound
gttggcacatcagctgactg

SEQ ID NO: 7883 - DNA, 20 bp, Artificial Sequence
  Antisense compound
ggttggcacatcagctgact

SEQ ID NO: 7884 - DNA, 20 bp, Artificial Sequence
  Antisense compound
aggttggcacatcagctgac

SEQ ID NO: 7885 - DNA, 20 bp, Artificial Sequence
  Antisense compound
taggttggcacatcagctga

SEQ ID NO: 7886 - DNA, 20 bp, Artificial Sequence
  Antisense compound
ataggttggcacatcagctg

SEQ ID NO: 7887 - DNA, 20 bp, Artificial Sequence
  Antisense compound
aataggttggcacatcagct

SEQ ID NO: 7888 - DNA, 20 bp, Artificial Sequence
  Antisense compound
gaataggttggcacatcagc

SEQ ID NO: 7889 - DNA, 20 bp, Artificial Sequence
  Antisense compound
agaataggttggcacatcag

SEQ ID NO: 7890 - DNA, 20 bp, Artificial Sequence
  Antisense compound
cagaataggttggcacatca

SEQ ID NO: 7891 - DNA, 20 bp, Artificial Sequence
  Antisense compound
acagaataggttggcacatc

SEQ ID NO: 7892 - DNA, 20 bp, Artificial Sequence
  Antisense compound
aacagaataggttggcacat

SEQ ID NO: 7893 - DNA, 20 bp, Artificial Sequence
  Antisense compound
caacagaataggttggcaca

SEQ ID NO: 7894 - DNA, 20 bp, Artificial Sequence
  Antisense compound
gcaacagaataggttggcac

SEQ ID NO: 7895 - DNA, 20 bp, Artificial Sequence
  Antisense compound
agcaacagaataggttggca

SEQ ID NO: 7896 - DNA, 20 bp, Artificial Sequence
  Antisense compound
aagcaacagaataggttggc

SEQ ID NO: 7897 - DNA, 20 bp, Artificial Sequence
  Antisense compound
caagcaacagaataggttgg

SEQ ID NO: 7898 - DNA, 20 bp, Artificial Sequence
  Antisense compound
tcaagcaacagaataggttg

SEQ ID NO: 7899 - DNA, 20 bp, Artificial Sequence
  Antisense compound
gtcaagcaacagaataggtt

SEQ ID NO: 7900 - DNA, 20 bp, Artificial Sequence
  Antisense compound
ggtcaagcaacagaataggt

SEQ ID NO: 7901 - DNA, 20 bp, Artificial Sequence
  Antisense compound
tggtcaagcaacagaatagg

SEQ ID NO: 7902 - DNA, 20 bp, Artificial Sequence
  Antisense compound
ttggtcaagcaacagaatag

SEQ ID NO: 7903 - DNA, 20 bp, Artificial Sequence
  Antisense compound
cttggtcaagcaacagaata

SEQ ID NO: 7904 - DNA, 20 bp, Artificial Sequence
  Antisense compound
gcttggtcaagcaacagaat

SEQ ID NO: 7905 - DNA, 20 bp, Artificial Sequence
  Antisense compound
agcttggtcaagcaacagaa

SEQ ID NO: 7906 - DNA, 20 bp, Artificial Sequence
  Antisense compound
gagcttggtcaagcaacaga

SEQ ID NO: 7907 - DNA, 20 bp, Artificial Sequence
  Antisense compound
agagcttggtcaagcaacag

SEQ ID NO: 7908 - DNA, 20 bp, Artificial Sequence
  Antisense compound
aagagcttggtcaagcaaca

SEQ ID NO: 7909 - DNA, 20 bp, Artificial Sequence
  Antisense compound
caagagcttggtcaagcaac

SEQ ID NO: 7910 - DNA, 20 bp, Artificial Sequence
  Antisense compound
acaagagcttggtcaagcaa

SEQ ID NO: 7911 - DNA, 20 bp, Artificial Sequence
  Antisense compound
tacaagagcttggtcaagca

SEQ ID NO: 7912 - DNA, 20 bp, Artificial Sequence
  Antisense compound
atacaagagcttggtcaagc

SEQ ID NO: 7913 - DNA, 20 bp, Artificial Sequence
  Antisense compound
gatacaagagcttggtcaag

SEQ ID NO: 7914 - DNA, 20 bp, Artificial Sequence
  Antisense compound
tgatacaagagcttggtcaa

SEQ ID NO: 7915 - DNA, 20 bp, Artificial Sequence
  Antisense compound
ctgatacaagagcttggtca

SEQ ID NO: 7916 - DNA, 20 bp, Artificial Sequence
  Antisense compound
tctgatacaagagcttggtc

SEQ ID NO: 7917 - DNA, 20 bp, Artificial Sequence
  Antisense compound
gtctgatacaagagcttggt

SEQ ID NO: 7918 - DNA, 20 bp, Artificial Sequence
  Antisense compound
cgtctgatacaagagcttgg

SEQ ID NO: 7919 - DNA, 20 bp, Artificial Sequence
  Antisense compound
acgtctgatacaagagcttg

SEQ ID NO: 7920 - DNA, 20 bp, Artificial Sequence
  Antisense compound
aacgtctgatacaagagctt

SEQ ID NO: 7921 - DNA, 20 bp, Artificial Sequence
  Antisense compound
caacgtctgatacaagagct

SEQ ID NO: 7922 - DNA, 20 bp, Artificial Sequence
  Antisense compound
ccaacgtctgatacaagagc

SEQ ID NO: 7923 - DNA, 20 bp, Artificial Sequence
  Antisense compound
tccaacgtctgatacaagag

SEQ ID NO: 7924 - DNA, 20 bp, Artificial Sequence
  Antisense compound
ctccaacgtctgatacaaga

SEQ ID NO: 7925 - DNA, 20 bp, Artificial Sequence
  Antisense compound
tctccaacgtctgatacaag

SEQ ID NO: 7926 - DNA, 20 bp, Artificial Sequence
  Antisense compound
atctccaacgtctgatacaa

SEQ ID NO: 7927 - DNA, 20 bp, Artificial Sequence
  Antisense compound
tatctccaacgtctgataca

SEQ ID NO: 7928 - DNA, 20 bp, Artificial Sequence
  Antisense compound
ctatctccaacgtctgatac

SEQ ID NO: 7929 - DNA, 20 bp, Artificial Sequence
  Antisense compound
actatctccaacgtctgata

SEQ ID NO: 7930 - DNA, 20 bp, Artificial Sequence
  Antisense compound
tactatctccaacgtctgat

SEQ ID NO: 7931 - DNA, 20 bp, Artificial Sequence
  Antisense compound
gtactatctccaacgtctga

SEQ ID NO: 7932 - DNA, 20 bp, Artificial Sequence
  Antisense compound
agtactatctccaacgtctg

SEQ ID NO: 7933 - DNA, 20 bp, Artificial Sequence
  Antisense compound
cagtactatctccaacgtct

SEQ ID NO: 7934 - DNA, 20 bp, Artificial Sequence
  Antisense compound
tcagtactatctccaacgtc

SEQ ID NO: 7935 - DNA, 20 bp, Artificial Sequence
  Antisense compound
ttcagtactatctccaacgt

SEQ ID NO: 7936 - DNA, 20 bp, Artificial Sequence
  Antisense compound
cttcagtactatctccaacg

SEQ ID NO: 7937 - DNA, 20 bp, Artificial Sequence
  Antisense compound
acttcagtactatctccaac

SEQ ID NO: 7938 - DNA, 20 bp, Artificial Sequence
  Antisense compound
aacttcagtactatctccaa

SEQ ID NO: 7939 - DNA, 20 bp, Artificial Sequence
  Antisense compound
aaacttcagtactatctcca

SEQ ID NO: 7940 - DNA, 20 bp, Artificial Sequence
  Antisense compound
gaaacttcagtactatctcc

SEQ ID NO: 7941 - DNA, 20 bp, Artificial Sequence
  Antisense compound
ggaaacttcagtactatctc

SEQ ID NO: 7942 - DNA, 20 bp, Artificial Sequence
  Antisense compound
cggaaacttcagtactatct

SEQ ID NO: 7943 - DNA, 20 bp, Artificial Sequence
  Antisense compound
acggaaacttcagtactatc

SEQ ID NO: 7944 - DNA, 20 bp, Artificial Sequence
  Antisense compound
aacggaaacttcagtactat

SEQ ID NO: 7945 - DNA, 20 bp, Artificial Sequence
  Antisense compound
taacggaaacttcagtacta

SEQ ID NO: 7946 - DNA, 20 bp, Artificial Sequence
  Antisense compound
ttaacggaaacttcagtact

SEQ ID NO: 7947 - DNA, 20 bp, Artificial Sequence
  Antisense compound
cttaacggaaacttcagtac

SEQ ID NO: 7948 - DNA, 20 bp, Artificial Sequence
  Antisense compound
tcttaacggaaacttcagta

SEQ ID NO: 7949 - DNA, 20 bp, Artificial Sequence
  Antisense compound
atcttaacggaaacttcagt

SEQ ID NO: 7950 - DNA, 20 bp, Artificial Sequence
  Antisense compound
catcttaacggaaacttcag

SEQ ID NO: 7951 - DNA, 20 bp, Artificial Sequence
  Antisense compound
acatcttaacggaaacttca

SEQ ID NO: 7952 - DNA, 20 bp, Artificial Sequence
  Antisense compound
aacatcttaacggaaacttc

SEQ ID NO: 7953 - DNA, 20 bp, Artificial Sequence
  Antisense compound
aaacatcttaacggaaactt

SEQ ID NO: 7954 - DNA, 20 bp, Artificial Sequence
  Antisense compound
caaacatcttaacggaaact

SEQ ID NO: 7955 - DNA, 20 bp, Artificial Sequence
  Antisense compound
tcaaacatcttaacggaaac

SEQ ID NO: 7956 - DNA, 20 bp, Artificial Sequence
  Antisense compound
atcaaacatcttaacggaaa

SEQ ID NO: 7957 - DNA, 20 bp, Artificial Sequence
  Antisense compound
catcaaacatcttaacggaa

SEQ ID NO: 7958 - DNA, 20 bp, Artificial Sequence
  Antisense compound
gcatcaaacatcttaacgga

SEQ ID NO: 7959 - DNA, 20 bp, Artificial Sequence
  Antisense compound
agcatcaaacatcttaacgg

SEQ ID NO: 7960 - DNA, 20 bp, Artificial Sequence
  Antisense compound
aagcatcaaacatcttaacg

SEQ ID NO: 7961 - DNA, 20 bp, Artificial Sequence
  Antisense compound
taagcatcaaacatcttaac

SEQ ID NO: 7962 - DNA, 20 bp, Artificial Sequence
  Antisense compound
ataagcatcaaacatcttaa

SEQ ID NO: 7963 - DNA, 20 bp, Artificial Sequence
  Antisense compound
cataagcatcaaacatctta

SEQ ID NO: 7964 - DNA, 20 bp, Artificial Sequence
  Antisense compound
acataagcatcaaacatctt

SEQ ID NO: 7965 - DNA, 20 bp, Artificial Sequence
  Antisense compound
gacataagcatcaaacatct

SEQ ID NO: 7966 - DNA, 20 bp, Artificial Sequence
  Antisense compound
cgacataagcatcaaacatc

SEQ ID NO: 7967 - DNA, 20 bp, Artificial Sequence
  Antisense compound
tcgacataagcatcaaacat

SEQ ID NO: 7968 - DNA, 20 bp, Artificial Sequence
  Antisense compound
gtcgacataagcatcaaaca

SEQ ID NO: 7969 - DNA, 20 bp, Artificial Sequence
  Antisense compound
tgtcgacataagcatcaaac

SEQ ID NO: 7970 - DNA, 20 bp, Artificial Sequence
  Antisense compound
gtgtcgacataagcatcaaa

SEQ ID NO: 7971 - DNA, 20 bp, Artificial Sequence
  Antisense compound
ggtgtcgacataagcatcaa

SEQ ID NO: 7972 - DNA, 20 bp, Artificial Sequence
  Antisense compound
aggtgtcgacataagcatca

SEQ ID NO: 7973 - DNA, 20 bp, Artificial Sequence
  Antisense compound
aaggtgtcgacataagcatc

SEQ ID NO: 7974 - DNA, 20 bp, Artificial Sequence
  Antisense compound
aaaggtgtcgacataagcat

SEQ ID NO: 7975 - DNA, 20 bp, Artificial Sequence
  Antisense compound
aaaaggtgtcgacataagca

SEQ ID NO: 7976 - DNA, 20 bp, Artificial Sequence
  Antisense compound
gaaaaggtgtcgacataagc

SEQ ID NO: 7977 - DNA, 20 bp, Artificial Sequence
  Antisense compound
tgaaaaggtgtcgacataag

SEQ ID NO: 7978 - DNA, 20 bp, Artificial Sequence
  Antisense compound
ctgaaaaggtgtcgacataa

SEQ ID NO: 7979 - DNA, 20 bp, Artificial Sequence
  Antisense compound
gctgaaaaggtgtcgacata

SEQ ID NO: 7980 - DNA, 20 bp, Artificial Sequence
  Antisense compound
tgctgaaaaggtgtcgacat

SEQ ID NO: 7981 - DNA, 20 bp, Artificial Sequence
  Antisense compound
ttgctgaaaaggtgtcgaca

SEQ ID NO: 7982 - DNA, 20 bp, Artificial Sequence
  Antisense compound
gttgctgaaaaggtgtcgac

SEQ ID NO: 7983 - DNA, 20 bp, Artificial Sequence
  Antisense compound
agttgctgaaaaggtgtcga

SEQ ID NO: 7984 - DNA, 20 bp, Artificial Sequence
  Antisense compound
aagttgctgaaaaggtgtcg

SEQ ID NO: 7985 - DNA, 20 bp, Artificial Sequence
  Antisense compound
aaagttgctgaaaaggtgtc

SEQ ID NO: 7986 - DNA, 20 bp, Artificial Sequence
  Antisense compound
aaaagttgctgaaaaggtgt

SEQ ID NO: 7987 - DNA, 20 bp, Artificial Sequence
  Antisense compound
taaaagttgctgaaaaggtg

SEQ ID NO: 7988 - DNA, 20 bp, Artificial Sequence
  Antisense compound
ctaaaagttgctgaaaaggt

SEQ ID NO: 7989 - DNA, 20 bp, Artificial Sequence
  Antisense compound
actaaaagttgctgaaaagg

SEQ ID NO: 7990 - DNA, 20 bp, Artificial Sequence
  Antisense compound
cactaaaagttgctgaaaag

SEQ ID NO: 7991 - DNA, 20 bp, Artificial Sequence
  Antisense compound
acactaaaagttgctgaaaa

SEQ ID NO: 7992 - DNA, 20 bp, Artificial Sequence
  Antisense compound
aacactaaaagttgctgaaa

SEQ ID NO: 7993 - DNA, 20 bp, Artificial Sequence
  Antisense compound
gaacactaaaagttgctgaa

SEQ ID NO: 7994 - DNA, 20 bp, Artificial Sequence
  Antisense compound
ggaacactaaaagttgctga

SEQ ID NO: 7995 - DNA, 20 bp, Artificial Sequence
  Antisense compound
aggaacactaaaagttgctg

SEQ ID NO: 7996 - DNA, 20 bp, Artificial Sequence
  Antisense compound
taggaacactaaaagttgct

SEQ ID NO: 7997 - DNA, 20 bp, Artificial Sequence
  Antisense compound
ataggaacactaaaagttgc

SEQ ID NO: 7998 - DNA, 20 bp, Artificial Sequence
  Antisense compound
cataggaacactaaaagttg

SEQ ID NO: 7999 - DNA, 20 bp, Artificial Sequence
  Antisense compound
ccataggaacactaaaagtt

SEQ ID NO: 8000 - DNA, 20 bp, Artificial Sequence
  Antisense compound
tccataggaacactaaaagt

SEQ ID NO: 8001 - DNA, 20 bp, Artificial Sequence
  Antisense compound
ttccataggaacactaaaag

SEQ ID NO: 8002 - DNA, 20 bp, Artificial Sequence
  Antisense compound
tttccataggaacactaaaa

SEQ ID NO: 8003 - DNA, 20 bp, Artificial Sequence
  Antisense compound
ttttccataggaacactaaa

SEQ ID NO: 8004 - DNA, 20 bp, Artificial Sequence
  Antisense compound
tttttccataggaacactaa

SEQ ID NO: 8005 - DNA, 20 bp, Artificial Sequence
  Antisense compound
gtttttccataggaacacta

SEQ ID NO: 8006 - DNA, 20 bp, Artificial Sequence
  Antisense compound
agtttttccataggaacact

SEQ ID NO: 8007 - DNA, 20 bp, Artificial Sequence
  Antisense compound
aagtttttccataggaacac

SEQ ID NO: 8008 - DNA, 20 bp, Artificial Sequence
  Antisense compound
taagtttttccataggaaca

SEQ ID NO: 8009 - DNA, 20 bp, Artificial Sequence
  Antisense compound
ttaagtttttccataggaac

SEQ ID NO: 8010 - DNA, 20 bp, Artificial Sequence
  Antisense compound
cttaagtttttccataggaa

SEQ ID NO: 8011 - DNA, 20 bp, Artificial Sequence
  Antisense compound
ccttaagtttttccatagga

SEQ ID NO: 8012 - DNA, 20 bp, Artificial Sequence
  Antisense compound
gccttaagtttttccatagg

SEQ ID NO: 8013 - DNA, 20 bp, Artificial Sequence
  Antisense compound
tgccttaagtttttccatag

SEQ ID NO: 8014 - DNA, 20 bp, Artificial Sequence
  Antisense compound
gtgccttaagtttttccata

SEQ ID NO: 8015 - DNA, 20 bp, Artificial Sequence
  Antisense compound
agtgccttaagtttttccat

SEQ ID NO: 8016 - DNA, 20 bp, Artificial Sequence
  Antisense compound
aagtgccttaagtttttcca

SEQ ID NO: 8017 - DNA, 20 bp, Artificial Sequence
  Antisense compound
caagtgccttaagtttttcc

SEQ ID NO: 8018 - DNA, 20 bp, Artificial Sequence
  Antisense compound
acaagtgccttaagtttttc

SEQ ID NO: 8019 - DNA, 20 bp, Artificial Sequence
  Antisense compound
aacaagtgccttaagttttt

SEQ ID NO: 8020 - DNA, 20 bp, Artificial Sequence
  Antisense compound
caacaagtgccttaagtttt

SEQ ID NO: 8021 - DNA, 20 bp, Artificial Sequence
  Antisense compound
gcaacaagtgccttaagttt

SEQ ID NO: 8022 - DNA, 20 bp, Artificial Sequence
  Antisense compound
agcaacaagtgccttaagtt

SEQ ID NO: 8023 - DNA, 20 bp, Artificial Sequence
  Antisense compound
tagcaacaagtgccttaagt

SEQ ID NO: 8024 - DNA, 20 bp, Artificial Sequence
  Antisense compound
gtagcaacaagtgccttaag

SEQ ID NO: 8025 - DNA, 20 bp, Artificial Sequence
  Antisense compound
tgtagcaacaagtgccttaa

SEQ ID NO: 8026 - DNA, 20 bp, Artificial Sequence
  Antisense compound
ctgtagcaacaagtgcctta

SEQ ID NO: 8027 - DNA, 20 bp, Artificial Sequence
  Antisense compound
gctgtagcaacaagtgcctt

SEQ ID NO: 8028 - DNA, 20 bp, Artificial Sequence
  Antisense compound
agctgtagcaacaagtgcct

SEQ ID NO: 8029 - DNA, 20 bp, Artificial Sequence
  Antisense compound
gagctgtagcaacaagtgcc

SEQ ID NO: 8030 - DNA, 20 bp, Artificial Sequence
  Antisense compound
tgagctgtagcaacaagtgc

SEQ ID NO: 8031 - DNA, 20 bp, Artificial Sequence
  Antisense compound
gtgagctgtagcaacaagtg

SEQ ID NO: 8032 - DNA, 20 bp, Artificial Sequence
  Antisense compound
tgtgagctgtagcaacaagt

SEQ ID NO: 8033 - DNA, 20 bp, Artificial Sequence
  Antisense compound
ctgtgagctgtagcaacaag

SEQ ID NO: 8034 - DNA, 20 bp, Artificial Sequence
  Antisense compound
gctgtgagctgtagcaacaa

SEQ ID NO: 8035 - DNA, 20 bp, Artificial Sequence
  Antisense compound
cgctgtgagctgtagcaaca

SEQ ID NO: 8036 - DNA, 20 bp, Artificial Sequence
  Antisense compound
tcgctgtgagctgtagcaac

SEQ ID NO: 8037 - DNA, 20 bp, Artificial Sequence
  Antisense compound
ctcgctgtgagctgtagcaa

SEQ ID NO: 8038 - DNA, 20 bp, Artificial Sequence
  Antisense compound
actcgctgtgagctgtagca

SEQ ID NO: 8039 - DNA, 20 bp, Artificial Sequence
  Antisense compound
aactcgctgtgagctgtagc

SEQ ID NO: 8040 - DNA, 20 bp, Artificial Sequence
  Antisense compound
taactcgctgtgagctgtag

SEQ ID NO: 8041 - DNA, 20 bp, Artificial Sequence
  Antisense compound
ctaactcgctgtgagctgta

SEQ ID NO: 8042 - DNA, 20 bp, Artificial Sequence
  Antisense compound
gctaactcgctgtgagctgt

SEQ ID NO: 8043 - DNA, 20 bp, Artificial Sequence
  Antisense compound
tgctaactcgctgtgagctg

SEQ ID NO: 8044 - DNA, 20 bp, Artificial Sequence
  Antisense compound
ttgctaactcgctgtgagct

SEQ ID NO: 8045 - DNA, 20 bp, Artificial Sequence
  Antisense compound
tttgctaactcgctgtgagc

SEQ ID NO: 8046 - DNA, 20 bp, Artificial Sequence
  Antisense compound
ctttgctaactcgctgtgag

SEQ ID NO: 8047 - DNA, 20 bp, Artificial Sequence
  Antisense compound
cctttgctaactcgctgtga

SEQ ID NO: 8048 - DNA, 20 bp, Artificial Sequence
  Antisense compound
ccctttgctaactcgctgtg

SEQ ID NO: 8049 - DNA, 20 bp, Artificial Sequence
  Antisense compound
accctttgctaactcgctgt

SEQ ID NO: 8050 - DNA, 20 bp, Artificial Sequence
  Antisense compound
caccctttgctaactcgctg

SEQ ID NO: 8051 - DNA, 20 bp, Artificial Sequence
  Antisense compound
acaccctttgctaactcgct

SEQ ID NO: 8052 - DNA, 20 bp, Artificial Sequence
  Antisense compound
tacaccctttgctaactcgc

SEQ ID NO: 8053 - DNA, 20 bp, Artificial Sequence
  Antisense compound
ctacaccctttgctaactcg

SEQ ID NO: 8054 - DNA, 20 bp, Artificial Sequence
  Antisense compound
gctacaccctttgctaactc

SEQ ID NO: 8055 - DNA, 20 bp, Artificial Sequence
  Antisense compound
agctacaccctttgctaact

SEQ ID NO: 8056 - DNA, 20 bp, Artificial Sequence
  Antisense compound
aagctacaccctttgctaac

SEQ ID NO: 8057 - DNA, 20 bp, Artificial Sequence
  Antisense compound
aaagctacaccctttgctaa

SEQ ID NO: 8058 - DNA, 20 bp, Artificial Sequence
  Antisense compound
taaagctacaccctttgcta

SEQ ID NO: 8059 - DNA, 20 bp, Artificial Sequence
  Antisense compound
ctaaagctacaccctttgct

SEQ ID NO: 8060 - DNA, 20 bp, Artificial Sequence
  Antisense compound
tctaaagctacaccctttgc

SEQ ID NO: 8061 - DNA, 20 bp, Artificial Sequence
  Antisense compound
atctaaagctacaccctttg

SEQ ID NO: 8062 - DNA, 20 bp, Artificial Sequence
  Antisense compound
catctaaagctacacccttt

SEQ ID NO: 8063 - DNA, 20 bp, Artificial Sequence
  Antisense compound
ccatctaaagctacaccctt

SEQ ID NO: 8064 - DNA, 20 bp, Artificial Sequence
  Antisense compound
accatctaaagctacaccct

SEQ ID NO: 8065 - DNA, 20 bp, Artificial Sequence
  Antisense compound
caccatctaaagctacaccc

SEQ ID NO: 8066 - DNA, 20 bp, Artificial Sequence
  Antisense compound
acaccatctaaagctacacc

SEQ ID NO: 8067 - DNA, 20 bp, Artificial Sequence
  Antisense compound
gacaccatctaaagctacac

SEQ ID NO: 8068 - DNA, 20 bp, Artificial Sequence
  Antisense compound
ggacaccatctaaagctaca

SEQ ID NO: 8069 - DNA, 20 bp, Artificial Sequence
  Antisense compound
aggacaccatctaaagctac

SEQ ID NO: 8070 - DNA, 20 bp, Artificial Sequence
  Antisense compound
aaggacaccatctaaagcta

SEQ ID NO: 8071 - DNA, 20 bp, Artificial Sequence
  Antisense compound
aaaggacaccatctaaagct

SEQ ID NO: 8072 - DNA, 20 bp, Artificial Sequence
  Antisense compound
gaaaggacaccatctaaagc

SEQ ID NO: 8073 - DNA, 20 bp, Artificial Sequence
  Antisense compound
agaaaggacaccatctaaag

SEQ ID NO: 8074 - DNA, 20 bp, Artificial Sequence
  Antisense compound
tagaaaggacaccatctaaa

SEQ ID NO: 8075 - DNA, 20 bp, Artificial Sequence
  Antisense compound
gtagaaaggacaccatctaa

SEQ ID NO: 8076 - DNA, 20 bp, Artificial Sequence
  Antisense compound
tgtagaaaggacaccatcta

SEQ ID NO: 8077 - DNA, 20 bp, Artificial Sequence
  Antisense compound
atgtagaaaggacaccatct

SEQ ID NO: 8078 - DNA, 20 bp, Artificial Sequence
  Antisense compound
aatgtagaaaggacaccatc

SEQ ID NO: 8079 - DNA, 20 bp, Artificial Sequence
  Antisense compound
gaatgtagaaaggacaccat

SEQ ID NO: 8080 - DNA, 20 bp, Artificial Sequence
  Antisense compound
cgaatgtagaaaggacacca

SEQ ID NO: 8081 - DNA, 20 bp, Artificial Sequence
  Antisense compound
acgaatgtagaaaggacacc

SEQ ID NO: 8082 - DNA, 20 bp, Artificial Sequence
  Antisense compound
cacgaatgtagaaaggacac

SEQ ID NO: 8083 - DNA, 20 bp, Artificial Sequence
  Antisense compound
acacgaatgtagaaaggaca

SEQ ID NO: 8084 - DNA, 20 bp, Artificial Sequence
  Antisense compound
gacacgaatgtagaaaggac

SEQ ID NO: 8085 - DNA, 20 bp, Artificial Sequence
  Antisense compound
tgacacgaatgtagaaagga

SEQ ID NO: 8086 - DNA, 20 bp, Artificial Sequence
  Antisense compound
ctgacacgaatgtagaaagg

SEQ ID NO: 8087 - DNA, 20 bp, Artificial Sequence
  Antisense compound
gctgacacgaatgtagaaag

SEQ ID NO: 8088 - DNA, 20 bp, Artificial Sequence
  Antisense compound
agctgacacgaatgtagaaa

SEQ ID NO: 8089 - DNA, 20 bp, Artificial Sequence
  Antisense compound
cagctgacacgaatgtagaa

SEQ ID NO: 8090 - DNA, 20 bp, Artificial Sequence
  Antisense compound
gcagctgacacgaatgtaga

SEQ ID NO: 8091 - DNA, 20 bp, Artificial Sequence
  Antisense compound
ggcagctgacacgaatgtag

SEQ ID NO: 8092 - DNA, 20 bp, Artificial Sequence
  Antisense compound
gggcagctgacacgaatgta

SEQ ID NO: 8093 - DNA, 20 bp, Artificial Sequence
  Antisense compound
cgggcagctgacacgaatgt

SEQ ID NO: 8094 - DNA, 20 bp, Artificial Sequence
  Antisense compound
tcgggcagctgacacgaatg

SEQ ID NO: 8095 - DNA, 20 bp, Artificial Sequence
  Antisense compound
gtcgggcagctgacacgaat

SEQ ID NO: 8096 - DNA, 20 bp, Artificial Sequence
  Antisense compound
tgtcgggcagctgacacgaa

SEQ ID NO: 8097 - DNA, 20 bp, Artificial Sequence
  Antisense compound
ttgtcgggcagctgacacga

SEQ ID NO: 8098 - DNA, 20 bp, Artificial Sequence
  Antisense compound
cttgtcgggcagctgacacg

SEQ ID NO: 8099 - DNA, 20 bp, Artificial Sequence
  Antisense compound
ccttgtcgggcagctgacac

SEQ ID NO: 8100 - DNA, 20 bp, Artificial Sequence
  Antisense compound
accttgtcgggcagctgaca

SEQ ID NO: 8101 - DNA, 20 bp, Artificial Sequence
  Antisense compound
caccttgtcgggcagctgac

SEQ ID NO: 8102 - DNA, 20 bp, Artificial Sequence
  Antisense compound
acaccttgtcgggcagctga

SEQ ID NO: 8103 - DNA, 20 bp, Artificial Sequence
  Antisense compound
aacaccttgtcgggcagctg

SEQ ID NO: 8104 - DNA, 20 bp, Artificial Sequence
  Antisense compound
caacaccttgtcgggcagct

SEQ ID NO: 8105 - DNA, 20 bp, Artificial Sequence
  Antisense compound
acaacaccttgtcgggcagc

SEQ ID NO: 8106 - DNA, 20 bp, Artificial Sequence
  Antisense compound
aacaacaccttgtcgggcag

SEQ ID NO: 8107 - DNA, 20 bp, Artificial Sequence
  Antisense compound
caacaacaccttgtcgggca

SEQ ID NO: 8108 - DNA, 20 bp, Artificial Sequence
  Antisense compound
tcaacaacaccttgtcgggc

SEQ ID NO: 8109 - DNA, 20 bp, Artificial Sequence
  Antisense compound
atcaacaacaccttgtcggg

SEQ ID NO: 8110 - DNA, 20 bp, Artificial Sequence
  Antisense compound
tatcaacaacaccttgtcgg

SEQ ID NO: 8111 - DNA, 20 bp, Artificial Sequence
  Antisense compound
gtatcaacaacaccttgtcg

SEQ ID NO: 8112 - DNA, 20 bp, Artificial Sequence
  Antisense compound
ggtatcaacaacaccttgtc

SEQ ID NO: 8113 - DNA, 20 bp, Artificial Sequence
  Antisense compound
cggtatcaacaacaccttgt

SEQ ID NO: 8114 - DNA, 20 bp, Artificial Sequence
  Antisense compound
tcggtatcaacaacaccttg

SEQ ID NO: 8115 - DNA, 20 bp, Artificial Sequence
  Antisense compound
atcggtatcaacaacacctt

SEQ ID NO: 8116 - DNA, 20 bp, Artificial Sequence
  Antisense compound
catcggtatcaacaacacct

SEQ ID NO: 8117 - DNA, 20 bp, Artificial Sequence
  Antisense compound
acatcggtatcaacaacacc

SEQ ID NO: 8118 - DNA, 20 bp, Artificial Sequence
  Antisense compound
aacatcggtatcaacaacac

SEQ ID NO: 8119 - DNA, 20 bp, Artificial Sequence
  Antisense compound
caacatcggtatcaacaaca

SEQ ID NO: 8120 - DNA, 20 bp, Artificial Sequence
  Antisense compound
tcaacatcggtatcaacaac

SEQ ID NO: 8121 - DNA, 20 bp, Artificial Sequence
  Antisense compound
gtcaacatcggtatcaacaa

SEQ ID NO: 8122 - DNA, 20 bp, Artificial Sequence
  Antisense compound
tgtcaacatcggtatcaaca

SEQ ID NO: 8123 - DNA, 20 bp, Artificial Sequence
  Antisense compound
gtgtcaacatcggtatcaac

SEQ ID NO: 8124 - DNA, 20 bp, Artificial Sequence
  Antisense compound
tgtgtcaacatcggtatcaa

SEQ ID NO: 8125 - DNA, 20 bp, Artificial Sequence
  Antisense compound
ttgtgtcaacatcggtatca

SEQ ID NO: 8126 - DNA, 20 bp, Artificial Sequence
  Antisense compound
tttgtgtcaacatcggtatc

SEQ ID NO: 8127 - DNA, 20 bp, Artificial Sequence
  Antisense compound
ctttgtgtcaacatcggtat

SEQ ID NO: 8128 - DNA, 20 bp, Artificial Sequence
  Antisense compound
cctttgtgtcaacatcggta

SEQ ID NO: 8129 - DNA, 20 bp, Artificial Sequence
  Antisense compound
tcctttgtgtcaacatcggt

SEQ ID NO: 8130 - DNA, 20 bp, Artificial Sequence
  Antisense compound
atcctttgtgtcaacatcgg

SEQ ID NO: 8131 - DNA, 20 bp, Artificial Sequence
  Antisense compound
catcctttgtgtcaacatcg

SEQ ID NO: 8132 - DNA, 20 bp, Artificial Sequence
  Antisense compound
acatcctttgtgtcaacatc

SEQ ID NO: 8133 - DNA, 20 bp, Artificial Sequence
  Antisense compound
aacatcctttgtgtcaacat

SEQ ID NO: 8134 - DNA, 20 bp, Artificial Sequence
  Antisense compound
taacatcctttgtgtcaaca

SEQ ID NO: 8135 - DNA, 20 bp, Artificial Sequence
  Antisense compound
ataacatcctttgtgtcaac

SEQ ID NO: 8136 - DNA, 20 bp, Artificial Sequence
  Antisense compound
aataacatcctttgtgtcaa

SEQ ID NO: 8137 - DNA, 20 bp, Artificial Sequence
  Antisense compound
caataacatcctttgtgtca

SEQ ID NO: 8138 - DNA, 20 bp, Artificial Sequence
  Antisense compound
tcaataacatcctttgtgtc

SEQ ID NO: 8139 - DNA, 20 bp, Artificial Sequence
  Antisense compound
ttcaataacatcctttgtgt

SEQ ID NO: 8140 - DNA, 20 bp, Artificial Sequence
  Antisense compound
attcaataacatcctttgtg

SEQ ID NO: 8141 - DNA, 20 bp, Artificial Sequence
  Antisense compound
cattcaataacatcctttgt

SEQ ID NO: 8142 - DNA, 20 bp, Artificial Sequence
  Antisense compound
acattcaataacatcctttg

SEQ ID NO: 8143 - DNA, 20 bp, Artificial Sequence
  Antisense compound
gacattcaataacatccttt

SEQ ID NO: 8144 - DNA, 20 bp, Artificial Sequence
  Antisense compound
agacattcaataacatcctt

SEQ ID NO: 8145 - DNA, 20 bp, Artificial Sequence
  Antisense compound
gagacattcaataacatcct

SEQ ID NO: 8146 - DNA, 20 bp, Artificial Sequence
  Antisense compound
tgagacattcaataacatcc

SEQ ID NO: 8147 - DNA, 20 bp, Artificial Sequence
  Antisense compound
ttgagacattcaataacatc

SEQ ID NO: 8148 - DNA, 20 bp, Artificial Sequence
  Antisense compound
tttgagacattcaataacat

SEQ ID NO: 8149 - DNA, 20 bp, Artificial Sequence
  Antisense compound
gtttgagacattcaataaca

SEQ ID NO: 8150 - DNA, 20 bp, Artificial Sequence
  Antisense compound
agtttgagacattcaataac

SEQ ID NO: 8151 - DNA, 20 bp, Artificial Sequence
  Antisense compound
aagtttgagacattcaataa

SEQ ID NO: 8152 - DNA, 20 bp, Artificial Sequence
  Antisense compound
aaagtttgagacattcaata

SEQ ID NO: 8153 - DNA, 20 bp, Artificial Sequence
  Antisense compound
gaaagtttgagacattcaat

SEQ ID NO: 8154 - DNA, 20 bp, Artificial Sequence
  Antisense compound
tgaaagtttgagacattcaa

SEQ ID NO: 8155 - DNA, 20 bp, Artificial Sequence
  Antisense compound
gtgaaagtttgagacattca

SEQ ID NO: 8156 - DNA, 20 bp, Artificial Sequence
  Antisense compound
tgtgaaagtttgagacattc

SEQ ID NO: 8157 - DNA, 20 bp, Artificial Sequence
  Antisense compound
atgtgaaagtttgagacatt

SEQ ID NO: 8158 - DNA, 20 bp, Artificial Sequence
  Antisense compound
gatgtgaaagtttgagacat

SEQ ID NO: 8159 - DNA, 20 bp, Artificial Sequence
  Antisense compound
tgatgtgaaagtttgagaca

SEQ ID NO: 8160 - DNA, 20 bp, Artificial Sequence
  Antisense compound
gtgatgtgaaagtttgagac

SEQ ID NO: 8161 - DNA, 20 bp, Artificial Sequence
  Antisense compound
agtgatgtgaaagtttgaga

SEQ ID NO: 8162 - DNA, 20 bp, Artificial Sequence
  Antisense compound
gagtgatgtgaaagtttgag

SEQ ID NO: 8163 - DNA, 20 bp, Artificial Sequence
  Antisense compound
agagtgatgtgaaagtttga

SEQ ID NO: 8164 - DNA, 20 bp, Artificial Sequence
  Antisense compound
cagagtgatgtgaaagtttg

SEQ ID NO: 8165 - DNA, 20 bp, Artificial Sequence
  Antisense compound
tcagagtgatgtgaaagttt

SEQ ID NO: 8166 - DNA, 20 bp, Artificial Sequence
  Antisense compound
gtcagagtgatgtgaaagtt

SEQ ID NO: 8167 - DNA, 20 bp, Artificial Sequence
  Antisense compound
agtcagagtgatgtgaaagt

SEQ ID NO: 8168 - DNA, 20 bp, Artificial Sequence
  Antisense compound
aagtcagagtgatgtgaaag

SEQ ID NO: 8169 - DNA, 20 bp, Artificial Sequence
  Antisense compound
taagtcagagtgatgtgaaa

SEQ ID NO: 8170 - DNA, 20 bp, Artificial Sequence
  Antisense compound
ctaagtcagagtgatgtgaa

SEQ ID NO: 8171 - DNA, 20 bp, Artificial Sequence
  Antisense compound
tctaagtcagagtgatgtga

SEQ ID NO: 8172 - DNA, 20 bp, Artificial Sequence
  Antisense compound
ttctaagtcagagtgatgtg

SEQ ID NO: 8173 - DNA, 20 bp, Artificial Sequence
  Antisense compound
cttctaagtcagagtgatgt

SEQ ID NO: 8174 - DNA, 20 bp, Artificial Sequence
  Antisense compound
acttctaagtcagagtgatg

SEQ ID NO: 8175 - DNA, 20 bp, Artificial Sequence
  Antisense compound
cacttctaagtcagagtgat

SEQ ID NO: 8176 - DNA, 20 bp, Artificial Sequence
  Antisense compound
tcacttctaagtcagagtga

SEQ ID NO: 8177 - DNA, 20 bp, Artificial Sequence
  Antisense compound
gtcacttctaagtcagagtg

SEQ ID NO: 8178 - DNA, 20 bp, Artificial Sequence
  Antisense compound
tgtcacttctaagtcagagt

SEQ ID NO: 8179 - DNA, 20 bp, Artificial Sequence
  Antisense compound
ctgtcacttctaagtcagag

SEQ ID NO: 8180 - DNA, 20 bp, Artificial Sequence
  Antisense compound
cctgtcacttctaagtcaga

SEQ ID NO: 8181 - DNA, 20 bp, Artificial Sequence
  Antisense compound
acctgtcacttctaagtcag

SEQ ID NO: 8182 - DNA, 20 bp, Artificial Sequence
  Antisense compound
cacctgtcacttctaagtca

SEQ ID NO: 8183 - DNA, 20 bp, Artificial Sequence
  Antisense compound
tcacctgtcacttctaagtc

SEQ ID NO: 8184 - DNA, 20 bp, Artificial Sequence
  Antisense compound
gtcacctgtcacttctaagt

SEQ ID NO: 8185 - DNA, 20 bp, Artificial Sequence
  Antisense compound
tgtcacctgtcacttctaag

SEQ ID NO: 8186 - DNA, 20 bp, Artificial Sequence
  Antisense compound
ctgtcacctgtcacttctaa

SEQ ID NO: 8187 - DNA, 20 bp, Artificial Sequence
  Antisense compound
actgtcacctgtcacttcta

SEQ ID NO: 8188 - DNA, 20 bp, Artificial Sequence
  Antisense compound
aactgtcacctgtcacttct

SEQ ID NO: 8189 - DNA, 20 bp, Artificial Sequence
  Antisense compound
caactgtcacctgtcacttc

SEQ ID NO: 8190 - DNA, 20 bp, Artificial Sequence
  Antisense compound
acaactgtcacctgtcactt

SEQ ID NO: 8191 - DNA, 20 bp, Artificial Sequence
  Antisense compound
tacaactgtcacctgtcact

SEQ ID NO: 8192 - DNA, 20 bp, Artificial Sequence
  Antisense compound
ttacaactgtcacctgtcac

SEQ ID NO: 8193 - DNA, 20 bp, Artificial Sequence
  Antisense compound
gttacaactgtcacctgtca

SEQ ID NO: 8194 - DNA, 20 bp, Artificial Sequence
  Antisense compound
tgttacaactgtcacctgtc

SEQ ID NO: 8195 - DNA, 20 bp, Artificial Sequence
  Antisense compound
ttgttacaactgtcacctgt

SEQ ID NO: 8196 - DNA, 20 bp, Artificial Sequence
  Antisense compound
attgttacaactgtcacctg

SEQ ID NO: 8197 - DNA, 20 bp, Artificial Sequence
  Antisense compound
aattgttacaactgtcacct

SEQ ID NO: 8198 - DNA, 20 bp, Artificial Sequence
  Antisense compound
aaattgttacaactgtcacc

SEQ ID NO: 8199 - DNA, 20 bp, Artificial Sequence
  Antisense compound
gaaattgttacaactgtcac

SEQ ID NO: 8200 - DNA, 20 bp, Artificial Sequence
  Antisense compound
tgaaattgttacaactgtca

SEQ ID NO: 8201 - DNA, 20 bp, Artificial Sequence
  Antisense compound
atgaaattgttacaactgtc

SEQ ID NO: 8202 - DNA, 20 bp, Artificial Sequence
  Antisense compound
catgaaattgttacaactgt

SEQ ID NO: 8203 - DNA, 20 bp, Artificial Sequence
  Antisense compound
gcatgaaattgttacaactg

SEQ ID NO: 8204 - DNA, 20 bp, Artificial Sequence
  Antisense compound
agcatgaaattgttacaact

SEQ ID NO: 8205 - DNA, 20 bp, Artificial Sequence
  Antisense compound
gagcatgaaattgttacaac

SEQ ID NO: 8206 - DNA, 20 bp, Artificial Sequence
  Antisense compound
tgagcatgaaattgttacaa

SEQ ID NO: 8207 - DNA, 20 bp, Artificial Sequence
  Antisense compound
gtgagcatgaaattgttaca

SEQ ID NO: 8208 - DNA, 20 bp, Artificial Sequence
  Antisense compound
ggtgagcatgaaattgttac

SEQ ID NO: 8209 - DNA, 20 bp, Artificial Sequence
  Antisense compound
aggtgagcatgaaattgtta

SEQ ID NO: 8210 - DNA, 20 bp, Artificial Sequence
  Antisense compound
taggtgagcatgaaattgtt

SEQ ID NO: 8211 - DNA, 20 bp, Artificial Sequence
  Antisense compound
ataggtgagcatgaaattgt

SEQ ID NO: 8212 - DNA, 20 bp, Artificial Sequence
  Antisense compound
tataggtgagcatgaaattg

SEQ ID NO: 8213 - DNA, 20 bp, Artificial Sequence
  Antisense compound
ttataggtgagcatgaaatt

SEQ ID NO: 8214 - DNA, 20 bp, Artificial Sequence
  Antisense compound
attataggtgagcatgaaat

SEQ ID NO: 8215 - DNA, 20 bp, Artificial Sequence
  Antisense compound
tattataggtgagcatgaaa

SEQ ID NO: 8216 - DNA, 20 bp, Artificial Sequence
  Antisense compound
ttattataggtgagcatgaa

SEQ ID NO: 8217 - DNA, 20 bp, Artificial Sequence
  Antisense compound
cttattataggtgagcatga

SEQ ID NO: 8218 - DNA, 20 bp, Artificial Sequence
  Antisense compound
ccttattataggtgagcatg

SEQ ID NO: 8219 - DNA, 20 bp, Artificial Sequence
  Antisense compound
accttattataggtgagcat

SEQ ID NO: 8220 - DNA, 20 bp, Artificial Sequence
  Antisense compound
aaccttattataggtgagca

SEQ ID NO: 8221 - DNA, 20 bp, Artificial Sequence
  Antisense compound
caaccttattataggtgagc

SEQ ID NO: 8222 - DNA, 20 bp, Artificial Sequence
  Antisense compound
tcaaccttattataggtgag

SEQ ID NO: 8223 - DNA, 20 bp, Artificial Sequence
  Antisense compound
ttcaaccttattataggtga

SEQ ID NO: 8224 - DNA, 20 bp, Artificial Sequence
  Antisense compound
tttcaaccttattataggtg

SEQ ID NO: 8225 - DNA, 20 bp, Artificial Sequence
  Antisense compound
ttttcaaccttattataggt

SEQ ID NO: 8226 - DNA, 20 bp, Artificial Sequence
  Antisense compound
gttttcaaccttattatagg

SEQ ID NO: 8227 - DNA, 20 bp, Artificial Sequence
  Antisense compound
tgttttcaaccttattatag

SEQ ID NO: 8228 - DNA, 20 bp, Artificial Sequence
  Antisense compound
atgttttcaaccttattata

SEQ ID NO: 8229 - DNA, 20 bp, Artificial Sequence
  Antisense compound
catgttttcaaccttattat

SEQ ID NO: 8230 - DNA, 20 bp, Artificial Sequence
  Antisense compound
tcatgttttcaaccttatta

SEQ ID NO: 8231 - DNA, 20 bp, Artificial Sequence
  Antisense compound
gtcatgttttcaaccttatt

SEQ ID NO: 8232 - DNA, 20 bp, Artificial Sequence
  Antisense compound
cgtcatgttttcaaccttat

SEQ ID NO: 8233 - DNA, 20 bp, Artificial Sequence
  Antisense compound
gcgtcatgttttcaacctta

SEQ ID NO: 8234 - DNA, 20 bp, Artificial Sequence
  Antisense compound
ggcgtcatgttttcaacctt

SEQ ID NO: 8235 - DNA, 20 bp, Artificial Sequence
  Antisense compound
gggcgtcatgttttcaacct

SEQ ID NO: 8236 - DNA, 20 bp, Artificial Sequence
  Antisense compound
tgggcgtcatgttttcaacc

SEQ ID NO: 8237 - DNA, 20 bp, Artificial Sequence
  Antisense compound
ctgggcgtcatgttttcaac

SEQ ID NO: 8238 - DNA, 20 bp, Artificial Sequence
  Antisense compound
tctgggcgtcatgttttcaa

SEQ ID NO: 8239 - DNA, 20 bp, Artificial Sequence
  Antisense compound
ctctgggcgtcatgttttca

SEQ ID NO: 8240 - DNA, 20 bp, Artificial Sequence
  Antisense compound
tctctgggcgtcatgttttc

SEQ ID NO: 8241 - DNA, 20 bp, Artificial Sequence
  Antisense compound
atctctgggcgtcatgtttt

SEQ ID NO: 8242 - DNA, 20 bp, Artificial Sequence
  Antisense compound
gatctctgggcgtcatgttt

SEQ ID NO: 8243 - DNA, 20 bp, Artificial Sequence
  Antisense compound
agatctctgggcgtcatgtt

SEQ ID NO: 8244 - DNA, 20 bp, Artificial Sequence
  Antisense compound
aagatctctgggcgtcatgt

SEQ ID NO: 8245 - DNA, 20 bp, Artificial Sequence
  Antisense compound
caagatctctgggcgtcatg

SEQ ID NO: 8246 - DNA, 20 bp, Artificial Sequence
  Antisense compound
ccaagatctctgggcgtcat

SEQ ID NO: 8247 - DNA, 20 bp, Artificial Sequence
  Antisense compound
gccaagatctctgggcgtca

SEQ ID NO: 8248 - DNA, 20 bp, Artificial Sequence
  Antisense compound
cgccaagatctctgggcgtc

SEQ ID NO: 8249 - DNA, 20 bp, Artificial Sequence
  Antisense compound
gcgccaagatctctgggcgt

SEQ ID NO: 8250 - DNA, 20 bp, Artificial Sequence
  Antisense compound
tgcgccaagatctctgggcg

SEQ ID NO: 8251 - DNA, 20 bp, Artificial Sequence
  Antisense compound
atgcgccaagatctctgggc

SEQ ID NO: 8252 - DNA, 20 bp, Artificial Sequence
  Antisense compound
catgcgccaagatctctggg

SEQ ID NO: 8253 - DNA, 20 bp, Artificial Sequence
  Antisense compound
acatgcgccaagatctctgg

SEQ ID NO: 8254 - DNA, 20 bp, Artificial Sequence
  Antisense compound
tacatgcgccaagatctctg

SEQ ID NO: 8255 - DNA, 20 bp, Artificial Sequence
  Antisense compound
atacatgcgccaagatctct

SEQ ID NO: 8256 - DNA, 20 bp, Artificial Sequence
  Antisense compound
aatacatgcgccaagatctc

SEQ ID NO: 8257 - DNA, 20 bp, Artificial Sequence
  Antisense compound
caatacatgcgccaagatct

SEQ ID NO: 8258 - DNA, 20 bp, Artificial Sequence
  Antisense compound
tcaatacatgcgccaagatc

SEQ ID NO: 8259 - DNA, 20 bp, Artificial Sequence
  Antisense compound
gtcaatacatgcgccaagat

SEQ ID NO: 8260 - DNA, 20 bp, Artificial Sequence
  Antisense compound
agtcaatacatgcgccaaga

SEQ ID NO: 8261 - DNA, 20 bp, Artificial Sequence
  Antisense compound
cagtcaatacatgcgccaag

SEQ ID NO: 8262 - DNA, 20 bp, Artificial Sequence
  Antisense compound
acagtcaatacatgcgccaa

SEQ ID NO: 8263 - DNA, 20 bp, Artificial Sequence
  Antisense compound
tacagtcaatacatgcgcca

SEQ ID NO: 8264 - DNA, 20 bp, Artificial Sequence
  Antisense compound
ttacagtcaatacatgcgcc

SEQ ID NO: 8265 - DNA, 20 bp, Artificial Sequence
  Antisense compound
attacagtcaatacatgcgc

SEQ ID NO: 8266 - DNA, 20 bp, Artificial Sequence
  Antisense compound
cattacagtcaatacatgcg

SEQ ID NO: 8267 - DNA, 20 bp, Artificial Sequence
  Antisense compound
gcattacagtcaatacatgc

SEQ ID NO: 8268 - DNA, 20 bp, Artificial Sequence
  Antisense compound
tgcattacagtcaatacatg

SEQ ID NO: 8269 - DNA, 20 bp, Artificial Sequence
  Antisense compound
ttgcattacagtcaatacat

SEQ ID NO: 8270 - DNA, 20 bp, Artificial Sequence
  Antisense compound
cttgcattacagtcaataca

SEQ ID NO: 8271 - DNA, 20 bp, Artificial Sequence
  Antisense compound
ccttgcattacagtcaatac

SEQ ID NO: 8272 - DNA, 20 bp, Artificial Sequence
  Antisense compound
gccttgcattacagtcaata

SEQ ID NO: 8273 - DNA, 20 bp, Artificial Sequence
  Antisense compound
tgccttgcattacagtcaat

SEQ ID NO: 8274 - DNA, 20 bp, Artificial Sequence
  Antisense compound
atgccttgcattacagtcaa

SEQ ID NO: 8275 - DNA, 20 bp, Artificial Sequence
  Antisense compound
tatgccttgcattacagtca

SEQ ID NO: 8276 - DNA, 20 bp, Artificial Sequence
  Antisense compound
atatgccttgcattacagtc

SEQ ID NO: 8277 - DNA, 20 bp, Artificial Sequence
  Antisense compound
gatatgccttgcattacagt

SEQ ID NO: 8278 - DNA, 20 bp, Artificial Sequence
  Antisense compound
tgatatgccttgcattacag

SEQ ID NO: 8279 - DNA, 20 bp, Artificial Sequence
  Antisense compound
ttgatatgccttgcattaca

SEQ ID NO: 8280 - DNA, 20 bp, Artificial Sequence
  Antisense compound
attgatatgccttgcattac

SEQ ID NO: 8281 - DNA, 20 bp, Artificial Sequence
  Antisense compound
cattgatatgccttgcatta

SEQ ID NO: 8282 - DNA, 20 bp, Artificial Sequence
  Antisense compound
gcattgatatgccttgcatt

SEQ ID NO: 8283 - DNA, 20 bp, Artificial Sequence
  Antisense compound
ggcattgatatgccttgcat

SEQ ID NO: 8284 - DNA, 20 bp, Artificial Sequence
  Antisense compound
gggcattgatatgccttgca

SEQ ID NO: 8285 - DNA, 20 bp, Artificial Sequence
  Antisense compound
tgggcattgatatgccttgc

SEQ ID NO: 8286 - DNA, 20 bp, Artificial Sequence
  Antisense compound
ttgggcattgatatgccttg

SEQ ID NO: 8287 - DNA, 20 bp, Artificial Sequence
  Antisense compound
cttgggcattgatatgcctt

SEQ ID NO: 8288 - DNA, 20 bp, Artificial Sequence
  Antisense compound
acttgggcattgatatgcct

SEQ ID NO: 8289 - DNA, 20 bp, Artificial Sequence
  Antisense compound
tacttgggcattgatatgcc

SEQ ID NO: 8290 - DNA, 20 bp, Artificial Sequence
  Antisense compound
ctacttgggcattgatatgc

SEQ ID NO: 8291 - DNA, 20 bp, Artificial Sequence
  Antisense compound
gctacttgggcattgatatg

SEQ ID NO: 8292 - DNA, 20 bp, Artificial Sequence
  Antisense compound
tgctacttgggcattgatat

SEQ ID NO: 8293 - DNA, 20 bp, Artificial Sequence
  Antisense compound
ttgctacttgggcattgata

SEQ ID NO: 8294 - DNA, 20 bp, Artificial Sequence
  Antisense compound
tttgctacttgggcattgat

SEQ ID NO: 8295 - DNA, 20 bp, Artificial Sequence
  Antisense compound
ttttgctacttgggcattga

SEQ ID NO: 8296 - DNA, 20 bp, Artificial Sequence
  Antisense compound
tttttgctacttgggcattg

SEQ ID NO: 8297 - DNA, 20 bp, Artificial Sequence
  Antisense compound
ctttttgctacttgggcatt

SEQ ID NO: 8298 - DNA, 20 bp, Artificial Sequence
  Antisense compound
actttttgctacttgggcat

SEQ ID NO: 8299 - DNA, 20 bp, Artificial Sequence
  Antisense compound
gactttttgctacttgggca

SEQ ID NO: 8300 - DNA, 20 bp, Artificial Sequence
  Antisense compound
tgactttttgctacttgggc

SEQ ID NO: 8301 - DNA, 20 bp, Artificial Sequence
  Antisense compound
gtgactttttgctacttggg

SEQ ID NO: 8302 - DNA, 20 bp, Artificial Sequence
  Antisense compound
tgtgactttttgctacttgg

SEQ ID NO: 8303 - DNA, 20 bp, Artificial Sequence
  Antisense compound
ttgtgactttttgctacttg

SEQ ID NO: 8304 - DNA, 20 bp, Artificial Sequence
  Antisense compound
attgtgactttttgctactt

SEQ ID NO: 8305 - DNA, 20 bp, Artificial Sequence
  Antisense compound
cattgtgactttttgctact

SEQ ID NO: 8306 - DNA, 20 bp, Artificial Sequence
  Antisense compound
acattgtgactttttgctac

SEQ ID NO: 8307 - DNA, 20 bp, Artificial Sequence
  Antisense compound
aacattgtgactttttgcta

SEQ ID NO: 8308 - DNA, 20 bp, Artificial Sequence
  Antisense compound
aaacattgtgactttttgct

SEQ ID NO: 8309 - DNA, 20 bp, Artificial Sequence
  Antisense compound
gaaacattgtgactttttgc

SEQ ID NO: 8310 - DNA, 20 bp, Artificial Sequence
  Antisense compound
tgaaacattgtgactttttg

SEQ ID NO: 8311 - DNA, 20 bp, Artificial Sequence
  Antisense compound
gtgaaacattgtgacttttt

SEQ ID NO: 8312 - DNA, 20 bp, Artificial Sequence
  Antisense compound
agtgaaacattgtgactttt

SEQ ID NO: 8313 - DNA, 20 bp, Artificial Sequence
  Antisense compound
gagtgaaacattgtgacttt

SEQ ID NO: 8314 - DNA, 20 bp, Artificial Sequence
  Antisense compound
tgagtgaaacattgtgactt

SEQ ID NO: 8315 - DNA, 20 bp, Artificial Sequence
  Antisense compound
atgagtgaaacattgtgact

SEQ ID NO: 8316 - DNA, 20 bp, Artificial Sequence
  Antisense compound
gatgagtgaaacattgtgac

SEQ ID NO: 8317 - DNA, 20 bp, Artificial Sequence
  Antisense compound
agatgagtgaaacattgtga

SEQ ID NO: 8318 - DNA, 20 bp, Artificial Sequence
  Antisense compound
cagatgagtgaaacattgtg

SEQ ID NO: 8319 - DNA, 20 bp, Artificial Sequence
  Antisense compound
ccagatgagtgaaacattgt

SEQ ID NO: 8320 - DNA, 20 bp, Artificial Sequence
  Antisense compound
tccagatgagtgaaacattg

SEQ ID NO: 8321 - DNA, 20 bp, Artificial Sequence
  Antisense compound
ttccagatgagtgaaacatt

SEQ ID NO: 8322 - DNA, 20 bp, Artificial Sequence
  Antisense compound
attccagatgagtgaaacat

SEQ ID NO: 8323 - DNA, 20 bp, Artificial Sequence
  Antisense compound
cattccagatgagtgaaaca

SEQ ID NO: 8324 - DNA, 20 bp, Artificial Sequence
  Antisense compound
acattccagatgagtgaaac

SEQ ID NO: 8325 - DNA, 20 bp, Artificial Sequence
  Antisense compound
tacattccagatgagtgaaa

SEQ ID NO: 8326 - DNA, 20 bp, Artificial Sequence
  Antisense compound
ttacattccagatgagtgaa

SEQ ID NO: 8327 - DNA, 20 bp, Artificial Sequence
  Antisense compound
tttacattccagatgagtga

SEQ ID NO: 8328 - DNA, 20 bp, Artificial Sequence
  Antisense compound
ttttacattccagatgagtg

SEQ ID NO: 8329 - DNA, 20 bp, Artificial Sequence
  Antisense compound
cttttacattccagatgagt

SEQ ID NO: 8330 - DNA, 20 bp, Artificial Sequence
  Antisense compound
tcttttacattccagatgag

SEQ ID NO: 8331 - DNA, 20 bp, Artificial Sequence
  Antisense compound
gtcttttacattccagatga

SEQ ID NO: 8332 - DNA, 20 bp, Artificial Sequence
  Antisense compound
agtcttttacattccagatg

SEQ ID NO: 8333 - DNA, 20 bp, Artificial Sequence
  Antisense compound
tagtcttttacattccagat

SEQ ID NO: 8334 - DNA, 20 bp, Artificial Sequence
  Antisense compound
gtagtcttttacattccaga

SEQ ID NO: 8335 - DNA, 20 bp, Artificial Sequence
  Antisense compound
tgtagtcttttacattccag

SEQ ID NO: 8336 - DNA, 20 bp, Artificial Sequence
  Antisense compound
atgtagtcttttacattcca

SEQ ID NO: 8337 - DNA, 20 bp, Artificial Sequence
  Antisense compound
catgtagtcttttacattcc

SEQ ID NO: 8338 - DNA, 20 bp, Artificial Sequence
  Antisense compound
acatgtagtcttttacattc

SEQ ID NO: 8339 - DNA, 20 bp, Artificial Sequence
  Antisense compound
gacatgtagtcttttacatt

SEQ ID NO: 8340 - DNA, 20 bp, Artificial Sequence
  Antisense compound
agacatgtagtcttttacat

SEQ ID NO: 8341 - DNA, 20 bp, Artificial Sequence
  Antisense compound
aagacatgtagtcttttaca

SEQ ID NO: 8342 - DNA, 20 bp, Artificial Sequence
  Antisense compound
aaagacatgtagtcttttac

SEQ ID NO: 8343 - DNA, 20 bp, Artificial Sequence
  Antisense compound
taaagacatgtagtctttta

SEQ ID NO: 8344 - DNA, 20 bp, Artificial Sequence
  Antisense compound
ataaagacatgtagtctttt

SEQ ID NO: 8345 - DNA, 20 bp, Artificial Sequence
  Antisense compound
gataaagacatgtagtcttt

SEQ ID NO: 8346 - DNA, 20 bp, Artificial Sequence
  Antisense compound
agataaagacatgtagtctt

SEQ ID NO: 8347 - DNA, 20 bp, Artificial Sequence
  Antisense compound
cagataaagacatgtagtct

SEQ ID NO: 8348 - DNA, 20 bp, Artificial Sequence
  Antisense compound
tcagataaagacatgtagtc

SEQ ID NO: 8349 - DNA, 20 bp, Artificial Sequence
  Antisense compound
ttcagataaagacatgtagt

SEQ ID NO: 8350 - DNA, 20 bp, Artificial Sequence
  Antisense compound
gttcagataaagacatgtag

SEQ ID NO: 8351 - DNA, 20 bp, Artificial Sequence
  Antisense compound
tgttcagataaagacatgta

SEQ ID NO: 8352 - DNA, 20 bp, Artificial Sequence
  Antisense compound
ctgttcagataaagacatgt

SEQ ID NO: 8353 - DNA, 20 bp, Artificial Sequence
  Antisense compound
gctgttcagataaagacatg

SEQ ID NO: 8354 - DNA, 20 bp, Artificial Sequence
  Antisense compound
agctgttcagataaagacat

SEQ ID NO: 8355 - DNA, 20 bp, Artificial Sequence
  Antisense compound
cagctgttcagataaagaca

SEQ ID NO: 8356 - DNA, 20 bp, Artificial Sequence
  Antisense compound
gcagctgttcagataaagac

SEQ ID NO: 8357 - DNA, 20 bp, Artificial Sequence
  Antisense compound
cgcagctgttcagataaaga

SEQ ID NO: 8358 - DNA, 20 bp, Artificial Sequence
  Antisense compound
acgcagctgttcagataaag

SEQ ID NO: 8359 - DNA, 20 bp, Artificial Sequence
  Antisense compound
tacgcagctgttcagataaa

SEQ ID NO: 8360 - DNA, 20 bp, Artificial Sequence
  Antisense compound
ttacgcagctgttcagataa

SEQ ID NO: 8361 - DNA, 20 bp, Artificial Sequence
  Antisense compound
tttacgcagctgttcagata

SEQ ID NO: 8362 - DNA, 20 bp, Artificial Sequence
  Antisense compound
gtttacgcagctgttcagat

SEQ ID NO: 8363 - DNA, 20 bp, Artificial Sequence
  Antisense compound
tgtttacgcagctgttcaga

SEQ ID NO: 8364 - DNA, 20 bp, Artificial Sequence
  Antisense compound
ttgtttacgcagctgttcag

SEQ ID NO: 8365 - DNA, 20 bp, Artificial Sequence
  Antisense compound
tttgtttacgcagctgttca

SEQ ID NO: 8366 - DNA, 20 bp, Artificial Sequence
  Antisense compound
atttgtttacgcagctgttc

SEQ ID NO: 8367 - DNA, 20 bp, Artificial Sequence
  Antisense compound
aatttgtttacgcagctgtt

SEQ ID NO: 8368 - DNA, 20 bp, Artificial Sequence
  Antisense compound
gaatttgtttacgcagctgt

SEQ ID NO: 8369 - DNA, 20 bp, Artificial Sequence
  Antisense compound
cgaatttgtttacgcagctg

SEQ ID NO: 8370 - DNA, 20 bp, Artificial Sequence
  Antisense compound
acgaatttgtttacgcagct

SEQ ID NO: 8371 - DNA, 20 bp, Artificial Sequence
  Antisense compound
tacgaatttgtttacgcagc

SEQ ID NO: 8372 - DNA, 20 bp, Artificial Sequence
  Antisense compound
ctacgaatttgtttacgcag

SEQ ID NO: 8373 - DNA, 20 bp, Artificial Sequence
  Antisense compound
actacgaatttgtttacgca

SEQ ID NO: 8374 - DNA, 20 bp, Artificial Sequence
  Antisense compound
cactacgaatttgtttacgc

SEQ ID NO: 8375 - DNA, 20 bp, Artificial Sequence
  Antisense compound
gcactacgaatttgtttacg

SEQ ID NO: 8376 - DNA, 20 bp, Artificial Sequence
  Antisense compound
agcactacgaatttgtttac

SEQ ID NO: 8377 - DNA, 20 bp, Artificial Sequence
  Antisense compound
cagcactacgaatttgttta

SEQ ID NO: 8378 - DNA, 20 bp, Artificial Sequence
  Antisense compound
gcagcactacgaatttgttt

SEQ ID NO: 8379 - DNA, 20 bp, Artificial Sequence
  Antisense compound
ggcagcactacgaatttgtt

SEQ ID NO: 8380 - DNA, 20 bp, Artificial Sequence
  Antisense compound
tggcagcactacgaatttgt

SEQ ID NO: 8381 - DNA, 20 bp, Artificial Sequence
  Antisense compound
ttggcagcactacgaatttg

SEQ ID NO: 8382 - DNA, 20 bp, Artificial Sequence
  Antisense compound
cttggcagcactacgaattt

SEQ ID NO: 8383 - DNA, 20 bp, Artificial Sequence
  Antisense compound
tcttggcagcactacgaatt

SEQ ID NO: 8384 - DNA, 20 bp, Artificial Sequence
  Antisense compound
ttcttggcagcactacgaat

SEQ ID NO: 8385 - DNA, 20 bp, Artificial Sequence
  Antisense compound
cttcttggcagcactacgaa

SEQ ID NO: 8386 - DNA, 20 bp, Artificial Sequence
  Antisense compound
tcttcttggcagcactacga

SEQ ID NO: 8387 - DNA, 20 bp, Artificial Sequence
  Antisense compound
ttcttcttggcagcactacg

SEQ ID NO: 8388 - DNA, 20 bp, Artificial Sequence
  Antisense compound
gttcttcttggcagcactac

SEQ ID NO: 8389 - DNA, 20 bp, Artificial Sequence
  Antisense compound
tgttcttcttggcagcacta

SEQ ID NO: 8390 - DNA, 20 bp, Artificial Sequence
  Antisense compound
ttgttcttcttggcagcact

SEQ ID NO: 8391 - DNA, 20 bp, Artificial Sequence
  Antisense compound
gttgttcttcttggcagcac

SEQ ID NO: 8392 - DNA, 20 bp, Artificial Sequence
  Antisense compound
tgttgttcttcttggcagca

SEQ ID NO: 8393 - DNA, 20 bp, Artificial Sequence
  Antisense compound
atgttgttcttcttggcagc

SEQ ID NO: 8394 - DNA, 20 bp, Artificial Sequence
  Antisense compound
tatgttgttcttcttggcag

SEQ ID NO: 8395 - DNA, 20 bp, Artificial Sequence
  Antisense compound
gtatgttgttcttcttggca

SEQ ID NO: 8396 - DNA, 20 bp, Artificial Sequence
  Antisense compound
ggtatgttgttcttcttggc

SEQ ID NO: 8397 - DNA, 20 bp, Artificial Sequence
  Antisense compound
aggtatgttgttcttcttgg

SEQ ID NO: 8398 - DNA, 20 bp, Artificial Sequence
  Antisense compound
aaggtatgttgttcttcttg

SEQ ID NO: 8399 - DNA, 20 bp, Artificial Sequence
  Antisense compound
aaaggtatgttgttcttctt

SEQ ID NO: 8400 - DNA, 20 bp, Artificial Sequence
  Antisense compound
aaaaggtatgttgttcttct

SEQ ID NO: 8401 - DNA, 20 bp, Artificial Sequence
  Antisense compound
taaaaggtatgttgttcttc

SEQ ID NO: 8402 - DNA, 20 bp, Artificial Sequence
  Antisense compound
ctaaaaggtatgttgttctt

SEQ ID NO: 8403 - DNA, 20 bp, Artificial Sequence
  Antisense compound
tctaaaaggtatgttgttct

SEQ ID NO: 8404 - DNA, 20 bp, Artificial Sequence
  Antisense compound
gtctaaaaggtatgttgttc

SEQ ID NO: 8405 - DNA, 20 bp, Artificial Sequence
  Antisense compound
agtctaaaaggtatgttgtt

SEQ ID NO: 8406 - DNA, 20 bp, Artificial Sequence
  Antisense compound
tagtctaaaaggtatgttgt

SEQ ID NO: 8407 - DNA, 20 bp, Artificial Sequence
  Antisense compound
ttagtctaaaaggtatgttg

SEQ ID NO: 8408 - DNA, 20 bp, Artificial Sequence
  Antisense compound
gttagtctaaaaggtatgtt

SEQ ID NO: 8409 - DNA, 20 bp, Artificial Sequence
  Antisense compound
agttagtctaaaaggtatgt

SEQ ID NO: 8410 - DNA, 20 bp, Artificial Sequence
  Antisense compound
aagttagtctaaaaggtatg

SEQ ID NO: 8411 - DNA, 20 bp, Artificial Sequence
  Antisense compound
caagttagtctaaaaggtat

SEQ ID NO: 8412 - DNA, 20 bp, Artificial Sequence
  Antisense compound
acaagttagtctaaaaggta

SEQ ID NO: 8413 - DNA, 20 bp, Artificial Sequence
  Antisense compound
cacaagttagtctaaaaggt

SEQ ID NO: 8414 - DNA, 20 bp, Artificial Sequence
  Antisense compound
gcacaagttagtctaaaagg

SEQ ID NO: 8415 - DNA, 20 bp, Artificial Sequence
  Antisense compound
agcacaagttagtctaaaag

SEQ ID NO: 8416 - DNA, 20 bp, Artificial Sequence
  Antisense compound
tagcacaagttagtctaaaa

SEQ ID NO: 8417 - DNA, 20 bp, Artificial Sequence
  Antisense compound
gtagcacaagttagtctaaa

SEQ ID NO: 8418 - DNA, 20 bp, Artificial Sequence
  Antisense compound
tgtagcacaagttagtctaa

SEQ ID NO: 8419 - DNA, 20 bp, Artificial Sequence
  Antisense compound
ttgtagcacaagttagtcta

SEQ ID NO: 8420 - DNA, 20 bp, Artificial Sequence
  Antisense compound
gttgtagcacaagttagtct

SEQ ID NO: 8421 - DNA, 20 bp, Artificial Sequence
  Antisense compound
agttgtagcacaagttagtc

SEQ ID NO: 8422 - DNA, 20 bp, Artificial Sequence
  Antisense compound
tagttgtagcacaagttagt

SEQ ID NO: 8423 - DNA, 20 bp, Artificial Sequence
  Antisense compound
ctagttgtagcacaagttag

SEQ ID NO: 8424 - DNA, 20 bp, Artificial Sequence
  Antisense compound
tctagttgtagcacaagtta

SEQ ID NO: 8425 - DNA, 20 bp, Artificial Sequence
  Antisense compound
gtctagttgtagcacaagtt

SEQ ID NO: 8426 - DNA, 20 bp, Artificial Sequence
  Antisense compound
tgtctagttgtagcacaagt

SEQ ID NO: 8427 - DNA, 20 bp, Artificial Sequence
  Antisense compound
ctgtctagttgtagcacaag

SEQ ID NO: 8428 - DNA, 20 bp, Artificial Sequence
  Antisense compound
cctgtctagttgtagcacaa

SEQ ID NO: 8429 - DNA, 20 bp, Artificial Sequence
  Antisense compound
acctgtctagttgtagcaca

SEQ ID NO: 8430 - DNA, 20 bp, Artificial Sequence
  Antisense compound
aacctgtctagttgtagcac

SEQ ID NO: 8431 - DNA, 20 bp, Artificial Sequence
  Antisense compound
caacctgtctagttgtagca

SEQ ID NO: 8432 - DNA, 20 bp, Artificial Sequence
  Antisense compound
acaacctgtctagttgtagc

SEQ ID NO: 8433 - DNA, 20 bp, Artificial Sequence
  Antisense compound
gacaacctgtctagttgtag

SEQ ID NO: 8434 - DNA, 20 bp, Artificial Sequence
  Antisense compound
tgacaacctgtctagttgta

SEQ ID NO: 8435 - DNA, 20 bp, Artificial Sequence
  Antisense compound
ttgacaacctgtctagttgt

SEQ ID NO: 8436 - DNA, 20 bp, Artificial Sequence
  Antisense compound
attgacaacctgtctagttg

SEQ ID NO: 8437 - DNA, 20 bp, Artificial Sequence
  Antisense compound
cattgacaacctgtctagtt

SEQ ID NO: 8438 - DNA, 20 bp, Artificial Sequence
  Antisense compound
acattgacaacctgtctagt

SEQ ID NO: 8439 - DNA, 20 bp, Artificial Sequence
  Antisense compound
gacattgacaacctgtctag

SEQ ID NO: 8440 - DNA, 20 bp, Artificial Sequence
  Antisense compound
tgacattgacaacctgtcta

SEQ ID NO: 8441 - DNA, 20 bp, Artificial Sequence
  Antisense compound
atgacattgacaacctgtct

SEQ ID NO: 8442 - DNA, 20 bp, Artificial Sequence
  Antisense compound
tatgacattgacaacctgtc

SEQ ID NO: 8443 - DNA, 20 bp, Artificial Sequence
  Antisense compound
ttatgacattgacaacctgt

SEQ ID NO: 8444 - DNA, 20 bp, Artificial Sequence
  Antisense compound
gttatgacattgacaacctg

SEQ ID NO: 8445 - DNA, 20 bp, Artificial Sequence
  Antisense compound
agttatgacattgacaacct

SEQ ID NO: 8446 - DNA, 20 bp, Artificial Sequence
  Antisense compound
tagttatgacattgacaacc

SEQ ID NO: 8447 - DNA, 20 bp, Artificial Sequence
  Antisense compound
gtagttatgacattgacaac

SEQ ID NO: 8448 - DNA, 20 bp, Artificial Sequence
  Antisense compound
agtagttatgacattgacaa

SEQ ID NO: 8449 - DNA, 20 bp, Artificial Sequence
  Antisense compound
tagtagttatgacattgaca

SEQ ID NO: 8450 - DNA, 20 bp, Artificial Sequence
  Antisense compound
ttagtagttatgacattgac

SEQ ID NO: 8451 - DNA, 20 bp, Artificial Sequence
  Antisense compound
tttagtagttatgacattga

SEQ ID NO: 8452 - DNA, 20 bp, Artificial Sequence
  Antisense compound
ttttagtagttatgacattg

SEQ ID NO: 8453 - DNA, 20 bp, Artificial Sequence
  Antisense compound
attttagtagttatgacatt

SEQ ID NO: 8454 - DNA, 20 bp, Artificial Sequence
  Antisense compound
gattttagtagttatgacat

SEQ ID NO: 8455 - DNA, 20 bp, Artificial Sequence
  Antisense compound
agattttagtagttatgaca

SEQ ID NO: 8456 - DNA, 20 bp, Artificial Sequence
  Antisense compound
gagattttagtagttatgac

SEQ ID NO: 8457 - DNA, 20 bp, Artificial Sequence
  Antisense compound
tgagattttagtagttatga

SEQ ID NO: 8458 - DNA, 20 bp, Artificial Sequence
  Antisense compound
gtgagattttagtagttatg

SEQ ID NO: 8459 - DNA, 20 bp, Artificial Sequence
  Antisense compound
agtgagattttagtagttat

SEQ ID NO: 8460 - DNA, 20 bp, Artificial Sequence
  Antisense compound
gagtgagattttagtagtta

SEQ ID NO: 8461 - DNA, 20 bp, Artificial Sequence
  Antisense compound
tgagtgagattttagtagtt

SEQ ID NO: 8462 - DNA, 20 bp, Artificial Sequence
  Antisense compound
ttgagtgagattttagtagt

SEQ ID NO: 8463 - DNA, 20 bp, Artificial Sequence
  Antisense compound
cttgagtgagattttagtag

SEQ ID NO: 8464 - DNA, 20 bp, Artificial Sequence
  Antisense compound
ccttgagtgagattttagta

SEQ ID NO: 8465 - DNA, 20 bp, Artificial Sequence
  Antisense compound
cccttgagtgagattttagt

SEQ ID NO: 8466 - DNA, 20 bp, Artificial Sequence
  Antisense compound
acccttgagtgagattttag

SEQ ID NO: 8467 - DNA, 20 bp, Artificial Sequence
  Antisense compound
cacccttgagtgagatttta

SEQ ID NO: 8468 - DNA, 20 bp, Artificial Sequence
  Antisense compound
ccacccttgagtgagatttt

SEQ ID NO: 8469 - DNA, 20 bp, Artificial Sequence
  Antisense compound
accacccttgagtgagattt

SEQ ID NO: 8470 - DNA, 20 bp, Artificial Sequence
  Antisense compound
taccacccttgagtgagatt

SEQ ID NO: 8471 - DNA, 20 bp, Artificial Sequence
  Antisense compound
ttaccacccttgagtgagat

SEQ ID NO: 8472 - DNA, 20 bp, Artificial Sequence
  Antisense compound
cttaccacccttgagtgaga

SEQ ID NO: 8473 - DNA, 20 bp, Artificial Sequence
  Antisense compound
tcttaccacccttgagtgag

SEQ ID NO: 8474 - DNA, 20 bp, Artificial Sequence
  Antisense compound
atcttaccacccttgagtga

SEQ ID NO: 8475 - DNA, 20 bp, Artificial Sequence
  Antisense compound
aatcttaccacccttgagtg

SEQ ID NO: 8476 - DNA, 20 bp, Artificial Sequence
  Antisense compound
caatcttaccacccttgagt

SEQ ID NO: 8477 - DNA, 20 bp, Artificial Sequence
  Antisense compound
acaatcttaccacccttgag

SEQ ID NO: 8478 - DNA, 20 bp, Artificial Sequence
  Antisense compound
aacaatcttaccacccttga

SEQ ID NO: 8479 - DNA, 20 bp, Artificial Sequence
  Antisense compound
taacaatcttaccacccttg

SEQ ID NO: 8480 - DNA, 20 bp, Artificial Sequence
  Antisense compound
ctaacaatcttaccaccctt

SEQ ID NO: 8481 - DNA, 20 bp, Artificial Sequence
  Antisense compound
actaacaatcttaccaccct

SEQ ID NO: 8482 - DNA, 20 bp, Artificial Sequence
  Antisense compound
tactaacaatcttaccaccc

SEQ ID NO: 8483 - DNA, 20 bp, Artificial Sequence
  Antisense compound
gtactaacaatcttaccacc

SEQ ID NO: 8484 - DNA, 20 bp, Artificial Sequence
  Antisense compound
agtactaacaatcttaccac

SEQ ID NO: 8485 - DNA, 20 bp, Artificial Sequence
  Antisense compound
aagtactaacaatcttacca

SEQ ID NO: 8486 - DNA, 20 bp, Artificial Sequence
  Antisense compound
caagtactaacaatcttacc

SEQ ID NO: 8487 - DNA, 20 bp, Artificial Sequence
  Antisense compound
acaagtactaacaatcttac

SEQ ID NO: 8488 - DNA, 20 bp, Artificial Sequence
  Antisense compound
aacaagtactaacaatctta

SEQ ID NO: 8489 - DNA, 20 bp, Artificial Sequence
  Antisense compound
aaacaagtactaacaatctt

SEQ ID NO: 8490 - DNA, 20 bp, Artificial Sequence
  Antisense compound
aaaacaagtactaacaatct

SEQ ID NO: 8491 - DNA, 20 bp, Artificial Sequence
  Antisense compound
taaaacaagtactaacaatc

SEQ ID NO: 8492 - DNA, 20 bp, Artificial Sequence
  Antisense compound
ttaaaacaagtactaacaat

SEQ ID NO: 8493 - DNA, 20 bp, Artificial Sequence
  Antisense compound
tttaaaacaagtactaacaa

SEQ ID NO: 8494 - DNA, 20 bp, Artificial Sequence
  Antisense compound
gtttaaaacaagtactaaca

SEQ ID NO: 8495 - DNA, 20 bp, Artificial Sequence
  Antisense compound
agtttaaaacaagtactaac

SEQ ID NO: 8496 - DNA, 20 bp, Artificial Sequence
  Antisense compound
aagtttaaaacaagtactaa

SEQ ID NO: 8497 - DNA, 20 bp, Artificial Sequence
  Antisense compound
taagtttaaaacaagtacta

SEQ ID NO: 8498 - DNA, 20 bp, Artificial Sequence
  Antisense compound
ataagtttaaaacaagtact

SEQ ID NO: 8499 - DNA, 20 bp, Artificial Sequence
  Antisense compound
cataagtttaaaacaagtac

SEQ ID NO: 8500 - DNA, 20 bp, Artificial Sequence
  Antisense compound
gcataagtttaaaacaagta

SEQ ID NO: 8501 - DNA, 20 bp, Artificial Sequence
  Antisense compound
agcataagtttaaaacaagt

SEQ ID NO: 8502 - DNA, 20 bp, Artificial Sequence
  Antisense compound
aagcataagtttaaaacaag

SEQ ID NO: 8503 - DNA, 20 bp, Artificial Sequence
  Antisense compound
taagcataagtttaaaacaa

SEQ ID NO: 8504 - DNA, 20 bp, Artificial Sequence
  Antisense compound
ttaagcataagtttaaaaca

SEQ ID NO: 8505 - DNA, 20 bp, Artificial Sequence
  Antisense compound
cttaagcataagtttaaaac

SEQ ID NO: 8506 - DNA, 20 bp, Artificial Sequence
  Antisense compound
ccttaagcataagtttaaaa

SEQ ID NO: 8507 - DNA, 20 bp, Artificial Sequence
  Antisense compound
gccttaagcataagtttaaa

SEQ ID NO: 8508 - DNA, 20 bp, Artificial Sequence
  Antisense compound
ggccttaagcataagtttaa

SEQ ID NO: 8509 - DNA, 20 bp, Artificial Sequence
  Antisense compound
tggccttaagcataagttta

SEQ ID NO: 8510 - DNA, 20 bp, Artificial Sequence
  Antisense compound
gtggccttaagcataagttt

SEQ ID NO: 8511 - DNA, 20 bp, Artificial Sequence
  Antisense compound
tgtggccttaagcataagtt

SEQ ID NO: 8512 - DNA, 20 bp, Artificial Sequence
  Antisense compound
atgtggccttaagcataagt

SEQ ID NO: 8513 - DNA, 20 bp, Artificial Sequence
  Antisense compound
aatgtggccttaagcataag

SEQ ID NO: 8514 - DNA, 20 bp, Artificial Sequence
  Antisense compound
taatgtggccttaagcataa

SEQ ID NO: 8515 - DNA, 20 bp, Artificial Sequence
  Antisense compound
ataatgtggccttaagcata

SEQ ID NO: 8516 - DNA, 20 bp, Artificial Sequence
  Antisense compound
aataatgtggccttaagcat

SEQ ID NO: 8517 - DNA, 20 bp, Artificial Sequence
  Antisense compound
caataatgtggccttaagca

SEQ ID NO: 8518 - DNA, 20 bp, Artificial Sequence
  Antisense compound
acaataatgtggccttaagc

SEQ ID NO: 8519 - DNA, 20 bp, Artificial Sequence
  Antisense compound
cacaataatgtggccttaag

SEQ ID NO: 8520 - DNA, 20 bp, Artificial Sequence
  Antisense compound
gcacaataatgtggccttaa

SEQ ID NO: 8521 - DNA, 20 bp, Artificial Sequence
  Antisense compound
cgcacaataatgtggcctta

SEQ ID NO: 8522 - DNA, 20 bp, Artificial Sequence
  Antisense compound
acgcacaataatgtggcctt

SEQ ID NO: 8523 - DNA, 20 bp, Artificial Sequence
  Antisense compound
aacgcacaataatgtggcct

SEQ ID NO: 8524 - DNA, 20 bp, Artificial Sequence
  Antisense compound
gaacgcacaataatgtggcc

SEQ ID NO: 8525 - DNA, 20 bp, Artificial Sequence
  Antisense compound
agaacgcacaataatgtggc

SEQ ID NO: 8526 - DNA, 20 bp, Artificial Sequence
  Antisense compound
aagaacgcacaataatgtgg

SEQ ID NO: 8527 - DNA, 20 bp, Artificial Sequence
  Antisense compound
caagaacgcacaataatgtg

SEQ ID NO: 8528 - DNA, 20 bp, Artificial Sequence
  Antisense compound
gcaagaacgcacaataatgt

SEQ ID NO: 8529 - DNA, 20 bp, Artificial Sequence
  Antisense compound
agcaagaacgcacaataatg

SEQ ID NO: 8530 - DNA, 20 bp, Artificial Sequence
  Antisense compound
cagcaagaacgcacaataat

SEQ ID NO: 8531 - DNA, 20 bp, Artificial Sequence
  Antisense compound
gcagcaagaacgcacaataa

SEQ ID NO: 8532 - DNA, 20 bp, Artificial Sequence
  Antisense compound
tgcagcaagaacgcacaata

SEQ ID NO: 8533 - DNA, 20 bp, Artificial Sequence
  Antisense compound
atgcagcaagaacgcacaat

SEQ ID NO: 8534 - DNA, 20 bp, Artificial Sequence
  Antisense compound
aatgcagcaagaacgcacaa

SEQ ID NO: 8535 - DNA, 20 bp, Artificial Sequence
  Antisense compound
caatgcagcaagaacgcaca

SEQ ID NO: 8536 - DNA, 20 bp, Artificial Sequence
  Antisense compound
ccaatgcagcaagaacgcac

SEQ ID NO: 8537 - DNA, 20 bp, Artificial Sequence
  Antisense compound
accaatgcagcaagaacgca

SEQ ID NO: 8538 - DNA, 20 bp, Artificial Sequence
  Antisense compound
aaccaatgcagcaagaacgc

SEQ ID NO: 8539 - DNA, 20 bp, Artificial Sequence
  Antisense compound
aaaccaatgcagcaagaacg

SEQ ID NO: 8540 - DNA, 20 bp, Artificial Sequence
  Antisense compound
caaaccaatgcagcaagaac

SEQ ID NO: 8541 - DNA, 20 bp, Artificial Sequence
  Antisense compound
acaaaccaatgcagcaagaa

SEQ ID NO: 8542 - DNA, 20 bp, Artificial Sequence
  Antisense compound
aacaaaccaatgcagcaaga

SEQ ID NO: 8543 - DNA, 20 bp, Artificial Sequence
  Antisense compound
taacaaaccaatgcagcaag

SEQ ID NO: 8544 - DNA, 20 bp, Artificial Sequence
  Antisense compound
ataacaaaccaatgcagcaa

SEQ ID NO: 8545 - DNA, 20 bp, Artificial Sequence
  Antisense compound
tataacaaaccaatgcagca

SEQ ID NO: 8546 - DNA, 20 bp, Artificial Sequence
  Antisense compound
atataacaaaccaatgcagc

SEQ ID NO: 8547 - DNA, 20 bp, Artificial Sequence
  Antisense compound
gatataacaaaccaatgcag

SEQ ID NO: 8548 - DNA, 20 bp, Artificial Sequence
  Antisense compound
cgatataacaaaccaatgca

SEQ ID NO: 8549 - DNA, 20 bp, Artificial Sequence
  Antisense compound
acgatataacaaaccaatgc

SEQ ID NO: 8550 - DNA, 20 bp, Artificial Sequence
  Antisense compound
aacgatataacaaaccaatg

SEQ ID NO: 8551 - DNA, 20 bp, Artificial Sequence
  Antisense compound
taacgatataacaaaccaat

SEQ ID NO: 8552 - DNA, 20 bp, Artificial Sequence
  Antisense compound
ataacgatataacaaaccaa

SEQ ID NO: 8553 - DNA, 20 bp, Artificial Sequence
  Antisense compound
cataacgatataacaaacca

SEQ ID NO: 8554 - DNA, 20 bp, Artificial Sequence
  Antisense compound
gcataacgatataacaaacc

SEQ ID NO: 8555 - DNA, 20 bp, Artificial Sequence
  Antisense compound
ggcataacgatataacaaac

SEQ ID NO: 8556 - DNA, 20 bp, Artificial Sequence
  Antisense compound
tggcataacgatataacaaa

SEQ ID NO: 8557 - DNA, 20 bp, Artificial Sequence
  Antisense compound
ctggcataacgatataacaa

SEQ ID NO: 8558 - DNA, 20 bp, Artificial Sequence
  Antisense compound
actggcataacgatataaca

SEQ ID NO: 8559 - DNA, 20 bp, Artificial Sequence
  Antisense compound
tactggcataacgatataac

SEQ ID NO: 8560 - DNA, 20 bp, Artificial Sequence
  Antisense compound
gtactggcataacgatataa

SEQ ID NO: 8561 - DNA, 20 bp, Artificial Sequence
  Antisense compound
tgtactggcataacgatata

SEQ ID NO: 8562 - DNA, 20 bp, Artificial Sequence
  Antisense compound
atgtactggcataacgatat

SEQ ID NO: 8563 - DNA, 20 bp, Artificial Sequence
  Antisense compound
tatgtactggcataacgata

SEQ ID NO: 8564 - DNA, 20 bp, Artificial Sequence
  Antisense compound
gtatgtactggcataacgat

SEQ ID NO: 8565 - DNA, 20 bp, Artificial Sequence
  Antisense compound
tgtatgtactggcataacga

SEQ ID NO: 8566 - DNA, 20 bp, Artificial Sequence
  Antisense compound
atgtatgtactggcataacg

SEQ ID NO: 8567 - DNA, 20 bp, Artificial Sequence
  Antisense compound
aatgtatgtactggcataac

SEQ ID NO: 8568 - DNA, 20 bp, Artificial Sequence
  Antisense compound
caatgtatgtactggcataa

SEQ ID NO: 8569 - DNA, 20 bp, Artificial Sequence
  Antisense compound
acaatgtatgtactggcata

SEQ ID NO: 8570 - DNA, 20 bp, Artificial Sequence
  Antisense compound
gacaatgtatgtactggcat

SEQ ID NO: 8571 - DNA, 20 bp, Artificial Sequence
  Antisense compound
tgacaatgtatgtactggca

SEQ ID NO: 8572 - DNA, 20 bp, Artificial Sequence
  Antisense compound
ttgacaatgtatgtactggc

SEQ ID NO: 8573 - DNA, 20 bp, Artificial Sequence
  Antisense compound
attgacaatgtatgtactgg

SEQ ID NO: 8574 - DNA, 20 bp, Artificial Sequence
  Antisense compound
gattgacaatgtatgtactg

SEQ ID NO: 8575 - DNA, 20 bp, Artificial Sequence
  Antisense compound
ggattgacaatgtatgtact

SEQ ID NO: 8576 - DNA, 20 bp, Artificial Sequence
  Antisense compound
tggattgacaatgtatgtac

SEQ ID NO: 8577 - DNA, 20 bp, Artificial Sequence
  Antisense compound
atggattgacaatgtatgta

SEQ ID NO: 8578 - DNA, 20 bp, Artificial Sequence
  Antisense compound
catggattgacaatgtatgt

SEQ ID NO: 8579 - DNA, 20 bp, Artificial Sequence
  Antisense compound
tcatggattgacaatgtatg

SEQ ID NO: 8580 - DNA, 20 bp, Artificial Sequence
  Antisense compound
atcatggattgacaatgtat

SEQ ID NO: 8581 - DNA, 20 bp, Artificial Sequence
  Antisense compound
catcatggattgacaatgta

SEQ ID NO: 8582 - DNA, 20 bp, Artificial Sequence
  Antisense compound
ccatcatggattgacaatgt

SEQ ID NO: 8583 - DNA, 20 bp, Artificial Sequence
  Antisense compound
accatcatggattgacaatg

SEQ ID NO: 8584 - DNA, 20 bp, Artificial Sequence
  Antisense compound
aaccatcatggattgacaat

SEQ ID NO: 8585 - DNA, 20 bp, Artificial Sequence
  Antisense compound
taaccatcatggattgacaa

SEQ ID NO: 8586 - DNA, 20 bp, Artificial Sequence
  Antisense compound
gtaaccatcatggattgaca

SEQ ID NO: 8587 - DNA, 20 bp, Artificial Sequence
  Antisense compound
tgtaaccatcatggattgac

SEQ ID NO: 8588 - DNA, 20 bp, Artificial Sequence
  Antisense compound
gtgtaaccatcatggattga

SEQ ID NO: 8589 - DNA, 20 bp, Artificial Sequence
  Antisense compound
tgtgtaaccatcatggattg

SEQ ID NO: 8590 - DNA, 20 bp, Artificial Sequence
  Antisense compound
ttgtgtaaccatcatggatt

SEQ ID NO: 8591 - DNA, 20 bp, Artificial Sequence
  Antisense compound
tttgtgtaaccatcatggat

SEQ ID NO: 8592 - DNA, 20 bp, Artificial Sequence
  Antisense compound
atttgtgtaaccatcatgga

SEQ ID NO: 8593 - DNA, 20 bp, Artificial Sequence
  Antisense compound
catttgtgtaaccatcatgg

SEQ ID NO: 8594 - DNA, 20 bp, Artificial Sequence
  Antisense compound
tcatttgtgtaaccatcatg

SEQ ID NO: 8595 - DNA, 20 bp, Artificial Sequence
  Antisense compound
ttcatttgtgtaaccatcat

SEQ ID NO: 8596 - DNA, 20 bp, Artificial Sequence
  Antisense compound
tttcatttgtgtaaccatca

SEQ ID NO: 8597 - DNA, 20 bp, Artificial Sequence
  Antisense compound
atttcatttgtgtaaccatc

SEQ ID NO: 8598 - DNA, 20 bp, Artificial Sequence
  Antisense compound
gatttcatttgtgtaaccat

SEQ ID NO: 8599 - DNA, 20 bp, Artificial Sequence
  Antisense compound
tgatttcatttgtgtaacca

SEQ ID NO: 8600 - DNA, 20 bp, Artificial Sequence
  Antisense compound
atgatttcatttgtgtaacc

SEQ ID NO: 8601 - DNA, 20 bp, Artificial Sequence
  Antisense compound
aatgatttcatttgtgtaac

SEQ ID NO: 8602 - DNA, 20 bp, Artificial Sequence
  Antisense compound
caatgatttcatttgtgtaa

SEQ ID NO: 8603 - DNA, 20 bp, Artificial Sequence
  Antisense compound
ccaatgatttcatttgtgta

SEQ ID NO: 8604 - DNA, 20 bp, Artificial Sequence
  Antisense compound
accaatgatttcatttgtgt

SEQ ID NO: 8605 - DNA, 20 bp, Artificial Sequence
  Antisense compound
aaccaatgatttcatttgtg

SEQ ID NO: 8606 - DNA, 20 bp, Artificial Sequence
  Antisense compound
taaccaatgatttcatttgt

SEQ ID NO: 8607 - DNA, 20 bp, Artificial Sequence
  Antisense compound
gtaaccaatgatttcatttg

SEQ ID NO: 8608 - DNA, 20 bp, Artificial Sequence
  Antisense compound
tgtaaccaatgatttcattt

SEQ ID NO: 8609 - DNA, 20 bp, Artificial Sequence
  Antisense compound
ttgtaaccaatgatttcatt

SEQ ID NO: 8610 - DNA, 20 bp, Artificial Sequence
  Antisense compound
tttgtaaccaatgatttcat

SEQ ID NO: 8611 - DNA, 20 bp, Artificial Sequence
  Antisense compound
ctttgtaaccaatgatttca

SEQ ID NO: 8612 - DNA, 20 bp, Artificial Sequence
  Antisense compound
gctttgtaaccaatgatttc

SEQ ID NO: 8613 - DNA, 20 bp, Artificial Sequence
  Antisense compound
ggctttgtaaccaatgattt

SEQ ID NO: 8614 - DNA, 20 bp, Artificial Sequence
  Antisense compound
tggctttgtaaccaatgatt

SEQ ID NO: 8615 - DNA, 20 bp, Artificial Sequence
  Antisense compound
atggctttgtaaccaatgat

SEQ ID NO: 8616 - DNA, 20 bp, Artificial Sequence
  Antisense compound
aatggctttgtaaccaatga

SEQ ID NO: 8617 - DNA, 20 bp, Artificial Sequence
  Antisense compound
gaatggctttgtaaccaatg

SEQ ID NO: 8618 - DNA, 20 bp, Artificial Sequence
  Antisense compound
tgaatggctttgtaaccaat

SEQ ID NO: 8619 - DNA, 20 bp, Artificial Sequence
  Antisense compound
ctgaatggctttgtaaccaa

SEQ ID NO: 8620 - DNA, 20 bp, Artificial Sequence
  Antisense compound
cctgaatggctttgtaacca

SEQ ID NO: 8621 - DNA, 20 bp, Artificial Sequence
  Antisense compound
tcctgaatggctttgtaacc

SEQ ID NO: 8622 - DNA, 20 bp, Artificial Sequence
  Antisense compound
atcctgaatggctttgtaac

SEQ ID NO: 8623 - DNA, 20 bp, Artificial Sequence
  Antisense compound
catcctgaatggctttgtaa

SEQ ID NO: 8624 - DNA, 20 bp, Artificial Sequence
  Antisense compound
ccatcctgaatggctttgta

SEQ ID NO: 8625 - DNA, 20 bp, Artificial Sequence
  Antisense compound
accatcctgaatggctttgt

SEQ ID NO: 8626 - DNA, 20 bp, Artificial Sequence
  Antisense compound
caccatcctgaatggctttg

SEQ ID NO: 8627 - DNA, 20 bp, Artificial Sequence
  Antisense compound
acaccatcctgaatggcttt

SEQ ID NO: 8628 - DNA, 20 bp, Artificial Sequence
  Antisense compound
gacaccatcctgaatggctt

SEQ ID NO: 8629 - DNA, 20 bp, Artificial Sequence
  Antisense compound
tgacaccatcctgaatggct

SEQ ID NO: 8630 - DNA, 20 bp, Artificial Sequence
  Antisense compound
gtgacaccatcctgaatggc

SEQ ID NO: 8631 - DNA, 20 bp, Artificial Sequence
  Antisense compound
agtgacaccatcctgaatgg

SEQ ID NO: 8632 - DNA, 20 bp, Artificial Sequence
  Antisense compound
gagtgacaccatcctgaatg

SEQ ID NO: 8633 - DNA, 20 bp, Artificial Sequence
  Antisense compound
cgagtgacaccatcctgaat

SEQ ID NO: 8634 - DNA, 20 bp, Artificial Sequence
  Antisense compound
acgagtgacaccatcctgaa

SEQ ID NO: 8635 - DNA, 20 bp, Artificial Sequence
  Antisense compound
cacgagtgacaccatcctga

SEQ ID NO: 8636 - DNA, 20 bp, Artificial Sequence
  Antisense compound
tcacgagtgacaccatcctg

SEQ ID NO: 8637 - DNA, 20 bp, Artificial Sequence
  Antisense compound
gtcacgagtgacaccatcct

SEQ ID NO: 8638 - DNA, 20 bp, Artificial Sequence
  Antisense compound
tgtcacgagtgacaccatcc

SEQ ID NO: 8639 - DNA, 20 bp, Artificial Sequence
  Antisense compound
atgtcacgagtgacaccatc

SEQ ID NO: 8640 - DNA, 20 bp, Artificial Sequence
  Antisense compound
gatgtcacgagtgacaccat

SEQ ID NO: 8641 - DNA, 20 bp, Artificial Sequence
  Antisense compound
tgatgtcacgagtgacacca

SEQ ID NO: 8642 - DNA, 20 bp, Artificial Sequence
  Antisense compound
atgatgtcacgagtgacacc

SEQ ID NO: 8643 - DNA, 20 bp, Artificial Sequence
  Antisense compound
aatgatgtcacgagtgacac

SEQ ID NO: 8644 - DNA, 20 bp, Artificial Sequence
  Antisense compound
aaatgatgtcacgagtgaca

SEQ ID NO: 8645 - DNA, 20 bp, Artificial Sequence
  Antisense compound
gaaatgatgtcacgagtgac

SEQ ID NO: 8646 - DNA, 20 bp, Artificial Sequence
  Antisense compound
agaaatgatgtcacgagtga

SEQ ID NO: 8647 - DNA, 20 bp, Artificial Sequence
  Antisense compound
tagaaatgatgtcacgagtg

SEQ ID NO: 8648 - DNA, 20 bp, Artificial Sequence
  Antisense compound
gtagaaatgatgtcacgagt

SEQ ID NO: 8649 - DNA, 20 bp, Artificial Sequence
  Antisense compound
agtagaaatgatgtcacgag

SEQ ID NO: 8650 - DNA, 20 bp, Artificial Sequence
  Antisense compound
cagtagaaatgatgtcacga

SEQ ID NO: 8651 - DNA, 20 bp, Artificial Sequence
  Antisense compound
tcagtagaaatgatgtcacg

SEQ ID NO: 8652 - DNA, 20 bp, Artificial Sequence
  Antisense compound
atcagtagaaatgatgtcac

SEQ ID NO: 8653 - DNA, 20 bp, Artificial Sequence
  Antisense compound
catcagtagaaatgatgtca

SEQ ID NO: 8654 - DNA, 20 bp, Artificial Sequence
  Antisense compound
tcatcagtagaaatgatgtc

SEQ ID NO: 8655 - DNA, 20 bp, Artificial Sequence
  Antisense compound
atcatcagtagaaatgatgt

SEQ ID NO: 8656 - DNA, 20 bp, Artificial Sequence
  Antisense compound
aatcatcagtagaaatgatg

SEQ ID NO: 8657 - DNA, 20 bp, Artificial Sequence
  Antisense compound
caatcatcagtagaaatgat

SEQ ID NO: 8658 - DNA, 20 bp, Artificial Sequence
  Antisense compound
acaatcatcagtagaaatga

SEQ ID NO: 8659 - DNA, 20 bp, Artificial Sequence
  Antisense compound
aacaatcatcagtagaaatg

SEQ ID NO: 8660 - DNA, 20 bp, Artificial Sequence
  Antisense compound
aaacaatcatcagtagaaat

SEQ ID NO: 8661 - DNA, 20 bp, Artificial Sequence
  Antisense compound
aaaacaatcatcagtagaaa

SEQ ID NO: 8662 - DNA, 20 bp, Artificial Sequence
  Antisense compound
caaaacaatcatcagtagaa

SEQ ID NO: 8663 - DNA, 20 bp, Artificial Sequence
  Antisense compound
gcaaaacaatcatcagtaga

SEQ ID NO: 8664 - DNA, 20 bp, Artificial Sequence
  Antisense compound
tgcaaaacaatcatcagtag

SEQ ID NO: 8665 - DNA, 20 bp, Artificial Sequence
  Antisense compound
ttgcaaaacaatcatcagta

SEQ ID NO: 8666 - DNA, 20 bp, Artificial Sequence
  Antisense compound
tttgcaaaacaatcatcagt

SEQ ID NO: 8667 - DNA, 20 bp, Artificial Sequence
  Antisense compound
atttgcaaaacaatcatcag

SEQ ID NO: 8668 - DNA, 20 bp, Artificial Sequence
  Antisense compound
tatttgcaaaacaatcatca

SEQ ID NO: 8669 - DNA, 20 bp, Artificial Sequence
  Antisense compound
ttatttgcaaaacaatcatc

SEQ ID NO: 8670 - DNA, 20 bp, Artificial Sequence
  Antisense compound
tttatttgcaaaacaatcat

SEQ ID NO: 8671 - DNA, 20 bp, Artificial Sequence
  Antisense compound
gtttatttgcaaaacaatca

SEQ ID NO: 8672 - DNA, 20 bp, Artificial Sequence
  Antisense compound
tgtttatttgcaaaacaatc

SEQ ID NO: 8673 - DNA, 20 bp, Artificial Sequence
  Antisense compound
atgtttatttgcaaaacaat

SEQ ID NO: 8674 - DNA, 20 bp, Artificial Sequence
  Antisense compound
catgtttatttgcaaaacaa

SEQ ID NO: 8675 - DNA, 20 bp, Artificial Sequence
  Antisense compound
gcatgtttatttgcaaaaca

SEQ ID NO: 8676 - DNA, 20 bp, Artificial Sequence
  Antisense compound
agcatgtttatttgcaaaac

SEQ ID NO: 8677 - DNA, 20 bp, Artificial Sequence
  Antisense compound
cagcatgtttatttgcaaaa

SEQ ID NO: 8678 - DNA, 20 bp, Artificial Sequence
  Antisense compound
ccagcatgtttatttgcaaa

SEQ ID NO: 8679 - DNA, 20 bp, Artificial Sequence
  Antisense compound
accagcatgtttatttgcaa

SEQ ID NO: 8680 - DNA, 20 bp, Artificial Sequence
  Antisense compound
aaccagcatgtttatttgca

SEQ ID NO: 8681 - DNA, 20 bp, Artificial Sequence
  Antisense compound
aaaccagcatgtttatttgc

SEQ ID NO: 8682 - DNA, 20 bp, Artificial Sequence
  Antisense compound
aaaaccagcatgtttatttg

SEQ ID NO: 8683 - DNA, 20 bp, Artificial Sequence
  Antisense compound
caaaaccagcatgtttattt

SEQ ID NO: 8684 - DNA, 20 bp, Artificial Sequence
  Antisense compound
tcaaaaccagcatgtttatt

SEQ ID NO: 8685 - DNA, 20 bp, Artificial Sequence
  Antisense compound
gtcaaaaccagcatgtttat

SEQ ID NO: 8686 - DNA, 20 bp, Artificial Sequence
  Antisense compound
cgtcaaaaccagcatgttta

SEQ ID NO: 8687 - DNA, 20 bp, Artificial Sequence
  Antisense compound
gcgtcaaaaccagcatgttt

SEQ ID NO: 8688 - DNA, 20 bp, Artificial Sequence
  Antisense compound
tgcgtcaaaaccagcatgtt

SEQ ID NO: 8689 - DNA, 20 bp, Artificial Sequence
  Antisense compound
atgcgtcaaaaccagcatgt

SEQ ID NO: 8690 - DNA, 20 bp, Artificial Sequence
  Antisense compound
catgcgtcaaaaccagcatg

SEQ ID NO: 8691 - DNA, 20 bp, Artificial Sequence
  Antisense compound
ccatgcgtcaaaaccagcat

SEQ ID NO: 8692 - DNA, 20 bp, Artificial Sequence
  Antisense compound
accatgcgtcaaaaccagca

SEQ ID NO: 8693 - DNA, 20 bp, Artificial Sequence
  Antisense compound
aaccatgcgtcaaaaccagc

SEQ ID NO: 8694 - DNA, 20 bp, Artificial Sequence
  Antisense compound
aaaccatgcgtcaaaaccag

SEQ ID NO: 8695 - DNA, 20 bp, Artificial Sequence
  Antisense compound
taaaccatgcgtcaaaacca

SEQ ID NO: 8696 - DNA, 20 bp, Artificial Sequence
  Antisense compound
ctaaaccatgcgtcaaaacc

SEQ ID NO: 8697 - DNA, 20 bp, Artificial Sequence
  Antisense compound
gctaaaccatgcgtcaaaac

SEQ ID NO: 8698 - DNA, 20 bp, Artificial Sequence
  Antisense compound
ggctaaaccatgcgtcaaaa

SEQ ID NO: 8699 - DNA, 20 bp, Artificial Sequence
  Antisense compound
tggctaaaccatgcgtcaaa

SEQ ID NO: 8700 - DNA, 20 bp, Artificial Sequence
  Antisense compound
ctggctaaaccatgcgtcaa

SEQ ID NO: 8701 - DNA, 20 bp, Artificial Sequence
  Antisense compound
gctggctaaaccatgcgtca

SEQ ID NO: 8702 - DNA, 20 bp, Artificial Sequence
  Antisense compound
cgctggctaaaccatgcgtc

SEQ ID NO: 8703 - DNA, 20 bp, Artificial Sequence
  Antisense compound
acgctggctaaaccatgcgt

SEQ ID NO: 8704 - DNA, 20 bp, Artificial Sequence
  Antisense compound
cacgctggctaaaccatgcg

SEQ ID NO: 8705 - DNA, 20 bp, Artificial Sequence
  Antisense compound
ccacgctggctaaaccatgc

SEQ ID NO: 8706 - DNA, 20 bp, Artificial Sequence
  Antisense compound
accacgctggctaaaccatg

SEQ ID NO: 8707 - DNA, 20 bp, Artificial Sequence
  Antisense compound
caccacgctggctaaaccat

SEQ ID NO: 8708 - DNA, 20 bp, Artificial Sequence
  Antisense compound
ccaccacgctggctaaacca

SEQ ID NO: 8709 - DNA, 20 bp, Artificial Sequence
  Antisense compound
accaccacgctggctaaacc

SEQ ID NO: 8710 - DNA, 20 bp, Artificial Sequence
  Antisense compound
aaccaccacgctggctaaac

SEQ ID NO: 8711 - DNA, 20 bp, Artificial Sequence
  Antisense compound
gaaccaccacgctggctaaa

SEQ ID NO: 8712 - DNA, 20 bp, Artificial Sequence
  Antisense compound
tgaaccaccacgctggctaa

SEQ ID NO: 8713 - DNA, 20 bp, Artificial Sequence
  Antisense compound
atgaaccaccacgctggcta

SEQ ID NO: 8714 - DNA, 20 bp, Artificial Sequence
  Antisense compound
tatgaaccaccacgctggct

SEQ ID NO: 8715 - DNA, 20 bp, Artificial Sequence
  Antisense compound
gtatgaaccaccacgctggc

SEQ ID NO: 8716 - DNA, 20 bp, Artificial Sequence
  Antisense compound
tgtatgaaccaccacgctgg

SEQ ID NO: 8717 - DNA, 20 bp, Artificial Sequence
  Antisense compound
ttgtatgaaccaccacgctg

SEQ ID NO: 8718 - DNA, 20 bp, Artificial Sequence
  Antisense compound
tttgtatgaaccaccacgct

SEQ ID NO: 8719 - DNA, 20 bp, Artificial Sequence
  Antisense compound
ttttgtatgaaccaccacgc

SEQ ID NO: 8720 - DNA, 20 bp, Artificial Sequence
  Antisense compound
tttttgtatgaaccaccacg

SEQ ID NO: 8721 - DNA, 20 bp, Artificial Sequence
  Antisense compound
atttttgtatgaaccaccac

SEQ ID NO: 8722 - DNA, 20 bp, Artificial Sequence
  Antisense compound
catttttgtatgaaccacca

SEQ ID NO: 8723 - DNA, 20 bp, Artificial Sequence
  Antisense compound
tcatttttgtatgaaccacc

SEQ ID NO: 8724 - DNA, 20 bp, Artificial Sequence
  Antisense compound
gtcatttttgtatgaaccac

SEQ ID NO: 8725 - DNA, 20 bp, Artificial Sequence
  Antisense compound
tgtcatttttgtatgaacca

SEQ ID NO: 8726 - DNA, 20 bp, Artificial Sequence
  Antisense compound
ttgtcatttttgtatgaacc

SEQ ID NO: 8727 - DNA, 20 bp, Artificial Sequence
  Antisense compound
tttgtcatttttgtatgaac

SEQ ID NO: 8728 - DNA, 20 bp, Artificial Sequence
  Antisense compound
ttttgtcatttttgtatgaa

SEQ ID NO: 8729 - DNA, 20 bp, Artificial Sequence
  Antisense compound
cttttgtcatttttgtatga

SEQ ID NO: 8730 - DNA, 20 bp, Artificial Sequence
  Antisense compound
gcttttgtcatttttgtatg

SEQ ID NO: 8731 - DNA, 20 bp, Artificial Sequence
  Antisense compound
agcttttgtcatttttgtat

SEQ ID NO: 8732 - DNA, 20 bp, Artificial Sequence
  Antisense compound
cagcttttgtcatttttgta

SEQ ID NO: 8733 - DNA, 20 bp, Artificial Sequence
  Antisense compound
gcagcttttgtcatttttgt

SEQ ID NO: 8734 - DNA, 20 bp, Artificial Sequence
  Antisense compound
ggcagcttttgtcatttttg

SEQ ID NO: 8735 - DNA, 20 bp, Artificial Sequence
  Antisense compound
gggcagcttttgtcattttt

SEQ ID NO: 8736 - DNA, 20 bp, Artificial Sequence
  Antisense compound
agggcagcttttgtcatttt

SEQ ID NO: 8737 - DNA, 20 bp, Artificial Sequence
  Antisense compound
cagggcagcttttgtcattt

SEQ ID NO: 8738 - DNA, 20 bp, Artificial Sequence
  Antisense compound
acagggcagcttttgtcatt

SEQ ID NO: 8739 - DNA, 20 bp, Artificial Sequence
  Antisense compound
tacagggcagcttttgtcat

SEQ ID NO: 8740 - DNA, 20 bp, Artificial Sequence
  Antisense compound
ctacagggcagcttttgtca

SEQ ID NO: 8741 - DNA, 20 bp, Artificial Sequence
  Antisense compound
actacagggcagcttttgtc

SEQ ID NO: 8742 - DNA, 20 bp, Artificial Sequence
  Antisense compound
tactacagggcagcttttgt

SEQ ID NO: 8743 - DNA, 20 bp, Artificial Sequence
  Antisense compound
ctactacagggcagcttttg

SEQ ID NO: 8744 - DNA, 20 bp, Artificial Sequence
  Antisense compound
gctactacagggcagctttt

SEQ ID NO: 8745 - DNA, 20 bp, Artificial Sequence
  Antisense compound
agctactacagggcagcttt

SEQ ID NO: 8746 - DNA, 20 bp, Artificial Sequence
  Antisense compound
cagctactacagggcagctt

SEQ ID NO: 8747 - DNA, 20 bp, Artificial Sequence
  Antisense compound
gcagctactacagggcagct

SEQ ID NO: 8748 - DNA, 20 bp, Artificial Sequence
  Antisense compound
agcagctactacagggcagc

SEQ ID NO: 8749 - DNA, 20 bp, Artificial Sequence
  Antisense compound
tagcagctactacagggcag

SEQ ID NO: 8750 - DNA, 20 bp, Artificial Sequence
  Antisense compound
atagcagctactacagggca

SEQ ID NO: 8751 - DNA, 20 bp, Artificial Sequence
  Antisense compound
gatagcagctactacagggc

SEQ ID NO: 8752 - DNA, 20 bp, Artificial Sequence
  Antisense compound
tgatagcagctactacaggg

SEQ ID NO: 8753 - DNA, 20 bp, Artificial Sequence
  Antisense compound
atgatagcagctactacagg

SEQ ID NO: 8754 - DNA, 20 bp, Artificial Sequence
  Antisense compound
aatgatagcagctactacag

SEQ ID NO: 8755 - DNA, 20 bp, Artificial Sequence
  Antisense compound
taatgatagcagctactaca

SEQ ID NO: 8756 - DNA, 20 bp, Artificial Sequence
  Antisense compound
gtaatgatagcagctactac

SEQ ID NO: 8757 - DNA, 20 bp, Artificial Sequence
  Antisense compound
tgtaatgatagcagctacta

SEQ ID NO: 8758 - DNA, 20 bp, Artificial Sequence
  Antisense compound
ttgtaatgatagcagctact

SEQ ID NO: 8759 - DNA, 20 bp, Artificial Sequence
  Antisense compound
cttgtaatgatagcagctac

SEQ ID NO: 8760 - DNA, 20 bp, Artificial Sequence
  Antisense compound
tcttgtaatgatagcagcta

SEQ ID NO: 8761 - DNA, 20 bp, Artificial Sequence
  Antisense compound
ctcttgtaatgatagcagct

SEQ ID NO: 8762 - DNA, 20 bp, Artificial Sequence
  Antisense compound
tctcttgtaatgatagcagc

SEQ ID NO: 8763 - DNA, 20 bp, Artificial Sequence
  Antisense compound
ctctcttgtaatgatagcag

SEQ ID NO: 8764 - DNA, 20 bp, Artificial Sequence
  Antisense compound
tctctcttgtaatgatagca

SEQ ID NO: 8765 - DNA, 20 bp, Artificial Sequence
  Antisense compound
atctctcttgtaatgatagc

SEQ ID NO: 8766 - DNA, 20 bp, Artificial Sequence
  Antisense compound
aatctctcttgtaatgatag

SEQ ID NO: 8767 - DNA, 20 bp, Artificial Sequence
  Antisense compound
caatctctcttgtaatgata

SEQ ID NO: 8768 - DNA, 20 bp, Artificial Sequence
  Antisense compound
ccaatctctcttgtaatgat

SEQ ID NO: 8769 - DNA, 20 bp, Artificial Sequence
  Antisense compound
accaatctctcttgtaatga

SEQ ID NO: 8770 - DNA, 20 bp, Artificial Sequence
  Antisense compound
aaccaatctctcttgtaatg

SEQ ID NO: 8771 - DNA, 20 bp, Artificial Sequence
  Antisense compound
aaaccaatctctcttgtaat

SEQ ID NO: 8772 - DNA, 20 bp, Artificial Sequence
  Antisense compound
gaaaccaatctctcttgtaa

SEQ ID NO: 8773 - DNA, 20 bp, Artificial Sequence
  Antisense compound
tgaaaccaatctctcttgta

SEQ ID NO: 8774 - DNA, 20 bp, Artificial Sequence
  Antisense compound
atgaaaccaatctctcttgt

SEQ ID NO: 8775 - DNA, 20 bp, Artificial Sequence
  Antisense compound
tatgaaaccaatctctcttg

SEQ ID NO: 8776 - DNA, 20 bp, Artificial Sequence
  Antisense compound
ctatgaaaccaatctctctt

SEQ ID NO: 8777 - DNA, 20 bp, Artificial Sequence
  Antisense compound
actatgaaaccaatctctct

SEQ ID NO: 8778 - DNA, 20 bp, Artificial Sequence
  Antisense compound
cactatgaaaccaatctctc

SEQ ID NO: 8779 - DNA, 20 bp, Artificial Sequence
  Antisense compound
gcactatgaaaccaatctct

SEQ ID NO: 8780 - DNA, 20 bp, Artificial Sequence
  Antisense compound
ggcactatgaaaccaatctc

SEQ ID NO: 8781 - DNA, 20 bp, Artificial Sequence
  Antisense compound
aggcactatgaaaccaatct

SEQ ID NO: 8782 - DNA, 20 bp, Artificial Sequence
  Antisense compound
caggcactatgaaaccaatc

SEQ ID NO: 8783 - DNA, 20 bp, Artificial Sequence
  Antisense compound
ccaggcactatgaaaccaat

SEQ ID NO: 8784 - DNA, 20 bp, Artificial Sequence
  Antisense compound
gccaggcactatgaaaccaa

SEQ ID NO: 8785 - DNA, 20 bp, Artificial Sequence
  Antisense compound
agccaggcactatgaaacca

SEQ ID NO: 8786 - DNA, 20 bp, Artificial Sequence
  Antisense compound
aagccaggcactatgaaacc

SEQ ID NO: 8787 - DNA, 20 bp, Artificial Sequence
  Antisense compound
taagccaggcactatgaaac

SEQ ID NO: 8788 - DNA, 20 bp, Artificial Sequence
  Antisense compound
gtaagccaggcactatgaaa

SEQ ID NO: 8789 - DNA, 20 bp, Artificial Sequence
  Antisense compound
ggtaagccaggcactatgaa

SEQ ID NO: 8790 - DNA, 20 bp, Artificial Sequence
  Antisense compound
cggtaagccaggcactatga

SEQ ID NO: 8791 - DNA, 20 bp, Artificial Sequence
  Antisense compound
ccggtaagccaggcactatg

SEQ ID NO: 8792 - DNA, 20 bp, Artificial Sequence
  Antisense compound
cccggtaagccaggcactat

SEQ ID NO: 8793 - DNA, 20 bp, Artificial Sequence
  Antisense compound
acccggtaagccaggcacta

SEQ ID NO: 8794 - DNA, 20 bp, Artificial Sequence
  Antisense compound
tacccggtaagccaggcact

SEQ ID NO: 8795 - DNA, 20 bp, Artificial Sequence
  Antisense compound
gtacccggtaagccaggcac

SEQ ID NO: 8796 - DNA, 20 bp, Artificial Sequence
  Antisense compound
agtacccggtaagccaggca

SEQ ID NO: 8797 - DNA, 20 bp, Artificial Sequence
  Antisense compound
cagtacccggtaagccaggc

SEQ ID NO: 8798 - DNA, 20 bp, Artificial Sequence
  Antisense compound
acagtacccggtaagccagg

SEQ ID NO: 8799 - DNA, 20 bp, Artificial Sequence
  Antisense compound
cacagtacccggtaagccag

SEQ ID NO: 8800 - DNA, 20 bp, Artificial Sequence
  Antisense compound
gcacagtacccggtaagcca

SEQ ID NO: 8801 - DNA, 20 bp, Artificial Sequence
  Antisense compound
agcacagtacccggtaagcc

SEQ ID NO: 8802 - DNA, 20 bp, Artificial Sequence
  Antisense compound
cagcacagtacccggtaagc

SEQ ID NO: 8803 - DNA, 20 bp, Artificial Sequence
  Antisense compound
tcagcacagtacccggtaag

SEQ ID NO: 8804 - DNA, 20 bp, Artificial Sequence
  Antisense compound
ctcagcacagtacccggtaa

SEQ ID NO: 8805 - DNA, 20 bp, Artificial Sequence
  Antisense compound
tctcagcacagtacccggta

SEQ ID NO: 8806 - DNA, 20 bp, Artificial Sequence
  Antisense compound
ctctcagcacagtacccggt

SEQ ID NO: 8807 - DNA, 20 bp, Artificial Sequence
  Antisense compound
gctctcagcacagtacccgg

SEQ ID NO: 8808 - DNA, 20 bp, Artificial Sequence
  Antisense compound
tgctctcagcacagtacccg

SEQ ID NO: 8809 - DNA, 20 bp, Artificial Sequence
  Antisense compound
ttgctctcagcacagtaccc

SEQ ID NO: 8810 - DNA, 20 bp, Artificial Sequence
  Antisense compound
attgctctcagcacagtacc

SEQ ID NO: 8811 - DNA, 20 bp, Artificial Sequence
  Antisense compound
gattgctctcagcacagtac

SEQ ID NO: 8812 - DNA, 20 bp, Artificial Sequence
  Antisense compound
tgattgctctcagcacagta

SEQ ID NO: 8813 - DNA, 20 bp, Artificial Sequence
  Antisense compound
ttgattgctctcagcacagt

SEQ ID NO: 8814 - DNA, 20 bp, Artificial Sequence
  Antisense compound
attgattgctctcagcacag

SEQ ID NO: 8815 - DNA, 20 bp, Artificial Sequence
  Antisense compound
cattgattgctctcagcaca

SEQ ID NO: 8816 - DNA, 20 bp, Artificial Sequence
  Antisense compound
ccattgattgctctcagcac

SEQ ID NO: 8817 - DNA, 20 bp, Artificial Sequence
  Antisense compound
accattgattgctctcagca

SEQ ID NO: 8818 - DNA, 20 bp, Artificial Sequence
  Antisense compound
caccattgattgctctcagc

SEQ ID NO: 8819 - DNA, 20 bp, Artificial Sequence
  Antisense compound
tcaccattgattgctctcag

SEQ ID NO: 8820 - DNA, 20 bp, Artificial Sequence
  Antisense compound
gtcaccattgattgctctca

SEQ ID NO: 8821 - DNA, 20 bp, Artificial Sequence
  Antisense compound
agtcaccattgattgctctc

SEQ ID NO: 8822 - DNA, 20 bp, Artificial Sequence
  Antisense compound
aagtcaccattgattgctct

SEQ ID NO: 8823 - DNA, 20 bp, Artificial Sequence
  Antisense compound
gaagtcaccattgattgctc

SEQ ID NO: 8824 - DNA, 20 bp, Artificial Sequence
  Antisense compound
agaagtcaccattgattgct

SEQ ID NO: 8825 - DNA, 20 bp, Artificial Sequence
  Antisense compound
aagaagtcaccattgattgc

SEQ ID NO: 8826 - DNA, 20 bp, Artificial Sequence
  Antisense compound
caagaagtcaccattgattg

SEQ ID NO: 8827 - DNA, 20 bp, Artificial Sequence
  Antisense compound
gcaagaagtcaccattgatt

SEQ ID NO: 8828 - DNA, 20 bp, Artificial Sequence
  Antisense compound
tgcaagaagtcaccattgat

SEQ ID NO: 8829 - DNA, 20 bp, Artificial Sequence
  Antisense compound
atgcaagaagtcaccattga

SEQ ID NO: 8830 - DNA, 20 bp, Artificial Sequence
  Antisense compound
aatgcaagaagtcaccattg

SEQ ID NO: 8831 - DNA, 20 bp, Artificial Sequence
  Antisense compound
aaatgcaagaagtcaccatt

SEQ ID NO: 8832 - DNA, 20 bp, Artificial Sequence
  Antisense compound
aaaatgcaagaagtcaccat

SEQ ID NO: 8833 - DNA, 20 bp, Artificial Sequence
  Antisense compound
gaaaatgcaagaagtcacca

SEQ ID NO: 8834 - DNA, 20 bp, Artificial Sequence
  Antisense compound
agaaaatgcaagaagtcacc

SEQ ID NO: 8835 - DNA, 20 bp, Artificial Sequence
  Antisense compound
tagaaaatgcaagaagtcac

SEQ ID NO: 8836 - DNA, 20 bp, Artificial Sequence
  Antisense compound
gtagaaaatgcaagaagtca

SEQ ID NO: 8837 - DNA, 20 bp, Artificial Sequence
  Antisense compound
ggtagaaaatgcaagaagtc

SEQ ID NO: 8838 - DNA, 20 bp, Artificial Sequence
  Antisense compound
aggtagaaaatgcaagaagt

SEQ ID NO: 8839 - DNA, 20 bp, Artificial Sequence
  Antisense compound
gaggtagaaaatgcaagaag

SEQ ID NO: 8840 - DNA, 20 bp, Artificial Sequence
  Antisense compound
cgaggtagaaaatgcaagaa

SEQ ID NO: 8841 - DNA, 20 bp, Artificial Sequence
  Antisense compound
acgaggtagaaaatgcaaga

SEQ ID NO: 8842 - DNA, 20 bp, Artificial Sequence
  Antisense compound
cacgaggtagaaaatgcaag

SEQ ID NO: 8843 - DNA, 20 bp, Artificial Sequence
  Antisense compound
acacgaggtagaaaatgcaa

SEQ ID NO: 8844 - DNA, 20 bp, Artificial Sequence
  Antisense compound
aacacgaggtagaaaatgca

SEQ ID NO: 8845 - DNA, 20 bp, Artificial Sequence
  Antisense compound
aaacacgaggtagaaaatgc

SEQ ID NO: 8846 - DNA, 20 bp, Artificial Sequence
  Antisense compound
aaaacacgaggtagaaaatg

SEQ ID NO: 8847 - DNA, 20 bp, Artificial Sequence
  Antisense compound
aaaaacacgaggtagaaaat

SEQ ID NO: 8848 - DNA, 20 bp, Artificial Sequence
  Antisense compound
taaaaacacgaggtagaaaa

SEQ ID NO: 8849 - DNA, 20 bp, Artificial Sequence
  Antisense compound
ctaaaaacacgaggtagaaa

SEQ ID NO: 8850 - DNA, 20 bp, Artificial Sequence
  Antisense compound
actaaaaacacgaggtagaa

SEQ ID NO: 8851 - DNA, 20 bp, Artificial Sequence
  Antisense compound
cactaaaaacacgaggtaga

SEQ ID NO: 8852 - DNA, 20 bp, Artificial Sequence
  Antisense compound
gcactaaaaacacgaggtag

SEQ ID NO: 8853 - DNA, 20 bp, Artificial Sequence
  Antisense compound
agcactaaaaacacgaggta

SEQ ID NO: 8854 - DNA, 20 bp, Artificial Sequence
  Antisense compound
cagcactaaaaacacgaggt

SEQ ID NO: 8855 - DNA, 20 bp, Artificial Sequence
  Antisense compound
acagcactaaaaacacgagg

SEQ ID NO: 8856 - DNA, 20 bp, Artificial Sequence
  Antisense compound
aacagcactaaaaacacgag

SEQ ID NO: 8857 - DNA, 20 bp, Artificial Sequence
  Antisense compound
caacagcactaaaaacacga

SEQ ID NO: 8858 - DNA, 20 bp, Artificial Sequence
  Antisense compound
ccaacagcactaaaaacacg

SEQ ID NO: 8859 - DNA, 20 bp, Artificial Sequence
  Antisense compound
gccaacagcactaaaaacac

SEQ ID NO: 8860 - DNA, 20 bp, Artificial Sequence
  Antisense compound
tgccaacagcactaaaaaca

SEQ ID NO: 8861 - DNA, 20 bp, Artificial Sequence
  Antisense compound
ttgccaacagcactaaaaac

SEQ ID NO: 8862 - DNA, 20 bp, Artificial Sequence
  Antisense compound
gttgccaacagcactaaaaa

SEQ ID NO: 8863 - DNA, 20 bp, Artificial Sequence
  Antisense compound
tgttgccaacagcactaaaa

SEQ ID NO: 8864 - DNA, 20 bp, Artificial Sequence
  Antisense compound
atgttgccaacagcactaaa

SEQ ID NO: 8865 - DNA, 20 bp, Artificial Sequence
  Antisense compound
aatgttgccaacagcactaa

SEQ ID NO: 8866 - DNA, 20 bp, Artificial Sequence
  Antisense compound
aaatgttgccaacagcacta

SEQ ID NO: 8867 - DNA, 20 bp, Artificial Sequence
  Antisense compound
caaatgttgccaacagcact

SEQ ID NO: 8868 - DNA, 20 bp, Artificial Sequence
  Antisense compound
gcaaatgttgccaacagcac

SEQ ID NO: 8869 - DNA, 20 bp, Artificial Sequence
  Antisense compound
agcaaatgttgccaacagca

SEQ ID NO: 8870 - DNA, 20 bp, Artificial Sequence
  Antisense compound
tagcaaatgttgccaacagc

SEQ ID NO: 8871 - DNA, 20 bp, Artificial Sequence
  Antisense compound
gtagcaaatgttgccaacag

SEQ ID NO: 8872 - DNA, 20 bp, Artificial Sequence
  Antisense compound
tgtagcaaatgttgccaaca

SEQ ID NO: 8873 - DNA, 20 bp, Artificial Sequence
  Antisense compound
gtgtagcaaatgttgccaac

SEQ ID NO: 8874 - DNA, 20 bp, Artificial Sequence
  Antisense compound
tgtgtagcaaatgttgccaa

SEQ ID NO: 8875 - DNA, 20 bp, Artificial Sequence
  Antisense compound
gtgtgtagcaaatgttgcca

SEQ ID NO: 8876 - DNA, 20 bp, Artificial Sequence
  Antisense compound
ggtgtgtagcaaatgttgcc

SEQ ID NO: 8877 - DNA, 20 bp, Artificial Sequence
  Antisense compound
aggtgtgtagcaaatgttgc

SEQ ID NO: 8878 - DNA, 20 bp, Artificial Sequence
  Antisense compound
aaggtgtgtagcaaatgttg

SEQ ID NO: 8879 - DNA, 20 bp, Artificial Sequence
  Antisense compound
gaaggtgtgtagcaaatgtt

SEQ ID NO: 8880 - DNA, 20 bp, Artificial Sequence
  Antisense compound
ggaaggtgtgtagcaaatgt

SEQ ID NO: 8881 - DNA, 20 bp, Artificial Sequence
  Antisense compound
tggaaggtgtgtagcaaatg

SEQ ID NO: 8882 - DNA, 20 bp, Artificial Sequence
  Antisense compound
ttggaaggtgtgtagcaaat

SEQ ID NO: 8883 - DNA, 20 bp, Artificial Sequence
  Antisense compound
tttggaaggtgtgtagcaaa

SEQ ID NO: 8884 - DNA, 20 bp, Artificial Sequence
  Antisense compound
gtttggaaggtgtgtagcaa

SEQ ID NO: 8885 - DNA, 20 bp, Artificial Sequence
  Antisense compound
agtttggaaggtgtgtagca

SEQ ID NO: 8886 - DNA, 20 bp, Artificial Sequence
  Antisense compound
gagtttggaaggtgtgtagc

SEQ ID NO: 8887 - DNA, 20 bp, Artificial Sequence
  Antisense compound
tgagtttggaaggtgtgtag

SEQ ID NO: 8888 - DNA, 20 bp, Artificial Sequence
  Antisense compound
atgagtttggaaggtgtgta

SEQ ID NO: 8889 - DNA, 20 bp, Artificial Sequence
  Antisense compound
aatgagtttggaaggtgtgt

SEQ ID NO: 8890 - DNA, 20 bp, Artificial Sequence
  Antisense compound
caatgagtttggaaggtgtg

SEQ ID NO: 8891 - DNA, 20 bp, Artificial Sequence
  Antisense compound
tcaatgagtttggaaggtgt

SEQ ID NO: 8892 - DNA, 20 bp, Artificial Sequence
  Antisense compound
ctcaatgagtttggaaggtg

SEQ ID NO: 8893 - DNA, 20 bp, Artificial Sequence
  Antisense compound
actcaatgagtttggaaggt

SEQ ID NO: 8894 - DNA, 20 bp, Artificial Sequence
  Antisense compound
tactcaatgagtttggaagg

SEQ ID NO: 8895 - DNA, 20 bp, Artificial Sequence
  Antisense compound
atactcaatgagtttggaag

SEQ ID NO: 8896 - DNA, 20 bp, Artificial Sequence
  Antisense compound
tatactcaatgagtttggaa

SEQ ID NO: 8897 - DNA, 20 bp, Artificial Sequence
  Antisense compound
ctatactcaatgagtttgga

SEQ ID NO: 8898 - DNA, 20 bp, Artificial Sequence
  Antisense compound
actatactcaatgagtttgg

SEQ ID NO: 8899 - DNA, 20 bp, Artificial Sequence
  Antisense compound
cactatactcaatgagtttg

SEQ ID NO: 8900 - DNA, 20 bp, Artificial Sequence
  Antisense compound
tcactatactcaatgagttt

SEQ ID NO: 8901 - DNA, 20 bp, Artificial Sequence
  Antisense compound
atcactatactcaatgagtt

SEQ ID NO: 8902 - DNA, 20 bp, Artificial Sequence
  Antisense compound
aatcactatactcaatgagt

SEQ ID NO: 8903 - DNA, 20 bp, Artificial Sequence
  Antisense compound
aaatcactatactcaatgag

SEQ ID NO: 8904 - DNA, 20 bp, Artificial Sequence
  Antisense compound
aaaatcactatactcaatga

SEQ ID NO: 8905 - DNA, 20 bp, Artificial Sequence
  Antisense compound
caaaatcactatactcaatg

SEQ ID NO: 8906 - DNA, 20 bp, Artificial Sequence
  Antisense compound
gcaaaatcactatactcaat

SEQ ID NO: 8907 - DNA, 20 bp, Artificial Sequence
  Antisense compound
agcaaaatcactatactcaa

SEQ ID NO: 8908 - DNA, 20 bp, Artificial Sequence
  Antisense compound
tagcaaaatcactatactca

SEQ ID NO: 8909 - DNA, 20 bp, Artificial Sequence
  Antisense compound
gtagcaaaatcactatactc

SEQ ID NO: 8910 - DNA, 20 bp, Artificial Sequence
  Antisense compound
ggtagcaaaatcactatact

SEQ ID NO: 8911 - DNA, 20 bp, Artificial Sequence
  Antisense compound
aggtagcaaaatcactatac

SEQ ID NO: 8912 - DNA, 20 bp, Artificial Sequence
  Antisense compound
gaggtagcaaaatcactata

SEQ ID NO: 8913 - DNA, 20 bp, Artificial Sequence
  Antisense compound
agaggtagcaaaatcactat

SEQ ID NO: 8914 - DNA, 20 bp, Artificial Sequence
  Antisense compound
cagaggtagcaaaatcacta

SEQ ID NO: 8915 - DNA, 20 bp, Artificial Sequence
  Antisense compound
gcagaggtagcaaaatcact

SEQ ID NO: 8916 - DNA, 20 bp, Artificial Sequence
  Antisense compound
agcagaggtagcaaaatcac

SEQ ID NO: 8917 - DNA, 20 bp, Artificial Sequence
  Antisense compound
aagcagaggtagcaaaatca

SEQ ID NO: 8918 - DNA, 20 bp, Artificial Sequence
  Antisense compound
caagcagaggtagcaaaatc

SEQ ID NO: 8919 - DNA, 20 bp, Artificial Sequence
  Antisense compound
gcaagcagaggtagcaaaat

SEQ ID NO: 8920 - DNA, 20 bp, Artificial Sequence
  Antisense compound
cgcaagcagaggtagcaaaa

SEQ ID NO: 8921 - DNA, 20 bp, Artificial Sequence
  Antisense compound
acgcaagcagaggtagcaaa

SEQ ID NO: 8922 - DNA, 20 bp, Artificial Sequence
  Antisense compound
aacgcaagcagaggtagcaa

SEQ ID NO: 8923 - DNA, 20 bp, Artificial Sequence
  Antisense compound
gaacgcaagcagaggtagca

SEQ ID NO: 8924 - DNA, 20 bp, Artificial Sequence
  Antisense compound
agaacgcaagcagaggtagc

SEQ ID NO: 8925 - DNA, 20 bp, Artificial Sequence
  Antisense compound
aagaacgcaagcagaggtag

SEQ ID NO: 8926 - DNA, 20 bp, Artificial Sequence
  Antisense compound
caagaacgcaagcagaggta

SEQ ID NO: 8927 - DNA, 20 bp, Artificial Sequence
  Antisense compound
gcaagaacgcaagcagaggt

SEQ ID NO: 8928 - DNA, 20 bp, Artificial Sequence
  Antisense compound
agcaagaacgcaagcagagg

SEQ ID NO: 8929 - DNA, 20 bp, Artificial Sequence
  Antisense compound
cagcaagaacgcaagcagag

SEQ ID NO: 8930 - DNA, 20 bp, Artificial Sequence
  Antisense compound
gcagcaagaacgcaagcaga

SEQ ID NO: 8931 - DNA, 20 bp, Artificial Sequence
  Antisense compound
agcagcaagaacgcaagcag

SEQ ID NO: 8932 - DNA, 20 bp, Artificial Sequence
  Antisense compound
cagcagcaagaacgcaagca

SEQ ID NO: 8933 - DNA, 20 bp, Artificial Sequence
  Antisense compound
tcagcagcaagaacgcaagc

SEQ ID NO: 8934 - DNA, 20 bp, Artificial Sequence
  Antisense compound
ctcagcagcaagaacgcaag

SEQ ID NO: 8935 - DNA, 20 bp, Artificial Sequence
  Antisense compound
actcagcagcaagaacgcaa

SEQ ID NO: 8936 - DNA, 20 bp, Artificial Sequence
  Antisense compound
cactcagcagcaagaacgca

SEQ ID NO: 8937 - DNA, 20 bp, Artificial Sequence
  Antisense compound
acactcagcagcaagaacgc

SEQ ID NO: 8938 - DNA, 20 bp, Artificial Sequence
  Antisense compound
tacactcagcagcaagaacg

SEQ ID NO: 8939 - DNA, 20 bp, Artificial Sequence
  Antisense compound
gtacactcagcagcaagaac

SEQ ID NO: 8940 - DNA, 20 bp, Artificial Sequence
  Antisense compound
tgtacactcagcagcaagaa

SEQ ID NO: 8941 - DNA, 20 bp, Artificial Sequence
  Antisense compound
ttgtacactcagcagcaaga

SEQ ID NO: 8942 - DNA, 20 bp, Artificial Sequence
  Antisense compound
attgtacactcagcagcaag

SEQ ID NO: 8943 - DNA, 20 bp, Artificial Sequence
  Antisense compound
aattgtacactcagcagcaa

SEQ ID NO: 8944 - DNA, 20 bp, Artificial Sequence
  Antisense compound
aaattgtacactcagcagca

SEQ ID NO: 8945 - DNA, 20 bp, Artificial Sequence
  Antisense compound
aaaattgtacactcagcagc

SEQ ID NO: 8946 - DNA, 20 bp, Artificial Sequence
  Antisense compound
aaaaattgtacactcagcag

SEQ ID NO: 8947 - DNA, 20 bp, Artificial Sequence
  Antisense compound
taaaaattgtacactcagca

SEQ ID NO: 8948 - DNA, 20 bp, Artificial Sequence
  Antisense compound
ttaaaaattgtacactcagc

SEQ ID NO: 8949 - DNA, 20 bp, Artificial Sequence
  Antisense compound
cttaaaaattgtacactcag

SEQ ID NO: 8950 - DNA, 20 bp, Artificial Sequence
  Antisense compound
ccttaaaaattgtacactca

SEQ ID NO: 8951 - DNA, 20 bp, Artificial Sequence
  Antisense compound
tccttaaaaattgtacactc

SEQ ID NO: 8952 - DNA, 20 bp, Artificial Sequence
  Antisense compound
atccttaaaaattgtacact

SEQ ID NO: 8953 - DNA, 20 bp, Artificial Sequence
  Antisense compound
catccttaaaaattgtacac

SEQ ID NO: 8954 - DNA, 20 bp, Artificial Sequence
  Antisense compound
gcatccttaaaaattgtaca

SEQ ID NO: 8955 - DNA, 20 bp, Artificial Sequence
  Antisense compound
agcatccttaaaaattgtac

SEQ ID NO: 8956 - DNA, 20 bp, Artificial Sequence
  Antisense compound
tagcatccttaaaaattgta

SEQ ID NO: 8957 - DNA, 20 bp, Artificial Sequence
  Antisense compound
atagcatccttaaaaattgt

SEQ ID NO: 8958 - DNA, 20 bp, Artificial Sequence
  Antisense compound
catagcatccttaaaaattg

SEQ ID NO: 8959 - DNA, 20 bp, Artificial Sequence
  Antisense compound
ccatagcatccttaaaaatt

SEQ ID NO: 8960 - DNA, 20 bp, Artificial Sequence
  Antisense compound
cccatagcatccttaaaaat

SEQ ID NO: 8961 - DNA, 20 bp, Artificial Sequence
  Antisense compound
gcccatagcatccttaaaaa

SEQ ID NO: 8962 - DNA, 20 bp, Artificial Sequence
  Antisense compound
tgcccatagcatccttaaaa

SEQ ID NO: 8963 - DNA, 20 bp, Artificial Sequence
  Antisense compound
ttgcccatagcatccttaaa

SEQ ID NO: 8964 - DNA, 20 bp, Artificial Sequence
  Antisense compound
tttgcccatagcatccttaa

SEQ ID NO: 8965 - DNA, 20 bp, Artificial Sequence
  Antisense compound
gtttgcccatagcatcctta

SEQ ID NO: 8966 - DNA, 20 bp, Artificial Sequence
  Antisense compound
ggtttgcccatagcatcctt

SEQ ID NO: 8967 - DNA, 20 bp, Artificial Sequence
  Antisense compound
aggtttgcccatagcatcct

SEQ ID NO: 8968 - DNA, 20 bp, Artificial Sequence
  Antisense compound
caggtttgcccatagcatcc

SEQ ID NO: 8969 - DNA, 20 bp, Artificial Sequence
  Antisense compound
acaggtttgcccatagcatc

SEQ ID NO: 8970 - DNA, 20 bp, Artificial Sequence
  Antisense compound
cacaggtttgcccatagcat

SEQ ID NO: 8971 - DNA, 20 bp, Artificial Sequence
  Antisense compound
gcacaggtttgcccatagca

SEQ ID NO: 8972 - DNA, 20 bp, Artificial Sequence
  Antisense compound
ggcacaggtttgcccatagc

SEQ ID NO: 8973 - DNA, 20 bp, Artificial Sequence
  Antisense compound
tggcacaggtttgcccatag

SEQ ID NO: 8974 - DNA, 20 bp, Artificial Sequence
  Antisense compound
atggcacaggtttgcccata

SEQ ID NO: 8975 - DNA, 20 bp, Artificial Sequence
  Antisense compound
tatggcacaggtttgcccat

SEQ ID NO: 8976 - DNA, 20 bp, Artificial Sequence
  Antisense compound
atatggcacaggtttgccca

SEQ ID NO: 8977 - DNA, 20 bp, Artificial Sequence
  Antisense compound
aatatggcacaggtttgccc

SEQ ID NO: 8978 - DNA, 20 bp, Artificial Sequence
  Antisense compound
caatatggcacaggtttgcc

SEQ ID NO: 8979 - DNA, 20 bp, Artificial Sequence
  Antisense compound
acaatatggcacaggtttgc

SEQ ID NO: 8980 - DNA, 20 bp, Artificial Sequence
  Antisense compound
aacaatatggcacaggtttg

SEQ ID NO: 8981 - DNA, 20 bp, Artificial Sequence
  Antisense compound
taacaatatggcacaggttt

SEQ ID NO: 8982 - DNA, 20 bp, Artificial Sequence
  Antisense compound
ataacaatatggcacaggtt

SEQ ID NO: 8983 - DNA, 20 bp, Artificial Sequence
  Antisense compound
cataacaatatggcacaggt

SEQ ID NO: 8984 - DNA, 20 bp, Artificial Sequence
  Antisense compound
tcataacaatatggcacagg

SEQ ID NO: 8985 - DNA, 20 bp, Artificial Sequence
  Antisense compound
gtcataacaatatggcacag

SEQ ID NO: 8986 - DNA, 20 bp, Artificial Sequence
  Antisense compound
tgtcataacaatatggcaca

SEQ ID NO: 8987 - DNA, 20 bp, Artificial Sequence
  Antisense compound
gtgtcataacaatatggcac

SEQ ID NO: 8988 - DNA, 20 bp, Artificial Sequence
  Antisense compound
agtgtcataacaatatggca

SEQ ID NO: 8989 - DNA, 20 bp, Artificial Sequence
  Antisense compound
tagtgtcataacaatatggc

SEQ ID NO: 8990 - DNA, 20 bp, Artificial Sequence
  Antisense compound
ttagtgtcataacaatatgg

SEQ ID NO: 8991 - DNA, 20 bp, Artificial Sequence
  Antisense compound
attagtgtcataacaatatg

SEQ ID NO: 8992 - DNA, 20 bp, Artificial Sequence
  Antisense compound
aattagtgtcataacaatat

SEQ ID NO: 8993 - DNA, 20 bp, Artificial Sequence
  Antisense compound
aaattagtgtcataacaata

SEQ ID NO: 8994 - DNA, 20 bp, Artificial Sequence
  Antisense compound
caaattagtgtcataacaat

SEQ ID NO: 8995 - DNA, 20 bp, Artificial Sequence
  Antisense compound
gcaaattagtgtcataacaa

SEQ ID NO: 8996 - DNA, 20 bp, Artificial Sequence
  Antisense compound
agcaaattagtgtcataaca

SEQ ID NO: 8997 - DNA, 20 bp, Artificial Sequence
  Antisense compound
tagcaaattagtgtcataac

SEQ ID NO: 8998 - DNA, 20 bp, Artificial Sequence
  Antisense compound
ctagcaaattagtgtcataa

SEQ ID NO: 8999 - DNA, 20 bp, Artificial Sequence
  Antisense compound
tctagcaaattagtgtcata

SEQ ID NO: 9000 - DNA, 20 bp, Artificial Sequence
  Antisense compound
ctctagcaaattagtgtcat

SEQ ID NO: 9001 - DNA, 20 bp, Artificial Sequence
  Antisense compound
cctctagcaaattagtgtca

SEQ ID NO: 9002 - DNA, 20 bp, Artificial Sequence
  Antisense compound
ccctctagcaaattagtgtc

SEQ ID NO: 9003 - DNA, 20 bp, Artificial Sequence
  Antisense compound
accctctagcaaattagtgt

SEQ ID NO: 9004 - DNA, 20 bp, Artificial Sequence
  Antisense compound
aaccctctagcaaattagtg

SEQ ID NO: 9005 - DNA, 20 bp, Artificial Sequence
  Antisense compound
gaaccctctagcaaattagt

SEQ ID NO: 9006 - DNA, 20 bp, Artificial Sequence
  Antisense compound
agaaccctctagcaaattag

SEQ ID NO: 9007 - DNA, 20 bp, Artificial Sequence
  Antisense compound
tagaaccctctagcaaatta

SEQ ID NO: 9008 - DNA, 20 bp, Artificial Sequence
  Antisense compound
atagaaccctctagcaaatt

SEQ ID NO: 9009 - DNA, 20 bp, Artificial Sequence
  Antisense compound
aatagaaccctctagcaaat

SEQ ID NO: 9010 - DNA, 20 bp, Artificial Sequence
  Antisense compound
aaatagaaccctctagcaaa

SEQ ID NO: 9011 - DNA, 20 bp, Artificial Sequence
  Antisense compound
gaaatagaaccctctagcaa

SEQ ID NO: 9012 - DNA, 20 bp, Artificial Sequence
  Antisense compound
agaaatagaaccctctagca

SEQ ID NO: 9013 - DNA, 20 bp, Artificial Sequence
  Antisense compound
aagaaatagaaccctctagc

SEQ ID NO: 9014 - DNA, 20 bp, Artificial Sequence
  Antisense compound
taagaaatagaaccctctag

SEQ ID NO: 9015 - DNA, 20 bp, Artificial Sequence
  Antisense compound
ataagaaatagaaccctcta

SEQ ID NO: 9016 - DNA, 20 bp, Artificial Sequence
  Antisense compound
tataagaaatagaaccctct

SEQ ID NO: 9017 - DNA, 20 bp, Artificial Sequence
  Antisense compound
ctataagaaatagaaccctc

SEQ ID NO: 9018 - DNA, 20 bp, Artificial Sequence
  Antisense compound
actataagaaatagaaccct

SEQ ID NO: 9019 - DNA, 20 bp, Artificial Sequence
  Antisense compound
cactataagaaatagaaccc

SEQ ID NO: 9020 - DNA, 20 bp, Artificial Sequence
  Antisense compound
tcactataagaaatagaacc

SEQ ID NO: 9021 - DNA, 20 bp, Artificial Sequence
  Antisense compound
ctcactataagaaatagaac

SEQ ID NO: 9022 - DNA, 20 bp, Artificial Sequence
  Antisense compound
gctcactataagaaatagaa

SEQ ID NO: 9023 - DNA, 20 bp, Artificial Sequence
  Antisense compound
agctcactataagaaataga

SEQ ID NO: 9024 - DNA, 20 bp, Artificial Sequence
  Antisense compound
aagctcactataagaaatag

SEQ ID NO: 9025 - DNA, 20 bp, Artificial Sequence
  Antisense compound
gaagctcactataagaaata

SEQ ID NO: 9026 - DNA, 20 bp, Artificial Sequence
  Antisense compound
cgaagctcactataagaaat

SEQ ID NO: 9027 - DNA, 20 bp, Artificial Sequence
  Antisense compound
acgaagctcactataagaaa

SEQ ID NO: 9028 - DNA, 20 bp, Artificial Sequence
  Antisense compound
gacgaagctcactataagaa

SEQ ID NO: 9029 - DNA, 20 bp, Artificial Sequence
  Antisense compound
ggacgaagctcactataaga

SEQ ID NO: 9030 - DNA, 20 bp, Artificial Sequence
  Antisense compound
tggacgaagctcactataag

SEQ ID NO: 9031 - DNA, 20 bp, Artificial Sequence
  Antisense compound
ctggacgaagctcactataa

SEQ ID NO: 9032 - DNA, 20 bp, Artificial Sequence
  Antisense compound
tctggacgaagctcactata

SEQ ID NO: 9033 - DNA, 20 bp, Artificial Sequence
  Antisense compound
gtctggacgaagctcactat

SEQ ID NO: 9034 - DNA, 20 bp, Artificial Sequence
  Antisense compound
tgtctggacgaagctcacta

SEQ ID NO: 9035 - DNA, 20 bp, Artificial Sequence
  Antisense compound
gtgtctggacgaagctcact

SEQ ID NO: 9036 - DNA, 20 bp, Artificial Sequence
  Antisense compound
agtgtctggacgaagctcac

SEQ ID NO: 9037 - DNA, 20 bp, Artificial Sequence
  Antisense compound
gagtgtctggacgaagctca

SEQ ID NO: 9038 - DNA, 20 bp, Artificial Sequence
  Antisense compound
cgagtgtctggacgaagctc

SEQ ID NO: 9039 - DNA, 20 bp, Artificial Sequence
  Antisense compound
acgagtgtctggacgaagct

SEQ ID NO: 9040 - DNA, 20 bp, Artificial Sequence
  Antisense compound
aacgagtgtctggacgaagc

SEQ ID NO: 9041 - DNA, 20 bp, Artificial Sequence
  Antisense compound
taacgagtgtctggacgaag

SEQ ID NO: 9042 - DNA, 20 bp, Artificial Sequence
  Antisense compound
ataacgagtgtctggacgaa

SEQ ID NO: 9043 - DNA, 20 bp, Artificial Sequence
  Antisense compound
cataacgagtgtctggacga

SEQ ID NO: 9044 - DNA, 20 bp, Artificial Sequence
  Antisense compound
acataacgagtgtctggacg

SEQ ID NO: 9045 - DNA, 20 bp, Artificial Sequence
  Antisense compound
cacataacgagtgtctggac

SEQ ID NO: 9046 - DNA, 20 bp, Artificial Sequence
  Antisense compound
gcacataacgagtgtctgga

SEQ ID NO: 9047 - DNA, 20 bp, Artificial Sequence
  Antisense compound
agcacataacgagtgtctgg

SEQ ID NO: 9048 - DNA, 20 bp, Artificial Sequence
  Antisense compound
aagcacataacgagtgtctg

SEQ ID NO: 9049 - DNA, 20 bp, Artificial Sequence
  Antisense compound
taagcacataacgagtgtct

SEQ ID NO: 9050 - DNA, 20 bp, Artificial Sequence
  Antisense compound
ataagcacataacgagtgtc

SEQ ID NO: 9051 - DNA, 20 bp, Artificial Sequence
  Antisense compound
cataagcacataacgagtgt

SEQ ID NO: 9052 - DNA, 20 bp, Artificial Sequence
  Antisense compound
ccataagcacataacgagtg

SEQ ID NO: 9053 - DNA, 20 bp, Artificial Sequence
  Antisense compound
tccataagcacataacgagt

SEQ ID NO: 9054 - DNA, 20 bp, Artificial Sequence
  Antisense compound
atccataagcacataacgag

SEQ ID NO: 9055 - DNA, 20 bp, Artificial Sequence
  Antisense compound
catccataagcacataacga

SEQ ID NO: 9056 - DNA, 20 bp, Artificial Sequence
  Antisense compound
ccatccataagcacataacg

SEQ ID NO: 9057 - DNA, 20 bp, Artificial Sequence
  Antisense compound
accatccataagcacataac

SEQ ID NO: 9058 - DNA, 20 bp, Artificial Sequence
  Antisense compound
aaccatccataagcacataa

SEQ ID NO: 9059 - DNA, 20 bp, Artificial Sequence
  Antisense compound
gaaccatccataagcacata

SEQ ID NO: 9060 - DNA, 20 bp, Artificial Sequence
  Antisense compound
ggaaccatccataagcacat

SEQ ID NO: 9061 - DNA, 20 bp, Artificial Sequence
  Antisense compound
tggaaccatccataagcaca

SEQ ID NO: 9062 - DNA, 20 bp, Artificial Sequence
  Antisense compound
atggaaccatccataagcac

SEQ ID NO: 9063 - DNA, 20 bp, Artificial Sequence
  Antisense compound
gatggaaccatccataagca

SEQ ID NO: 9064 - DNA, 20 bp, Artificial Sequence
  Antisense compound
tgatggaaccatccataagc

SEQ ID NO: 9065 - DNA, 20 bp, Artificial Sequence
  Antisense compound
atgatggaaccatccataag

SEQ ID NO: 9066 - DNA, 20 bp, Artificial Sequence
  Antisense compound
tatgatggaaccatccataa

SEQ ID NO: 9067 - DNA, 20 bp, Artificial Sequence
  Antisense compound
gtatgatggaaccatccata

SEQ ID NO: 9068 - DNA, 20 bp, Artificial Sequence
  Antisense compound
tgtatgatggaaccatccat

SEQ ID NO: 9069 - DNA, 20 bp, Artificial Sequence
  Antisense compound
ctgtatgatggaaccatcca

SEQ ID NO: 9070 - DNA, 20 bp, Artificial Sequence
  Antisense compound
actgtatgatggaaccatcc

SEQ ID NO: 9071 - DNA, 20 bp, Artificial Sequence
  Antisense compound
aactgtatgatggaaccatc

SEQ ID NO: 9072 - DNA, 20 bp, Artificial Sequence
  Antisense compound
aaactgtatgatggaaccat

SEQ ID NO: 9073 - DNA, 20 bp, Artificial Sequence
  Antisense compound
gaaactgtatgatggaacca

SEQ ID NO: 9074 - DNA, 20 bp, Artificial Sequence
  Antisense compound
ggaaactgtatgatggaacc

SEQ ID NO: 9075 - DNA, 20 bp, Artificial Sequence
  Antisense compound
aggaaactgtatgatggaac

SEQ ID NO: 9076 - DNA, 20 bp, Artificial Sequence
  Antisense compound
taggaaactgtatgatggaa

SEQ ID NO: 9077 - DNA, 20 bp, Artificial Sequence
  Antisense compound
ttaggaaactgtatgatgga

SEQ ID NO: 9078 - DNA, 20 bp, Artificial Sequence
  Antisense compound
gttaggaaactgtatgatgg

SEQ ID NO: 9079 - DNA, 20 bp, Artificial Sequence
  Antisense compound
tgttaggaaactgtatgatg

SEQ ID NO: 9080 - DNA, 20 bp, Artificial Sequence
  Antisense compound
gtgttaggaaactgtatgat

SEQ ID NO: 9081 - DNA, 20 bp, Artificial Sequence
  Antisense compound
agtgttaggaaactgtatga

SEQ ID NO: 9082 - DNA, 20 bp, Artificial Sequence
  Antisense compound
aagtgttaggaaactgtatg

SEQ ID NO: 9083 - DNA, 20 bp, Artificial Sequence
  Antisense compound
taagtgttaggaaactgtat

SEQ ID NO: 9084 - DNA, 20 bp, Artificial Sequence
  Antisense compound
gtaagtgttaggaaactgta

SEQ ID NO: 9085 - DNA, 20 bp, Artificial Sequence
  Antisense compound
ggtaagtgttaggaaactgt

SEQ ID NO: 9086 - DNA, 20 bp, Artificial Sequence
  Antisense compound
aggtaagtgttaggaaactg

SEQ ID NO: 9087 - DNA, 20 bp, Artificial Sequence
  Antisense compound
caggtaagtgttaggaaact

SEQ ID NO: 9088 - DNA, 20 bp, Artificial Sequence
  Antisense compound
ccaggtaagtgttaggaaac

SEQ ID NO: 9089 - DNA, 20 bp, Artificial Sequence
  Antisense compound
tccaggtaagtgttaggaaa

SEQ ID NO: 9090 - DNA, 20 bp, Artificial Sequence
  Antisense compound
ctccaggtaagtgttaggaa

SEQ ID NO: 9091 - DNA, 20 bp, Artificial Sequence
  Antisense compound
cctccaggtaagtgttagga

SEQ ID NO: 9092 - DNA, 20 bp, Artificial Sequence
  Antisense compound
ccctccaggtaagtgttagg

SEQ ID NO: 9093 - DNA, 20 bp, Artificial Sequence
  Antisense compound
accctccaggtaagtgttag

SEQ ID NO: 9094 - DNA, 20 bp, Artificial Sequence
  Antisense compound
aaccctccaggtaagtgtta

SEQ ID NO: 9095 - DNA, 20 bp, Artificial Sequence
  Antisense compound
gaaccctccaggtaagtgtt

SEQ ID NO: 9096 - DNA, 20 bp, Artificial Sequence
  Antisense compound
agaaccctccaggtaagtgt

SEQ ID NO: 9097 - DNA, 20 bp, Artificial Sequence
  Antisense compound
cagaaccctccaggtaagtg

SEQ ID NO: 9098 - DNA, 20 bp, Artificial Sequence
  Antisense compound
acagaaccctccaggtaagt

SEQ ID NO: 9099 - DNA, 20 bp, Artificial Sequence
  Antisense compound
aacagaaccctccaggtaag

SEQ ID NO: 9100 - DNA, 20 bp, Artificial Sequence
  Antisense compound
taacagaaccctccaggtaa

SEQ ID NO: 9101 - DNA, 20 bp, Artificial Sequence
  Antisense compound
ctaacagaaccctccaggta

SEQ ID NO: 9102 - DNA, 20 bp, Artificial Sequence
  Antisense compound
tctaacagaaccctccaggt

SEQ ID NO: 9103 - DNA, 20 bp, Artificial Sequence
  Antisense compound
ctctaacagaaccctccagg

SEQ ID NO: 9104 - DNA, 20 bp, Artificial Sequence
  Antisense compound
actctaacagaaccctccag

SEQ ID NO: 9105 - DNA, 20 bp, Artificial Sequence
  Antisense compound
tactctaacagaaccctcca

SEQ ID NO: 9106 - DNA, 20 bp, Artificial Sequence
  Antisense compound
ctactctaacagaaccctcc

SEQ ID NO: 9107 - DNA, 20 bp, Artificial Sequence
  Antisense compound
actactctaacagaaccctc

SEQ ID NO: 9108 - DNA, 20 bp, Artificial Sequence
  Antisense compound
tactactctaacagaaccct

SEQ ID NO: 9109 - DNA, 20 bp, Artificial Sequence
  Antisense compound
ttactactctaacagaaccc

SEQ ID NO: 9110 - DNA, 20 bp, Artificial Sequence
  Antisense compound
gttactactctaacagaacc

SEQ ID NO: 9111 - DNA, 20 bp, Artificial Sequence
  Antisense compound
tgttactactctaacagaac

SEQ ID NO: 9112 - DNA, 20 bp, Artificial Sequence
  Antisense compound
ttgttactactctaacagaa

SEQ ID NO: 9113 - DNA, 20 bp, Artificial Sequence
  Antisense compound
gttgttactactctaacaga

SEQ ID NO: 9114 - DNA, 20 bp, Artificial Sequence
  Antisense compound
agttgttactactctaacag

SEQ ID NO: 9115 - DNA, 20 bp, Artificial Sequence
  Antisense compound
aagttgttactactctaaca

SEQ ID NO: 9116 - DNA, 20 bp, Artificial Sequence
  Antisense compound
aaagttgttactactctaac

SEQ ID NO: 9117 - DNA, 20 bp, Artificial Sequence
  Antisense compound
aaaagttgttactactctaa

SEQ ID NO: 9118 - DNA, 20 bp, Artificial Sequence
  Antisense compound
caaaagttgttactactcta

SEQ ID NO: 9119 - DNA, 20 bp, Artificial Sequence
  Antisense compound
tcaaaagttgttactactct

SEQ ID NO: 9120 - DNA, 20 bp, Artificial Sequence
  Antisense compound
atcaaaagttgttactactc

SEQ ID NO: 9121 - DNA, 20 bp, Artificial Sequence
  Antisense compound
catcaaaagttgttactact

SEQ ID NO: 9122 - DNA, 20 bp, Artificial Sequence
  Antisense compound
gcatcaaaagttgttactac

SEQ ID NO: 9123 - DNA, 20 bp, Artificial Sequence
  Antisense compound
agcatcaaaagttgttacta

SEQ ID NO: 9124 - DNA, 20 bp, Artificial Sequence
  Antisense compound
cagcatcaaaagttgttact

SEQ ID NO: 9125 - DNA, 20 bp, Artificial Sequence
  Antisense compound
tcagcatcaaaagttgttac

SEQ ID NO: 9126 - DNA, 20 bp, Artificial Sequence
  Antisense compound
ctcagcatcaaaagttgtta

SEQ ID NO: 9127 - DNA, 20 bp, Artificial Sequence
  Antisense compound
actcagcatcaaaagttgtt

SEQ ID NO: 9128 - DNA, 20 bp, Artificial Sequence
  Antisense compound
tactcagcatcaaaagttgt

SEQ ID NO: 9129 - DNA, 20 bp, Artificial Sequence
  Antisense compound
gtactcagcatcaaaagttg

SEQ ID NO: 9130 - DNA, 20 bp, Artificial Sequence
  Antisense compound
agtactcagcatcaaaagtt

SEQ ID NO: 9131 - DNA, 20 bp, Artificial Sequence
  Antisense compound
cagtactcagcatcaaaagt

SEQ ID NO: 9132 - DNA, 20 bp, Artificial Sequence
  Antisense compound
acagtactcagcatcaaaag

SEQ ID NO: 9133 - DNA, 20 bp, Artificial Sequence
  Antisense compound
tacagtactcagcatcaaaa

SEQ ID NO: 9134 - DNA, 20 bp, Artificial Sequence
  Antisense compound
ctacagtactcagcatcaaa

SEQ ID NO: 9135 - DNA, 20 bp, Artificial Sequence
  Antisense compound
tctacagtactcagcatcaa

SEQ ID NO: 9136 - DNA, 20 bp, Artificial Sequence
  Antisense compound
gtctacagtactcagcatca

SEQ ID NO: 9137 - DNA, 20 bp, Artificial Sequence
  Antisense compound
tgtctacagtactcagcatc

SEQ ID NO: 9138 - DNA, 20 bp, Artificial Sequence
  Antisense compound
atgtctacagtactcagcat

SEQ ID NO: 9139 - DNA, 20 bp, Artificial Sequence
  Antisense compound
catgtctacagtactcagca

SEQ ID NO: 9140 - DNA, 20 bp, Artificial Sequence
  Antisense compound
ccatgtctacagtactcagc

SEQ ID NO: 9141 - DNA, 20 bp, Artificial Sequence
  Antisense compound
accatgtctacagtactcag

SEQ ID NO: 9142 - DNA, 20 bp, Artificial Sequence
  Antisense compound
taccatgtctacagtactca

SEQ ID NO: 9143 - DNA, 20 bp, Artificial Sequence
  Antisense compound
gtaccatgtctacagtactc

SEQ ID NO: 9144 - DNA, 20 bp, Artificial Sequence
  Antisense compound
tgtaccatgtctacagtact

SEQ ID NO: 9145 - DNA, 20 bp, Artificial Sequence
  Antisense compound
atgtaccatgtctacagtac

SEQ ID NO: 9146 - DNA, 20 bp, Artificial Sequence
  Antisense compound
catgtaccatgtctacagta

SEQ ID NO: 9147 - DNA, 20 bp, Artificial Sequence
  Antisense compound
gcatgtaccatgtctacagt

SEQ ID NO: 9148 - DNA, 20 bp, Artificial Sequence
  Antisense compound
cgcatgtaccatgtctacag

SEQ ID NO: 9149 - DNA, 20 bp, Artificial Sequence
  Antisense compound
tcgcatgtaccatgtctaca

SEQ ID NO: 9150 - DNA, 20 bp, Artificial Sequence
  Antisense compound
ttcgcatgtaccatgtctac

SEQ ID NO: 9151 - DNA, 20 bp, Artificial Sequence
  Antisense compound
tttcgcatgtaccatgtcta

SEQ ID NO: 9152 - DNA, 20 bp, Artificial Sequence
  Antisense compound
ctttcgcatgtaccatgtct

SEQ ID NO: 9153 - DNA, 20 bp, Artificial Sequence
  Antisense compound
cctttcgcatgtaccatgtc

SEQ ID NO: 9154 - DNA, 20 bp, Artificial Sequence
  Antisense compound
acctttcgcatgtaccatgt

SEQ ID NO: 9155 - DNA, 20 bp, Artificial Sequence
  Antisense compound
gacctttcgcatgtaccatg

SEQ ID NO: 9156 - DNA, 20 bp, Artificial Sequence
  Antisense compound
tgacctttcgcatgtaccat

SEQ ID NO: 9157 - DNA, 20 bp, Artificial Sequence
  Antisense compound
ctgacctttcgcatgtacca

SEQ ID NO: 9158 - DNA, 20 bp, Artificial Sequence
  Antisense compound
tctgacctttcgcatgtacc

SEQ ID NO: 9159 - DNA, 20 bp, Artificial Sequence
  Antisense compound
ttctgacctttcgcatgtac

SEQ ID NO: 9160 - DNA, 20 bp, Artificial Sequence
  Antisense compound
cttctgacctttcgcatgta

SEQ ID NO: 9161 - DNA, 20 bp, Artificial Sequence
  Antisense compound
acttctgacctttcgcatgt

SEQ ID NO: 9162 - DNA, 20 bp, Artificial Sequence
  Antisense compound
tacttctgacctttcgcatg

SEQ ID NO: 9163 - DNA, 20 bp, Artificial Sequence
  Antisense compound
ctacttctgacctttcgcat

SEQ ID NO: 9164 - DNA, 20 bp, Artificial Sequence
  Antisense compound
cctacttctgacctttcgca

SEQ ID NO: 9165 - DNA, 20 bp, Artificial Sequence
  Antisense compound
acctacttctgacctttcgc

SEQ ID NO: 9166 - DNA, 20 bp, Artificial Sequence
  Antisense compound
tacctacttctgacctttcg

SEQ ID NO: 9167 - DNA, 20 bp, Artificial Sequence
  Antisense compound
atacctacttctgacctttc

SEQ ID NO: 9168 - DNA, 20 bp, Artificial Sequence
  Antisense compound
aatacctacttctgaccttt

SEQ ID NO: 9169 - DNA, 20 bp, Artificial Sequence
  Antisense compound
aaatacctacttctgacctt

SEQ ID NO: 9170 - DNA, 20 bp, Artificial Sequence
  Antisense compound
caaatacctacttctgacct

SEQ ID NO: 9171 - DNA, 20 bp, Artificial Sequence
  Antisense compound
gcaaatacctacttctgacc

SEQ ID NO: 9172 - DNA, 20 bp, Artificial Sequence
  Antisense compound
ggcaaatacctacttctgac

SEQ ID NO: 9173 - DNA, 20 bp, Artificial Sequence
  Antisense compound
aggcaaatacctacttctga

SEQ ID NO: 9174 - DNA, 20 bp, Artificial Sequence
  Antisense compound
taggcaaatacctacttctg

SEQ ID NO: 9175 - DNA, 20 bp, Artificial Sequence
  Antisense compound
ataggcaaatacctacttct

SEQ ID NO: 9176 - DNA, 20 bp, Artificial Sequence
  Antisense compound
gataggcaaatacctacttc

SEQ ID NO: 9177 - DNA, 20 bp, Artificial Sequence
  Antisense compound
agataggcaaatacctactt

SEQ ID NO: 9178 - DNA, 20 bp, Artificial Sequence
  Antisense compound
tagataggcaaatacctact

SEQ ID NO: 9179 - DNA, 20 bp, Artificial Sequence
  Antisense compound
gtagataggcaaatacctac

SEQ ID NO: 9180 - DNA, 20 bp, Artificial Sequence
  Antisense compound
ggtagataggcaaataccta

SEQ ID NO: 9181 - DNA, 20 bp, Artificial Sequence
  Antisense compound
tggtagataggcaaatacct

SEQ ID NO: 9182 - DNA, 20 bp, Artificial Sequence
  Antisense compound
ctggtagataggcaaatacc

SEQ ID NO: 9183 - DNA, 20 bp, Artificial Sequence
  Antisense compound
actggtagataggcaaatac

SEQ ID NO: 9184 - DNA, 20 bp, Artificial Sequence
  Antisense compound
cactggtagataggcaaata

SEQ ID NO: 9185 - DNA, 20 bp, Artificial Sequence
  Antisense compound
ccactggtagataggcaaat

SEQ ID NO: 9186 - DNA, 20 bp, Artificial Sequence
  Antisense compound
accactggtagataggcaaa

SEQ ID NO: 9187 - DNA, 20 bp, Artificial Sequence
  Antisense compound
taccactggtagataggcaa

SEQ ID NO: 9188 - DNA, 20 bp, Artificial Sequence
  Antisense compound
ctaccactggtagataggca

SEQ ID NO: 9189 - DNA, 20 bp, Artificial Sequence
  Antisense compound
tctaccactggtagataggc

SEQ ID NO: 9190 - DNA, 20 bp, Artificial Sequence
  Antisense compound
atctaccactggtagatagg

SEQ ID NO: 9191 - DNA, 20 bp, Artificial Sequence
  Antisense compound
catctaccactggtagatag

SEQ ID NO: 9192 - DNA, 20 bp, Artificial Sequence
  Antisense compound
ccatctaccactggtagata

SEQ ID NO: 9193 - DNA, 20 bp, Artificial Sequence
  Antisense compound
cccatctaccactggtagat

SEQ ID NO: 9194 - DNA, 20 bp, Artificial Sequence
  Antisense compound
acccatctaccactggtaga

SEQ ID NO: 9195 - DNA, 20 bp, Artificial Sequence
  Antisense compound
aacccatctaccactggtag

SEQ ID NO: 9196 - DNA, 20 bp, Artificial Sequence
  Antisense compound
gaacccatctaccactggta

SEQ ID NO: 9197 - DNA, 20 bp, Artificial Sequence
  Antisense compound
agaacccatctaccactggt

SEQ ID NO: 9198 - DNA, 20 bp, Artificial Sequence
  Antisense compound
aagaacccatctaccactgg

SEQ ID NO: 9199 - DNA, 20 bp, Artificial Sequence
  Antisense compound
taagaacccatctaccactg

SEQ ID NO: 9200 - DNA, 20 bp, Artificial Sequence
  Antisense compound
ttaagaacccatctaccact

SEQ ID NO: 9201 - DNA, 20 bp, Artificial Sequence
  Antisense compound
attaagaacccatctaccac

SEQ ID NO: 9202 - DNA, 20 bp, Artificial Sequence
  Antisense compound
tattaagaacccatctacca

SEQ ID NO: 9203 - DNA, 20 bp, Artificial Sequence
  Antisense compound
ttattaagaacccatctacc

SEQ ID NO: 9204 - DNA, 20 bp, Artificial Sequence
  Antisense compound
attattaagaacccatctac

SEQ ID NO: 9205 - DNA, 20 bp, Artificial Sequence
  Antisense compound
cattattaagaacccatcta

SEQ ID NO: 9206 - DNA, 20 bp, Artificial Sequence
  Antisense compound
tcattattaagaacccatct

SEQ ID NO: 9207 - DNA, 20 bp, Artificial Sequence
  Antisense compound
ctcattattaagaacccatc

SEQ ID NO: 9208 - DNA, 20 bp, Artificial Sequence
  Antisense compound
gctcattattaagaacccat

SEQ ID NO: 9209 - DNA, 20 bp, Artificial Sequence
  Antisense compound
tgctcattattaagaaccca

SEQ ID NO: 9210 - DNA, 20 bp, Artificial Sequence
  Antisense compound
atgctcattattaagaaccc

SEQ ID NO: 9211 - DNA, 20 bp, Artificial Sequence
  Antisense compound
aatgctcattattaagaacc

SEQ ID NO: 9212 - DNA, 20 bp, Artificial Sequence
  Antisense compound
taatgctcattattaagaac

SEQ ID NO: 9213 - DNA, 20 bp, Artificial Sequence
  Antisense compound
gtaatgctcattattaagaa

SEQ ID NO: 9214 - DNA, 20 bp, Artificial Sequence
  Antisense compound
tgtaatgctcattattaaga

SEQ ID NO: 9215 - DNA, 20 bp, Artificial Sequence
  Antisense compound
ctgtaatgctcattattaag

SEQ ID NO: 9216 - DNA, 20 bp, Artificial Sequence
  Antisense compound
tctgtaatgctcattattaa

SEQ ID NO: 9217 - DNA, 20 bp, Artificial Sequence
  Antisense compound
ctctgtaatgctcattatta

SEQ ID NO: 9218 - DNA, 20 bp, Artificial Sequence
  Antisense compound
gctctgtaatgctcattatt

SEQ ID NO: 9219 - DNA, 20 bp, Artificial Sequence
  Antisense compound
agctctgtaatgctcattat

SEQ ID NO: 9220 - DNA, 20 bp, Artificial Sequence
  Antisense compound
gagctctgtaatgctcatta

SEQ ID NO: 9221 - DNA, 20 bp, Artificial Sequence
  Antisense compound
agagctctgtaatgctcatt

SEQ ID NO: 9222 - DNA, 20 bp, Artificial Sequence
  Antisense compound
tagagctctgtaatgctcat

SEQ ID NO: 9223 - DNA, 20 bp, Artificial Sequence
  Antisense compound
atagagctctgtaatgctca

SEQ ID NO: 9224 - DNA, 20 bp, Artificial Sequence
  Antisense compound
gatagagctctgtaatgctc

SEQ ID NO: 9225 - DNA, 20 bp, Artificial Sequence
  Antisense compound
tgatagagctctgtaatgct

SEQ ID NO: 9226 - DNA, 20 bp, Artificial Sequence
  Antisense compound
ctgatagagctctgtaatgc

SEQ ID NO: 9227 - DNA, 20 bp, Artificial Sequence
  Antisense compound
cctgatagagctctgtaatg

SEQ ID NO: 9228 - DNA, 20 bp, Artificial Sequence
  Antisense compound
tcctgatagagctctgtaat

SEQ ID NO: 9229 - DNA, 20 bp, Artificial Sequence
  Antisense compound
ctcctgatagagctctgtaa

SEQ ID NO: 9230 - DNA, 20 bp, Artificial Sequence
  Antisense compound
actcctgatagagctctgta

SEQ ID NO: 9231 - DNA, 20 bp, Artificial Sequence
  Antisense compound
aactcctgatagagctctgt

SEQ ID NO: 9232 - DNA, 20 bp, Artificial Sequence
  Antisense compound
aaactcctgatagagctctg

SEQ ID NO: 9233 - DNA, 20 bp, Artificial Sequence
  Antisense compound
aaaactcctgatagagctct

SEQ ID NO: 9234 - DNA, 20 bp, Artificial Sequence
  Antisense compound
gaaaactcctgatagagctc

SEQ ID NO: 9235 - DNA, 20 bp, Artificial Sequence
  Antisense compound
agaaaactcctgatagagct

SEQ ID NO: 9236 - DNA, 20 bp, Artificial Sequence
  Antisense compound
cagaaaactcctgatagagc

SEQ ID NO: 9237 - DNA, 20 bp, Artificial Sequence
  Antisense compound
acagaaaactcctgatagag

SEQ ID NO: 9238 - DNA, 20 bp, Artificial Sequence
  Antisense compound
cacagaaaactcctgataga

SEQ ID NO: 9239 - DNA, 20 bp, Artificial Sequence
  Antisense compound
ccacagaaaactcctgatag

SEQ ID NO: 9240 - DNA, 20 bp, Artificial Sequence
  Antisense compound
accacagaaaactcctgata

SEQ ID NO: 9241 - DNA, 20 bp, Artificial Sequence
  Antisense compound
caccacagaaaactcctgat

SEQ ID NO: 9242 - DNA, 20 bp, Artificial Sequence
  Antisense compound
acaccacagaaaactcctga

SEQ ID NO: 9243 - DNA, 20 bp, Artificial Sequence
  Antisense compound
aacaccacagaaaactcctg

SEQ ID NO: 9244 - DNA, 20 bp, Artificial Sequence
  Antisense compound
caacaccacagaaaactcct

SEQ ID NO: 9245 - DNA, 20 bp, Artificial Sequence
  Antisense compound
tcaacaccacagaaaactcc

SEQ ID NO: 9246 - DNA, 20 bp, Artificial Sequence
  Antisense compound
atcaacaccacagaaaactc

SEQ ID NO: 9247 - DNA, 20 bp, Artificial Sequence
  Antisense compound
catcaacaccacagaaaact

SEQ ID NO: 9248 - DNA, 20 bp, Artificial Sequence
  Antisense compound
gcatcaacaccacagaaaac

SEQ ID NO: 9249 - DNA, 20 bp, Artificial Sequence
  Antisense compound
cgcatcaacaccacagaaaa

SEQ ID NO: 9250 - DNA, 20 bp, Artificial Sequence
  Antisense compound
tcgcatcaacaccacagaaa

SEQ ID NO: 9251 - DNA, 20 bp, Artificial Sequence
  Antisense compound
atcgcatcaacaccacagaa

SEQ ID NO: 9252 - DNA, 20 bp, Artificial Sequence
  Antisense compound
catcgcatcaacaccacaga

SEQ ID NO: 9253 - DNA, 20 bp, Artificial Sequence
  Antisense compound
tcatcgcatcaacaccacag

SEQ ID NO: 9254 - DNA, 20 bp, Artificial Sequence
  Antisense compound
ttcatcgcatcaacaccaca

SEQ ID NO: 9255 - DNA, 20 bp, Artificial Sequence
  Antisense compound
attcatcgcatcaacaccac

SEQ ID NO: 9256 - DNA, 20 bp, Artificial Sequence
  Antisense compound
gattcatcgcatcaacacca

SEQ ID NO: 9257 - DNA, 20 bp, Artificial Sequence
  Antisense compound
agattcatcgcatcaacacc

SEQ ID NO: 9258 - DNA, 20 bp, Artificial Sequence
  Antisense compound
gagattcatcgcatcaacac

SEQ ID NO: 9259 - DNA, 20 bp, Artificial Sequence
  Antisense compound
tgagattcatcgcatcaaca

SEQ ID NO: 9260 - DNA, 20 bp, Artificial Sequence
  Antisense compound
atgagattcatcgcatcaac

SEQ ID NO: 9261 - DNA, 20 bp, Artificial Sequence
  Antisense compound
tatgagattcatcgcatcaa

SEQ ID NO: 9262 - DNA, 20 bp, Artificial Sequence
  Antisense compound
ctatgagattcatcgcatca

SEQ ID NO: 9263 - DNA, 20 bp, Artificial Sequence
  Antisense compound
gctatgagattcatcgcatc

SEQ ID NO: 9264 - DNA, 20 bp, Artificial Sequence
  Antisense compound
agctatgagattcatcgcat

SEQ ID NO: 9265 - DNA, 20 bp, Artificial Sequence
  Antisense compound
tagctatgagattcatcgca

SEQ ID NO: 9266 - DNA, 20 bp, Artificial Sequence
  Antisense compound
ttagctatgagattcatcgc

SEQ ID NO: 9267 - DNA, 20 bp, Artificial Sequence
  Antisense compound
gttagctatgagattcatcg

SEQ ID NO: 9268 - DNA, 20 bp, Artificial Sequence
  Antisense compound
tgttagctatgagattcatc

SEQ ID NO: 9269 - DNA, 20 bp, Artificial Sequence
  Antisense compound
atgttagctatgagattcat

SEQ ID NO: 9270 - DNA, 20 bp, Artificial Sequence
  Antisense compound
gatgttagctatgagattca

SEQ ID NO: 9271 - DNA, 20 bp, Artificial Sequence
  Antisense compound
agatgttagctatgagattc

SEQ ID NO: 9272 - DNA, 20 bp, Artificial Sequence
  Antisense compound
aagatgttagctatgagatt

SEQ ID NO: 9273 - DNA, 20 bp, Artificial Sequence
  Antisense compound
aaagatgttagctatgagat

SEQ ID NO: 9274 - DNA, 20 bp, Artificial Sequence
  Antisense compound
taaagatgttagctatgaga

SEQ ID NO: 9275 - DNA, 20 bp, Artificial Sequence
  Antisense compound
gtaaagatgttagctatgag

SEQ ID NO: 9276 - DNA, 20 bp, Artificial Sequence
  Antisense compound
agtaaagatgttagctatga

SEQ ID NO: 9277 - DNA, 20 bp, Artificial Sequence
  Antisense compound
gagtaaagatgttagctatg

SEQ ID NO: 9278 - DNA, 20 bp, Artificial Sequence
  Antisense compound
ggagtaaagatgttagctat

SEQ ID NO: 9279 - DNA, 20 bp, Artificial Sequence
  Antisense compound
aggagtaaagatgttagcta

SEQ ID NO: 9280 - DNA, 20 bp, Artificial Sequence
  Antisense compound
gaggagtaaagatgttagct

SEQ ID NO: 9281 - DNA, 20 bp, Artificial Sequence
  Antisense compound
agaggagtaaagatgttagc

SEQ ID NO: 9282 - DNA, 20 bp, Artificial Sequence
  Antisense compound
aagaggagtaaagatgttag

SEQ ID NO: 9283 - DNA, 20 bp, Artificial Sequence
  Antisense compound
caagaggagtaaagatgtta

SEQ ID NO: 9284 - DNA, 20 bp, Artificial Sequence
  Antisense compound
acaagaggagtaaagatgtt

SEQ ID NO: 9285 - DNA, 20 bp, Artificial Sequence
  Antisense compound
cacaagaggagtaaagatgt

SEQ ID NO: 9286 - DNA, 20 bp, Artificial Sequence
  Antisense compound
gcacaagaggagtaaagatg

SEQ ID NO: 9287 - DNA, 20 bp, Artificial Sequence
  Antisense compound
tgcacaagaggagtaaagat

SEQ ID NO: 9288 - DNA, 20 bp, Artificial Sequence
  Antisense compound
ttgcacaagaggagtaaaga

SEQ ID NO: 9289 - DNA, 20 bp, Artificial Sequence
  Antisense compound
gttgcacaagaggagtaaag

SEQ ID NO: 9290 - DNA, 20 bp, Artificial Sequence
  Antisense compound
ggttgcacaagaggagtaaa

SEQ ID NO: 9291 - DNA, 20 bp, Artificial Sequence
  Antisense compound
aggttgcacaagaggagtaa

SEQ ID NO: 9292 - DNA, 20 bp, Artificial Sequence
  Antisense compound
caggttgcacaagaggagta

SEQ ID NO: 9293 - DNA, 20 bp, Artificial Sequence
  Antisense compound
acaggttgcacaagaggagt

SEQ ID NO: 9294 - DNA, 20 bp, Artificial Sequence
  Antisense compound
cacaggttgcacaagaggag

SEQ ID NO: 9295 - DNA, 20 bp, Artificial Sequence
  Antisense compound
ccacaggttgcacaagagga

SEQ ID NO: 9296 - DNA, 20 bp, Artificial Sequence
  Antisense compound
cccacaggttgcacaagagg

SEQ ID NO: 9297 - DNA, 20 bp, Artificial Sequence
  Antisense compound
acccacaggttgcacaagag

SEQ ID NO: 9298 - DNA, 20 bp, Artificial Sequence
  Antisense compound
cacccacaggttgcacaaga

SEQ ID NO: 9299 - DNA, 20 bp, Artificial Sequence
  Antisense compound
gcacccacaggttgcacaag

SEQ ID NO: 9300 - DNA, 20 bp, Artificial Sequence
  Antisense compound
agcacccacaggttgcacaa

SEQ ID NO: 9301 - DNA, 20 bp, Artificial Sequence
  Antisense compound
aagcacccacaggttgcaca

SEQ ID NO: 9302 - DNA, 20 bp, Artificial Sequence
  Antisense compound
aaagcacccacaggttgcac

SEQ ID NO: 9303 - DNA, 20 bp, Artificial Sequence
  Antisense compound
taaagcacccacaggttgca

SEQ ID NO: 9304 - DNA, 20 bp, Artificial Sequence
  Antisense compound
ctaaagcacccacaggttgc

SEQ ID NO: 9305 - DNA, 20 bp, Artificial Sequence
  Antisense compound
tctaaagcacccacaggttg

SEQ ID NO: 9306 - DNA, 20 bp, Artificial Sequence
  Antisense compound
atctaaagcacccacaggtt

SEQ ID NO: 9307 - DNA, 20 bp, Artificial Sequence
  Antisense compound
catctaaagcacccacaggt

SEQ ID NO: 9308 - DNA, 20 bp, Artificial Sequence
  Antisense compound
acatctaaagcacccacagg

SEQ ID NO: 9309 - DNA, 20 bp, Artificial Sequence
  Antisense compound
cacatctaaagcacccacag

SEQ ID NO: 9310 - DNA, 20 bp, Artificial Sequence
  Antisense compound
acacatctaaagcacccaca

SEQ ID NO: 9311 - DNA, 20 bp, Artificial Sequence
  Antisense compound
gacacatctaaagcacccac

SEQ ID NO: 9312 - DNA, 20 bp, Artificial Sequence
  Antisense compound
agacacatctaaagcaccca

SEQ ID NO: 9313 - DNA, 20 bp, Artificial Sequence
  Antisense compound
cagacacatctaaagcaccc

SEQ ID NO: 9314 - DNA, 20 bp, Artificial Sequence
  Antisense compound
gcagacacatctaaagcacc

SEQ ID NO: 9315 - DNA, 20 bp, Artificial Sequence
  Antisense compound
agcagacacatctaaagcac

SEQ ID NO: 9316 - DNA, 20 bp, Artificial Sequence
  Antisense compound
aagcagacacatctaaagca

SEQ ID NO: 9317 - DNA, 20 bp, Artificial Sequence
  Antisense compound
gaagcagacacatctaaagc

SEQ ID NO: 9318 - DNA, 20 bp, Artificial Sequence
  Antisense compound
tgaagcagacacatctaaag

SEQ ID NO: 9319 - DNA, 20 bp, Artificial Sequence
  Antisense compound
ctgaagcagacacatctaaa

SEQ ID NO: 9320 - DNA, 20 bp, Artificial Sequence
  Antisense compound
actgaagcagacacatctaa

SEQ ID NO: 9321 - DNA, 20 bp, Artificial Sequence
  Antisense compound
tactgaagcagacacatcta

SEQ ID NO: 9322 - DNA, 20 bp, Artificial Sequence
  Antisense compound
ctactgaagcagacacatct

SEQ ID NO: 9323 - DNA, 20 bp, Artificial Sequence
  Antisense compound
actactgaagcagacacatc

SEQ ID NO: 9324 - DNA, 20 bp, Artificial Sequence
  Antisense compound
cactactgaagcagacacat

SEQ ID NO: 9325 - DNA, 20 bp, Artificial Sequence
  Antisense compound
ccactactgaagcagacaca

SEQ ID NO: 9326 - DNA, 20 bp, Artificial Sequence
  Antisense compound
gccactactgaagcagacac

SEQ ID NO: 9327 - DNA, 20 bp, Artificial Sequence
  Antisense compound
agccactactgaagcagaca

SEQ ID NO: 9328 - DNA, 20 bp, Artificial Sequence
  Antisense compound
cagccactactgaagcagac

SEQ ID NO: 9329 - DNA, 20 bp, Artificial Sequence
  Antisense compound
ccagccactactgaagcaga

SEQ ID NO: 9330 - DNA, 20 bp, Artificial Sequence
  Antisense compound
accagccactactgaagcag

SEQ ID NO: 9331 - DNA, 20 bp, Artificial Sequence
  Antisense compound
caccagccactactgaagca

SEQ ID NO: 9332 - DNA, 20 bp, Artificial Sequence
  Antisense compound
ccaccagccactactgaagc

SEQ ID NO: 9333 - DNA, 20 bp, Artificial Sequence
  Antisense compound
accaccagccactactgaag

SEQ ID NO: 9334 - DNA, 20 bp, Artificial Sequence
  Antisense compound
taccaccagccactactgaa

SEQ ID NO: 9335 - DNA, 20 bp, Artificial Sequence
  Antisense compound
ataccaccagccactactga

SEQ ID NO: 9336 - DNA, 20 bp, Artificial Sequence
  Antisense compound
aataccaccagccactactg

SEQ ID NO: 9337 - DNA, 20 bp, Artificial Sequence
  Antisense compound
taataccaccagccactact

SEQ ID NO: 9338 - DNA, 20 bp, Artificial Sequence
  Antisense compound
ataataccaccagccactac

SEQ ID NO: 9339 - DNA, 20 bp, Artificial Sequence
  Antisense compound
aataataccaccagccacta

SEQ ID NO: 9340 - DNA, 20 bp, Artificial Sequence
  Antisense compound
caataataccaccagccact

SEQ ID NO: 9341 - DNA, 20 bp, Artificial Sequence
  Antisense compound
gcaataataccaccagccac

SEQ ID NO: 9342 - DNA, 20 bp, Artificial Sequence
  Antisense compound
ggcaataataccaccagcca

SEQ ID NO: 9343 - DNA, 20 bp, Artificial Sequence
  Antisense compound
tggcaataataccaccagcc

SEQ ID NO: 9344 - DNA, 20 bp, Artificial Sequence
  Antisense compound
atggcaataataccaccagc

SEQ ID NO: 9345 - DNA, 20 bp, Artificial Sequence
  Antisense compound
tatggcaataataccaccag

SEQ ID NO: 9346 - DNA, 20 bp, Artificial Sequence
  Antisense compound
atatggcaataataccacca

SEQ ID NO: 9347 - DNA, 20 bp, Artificial Sequence
  Antisense compound
aatatggcaataataccacc

SEQ ID NO: 9348 - DNA, 20 bp, Artificial Sequence
  Antisense compound
caatatggcaataataccac

SEQ ID NO: 9349 - DNA, 20 bp, Artificial Sequence
  Antisense compound
ccaatatggcaataatacca

SEQ ID NO: 9350 - DNA, 20 bp, Artificial Sequence
  Antisense compound
accaatatggcaataatacc

SEQ ID NO: 9351 - DNA, 20 bp, Artificial Sequence
  Antisense compound
caccaatatggcaataatac

SEQ ID NO: 9352 - DNA, 20 bp, Artificial Sequence
  Antisense compound
tcaccaatatggcaataata

SEQ ID NO: 9353 - DNA, 20 bp, Artificial Sequence
  Antisense compound
gtcaccaatatggcaataat

SEQ ID NO: 9354 - DNA, 20 bp, Artificial Sequence
  Antisense compound
agtcaccaatatggcaataa

SEQ ID NO: 9355 - DNA, 20 bp, Artificial Sequence
  Antisense compound
aagtcaccaatatggcaata

SEQ ID NO: 9356 - DNA, 20 bp, Artificial Sequence
  Antisense compound
caagtcaccaatatggcaat

SEQ ID NO: 9357 - DNA, 20 bp, Artificial Sequence
  Antisense compound
acaagtcaccaatatggcaa

SEQ ID NO: 9358 - DNA, 20 bp, Artificial Sequence
  Antisense compound
cacaagtcaccaatatggca

SEQ ID NO: 9359 - DNA, 20 bp, Artificial Sequence
  Antisense compound
gcacaagtcaccaatatggc

SEQ ID NO: 9360 - DNA, 20 bp, Artificial Sequence
  Antisense compound
agcacaagtcaccaatatgg

SEQ ID NO: 9361 - DNA, 20 bp, Artificial Sequence
  Antisense compound
cagcacaagtcaccaatatg

SEQ ID NO: 9362 - DNA, 20 bp, Artificial Sequence
  Antisense compound
gcagcacaagtcaccaatat

SEQ ID NO: 9363 - DNA, 20 bp, Artificial Sequence
  Antisense compound
ggcagcacaagtcaccaata

SEQ ID NO: 9364 - DNA, 20 bp, Artificial Sequence
  Antisense compound
aggcagcacaagtcaccaat

SEQ ID NO: 9365 - DNA, 20 bp, Artificial Sequence
  Antisense compound
taggcagcacaagtcaccaa

SEQ ID NO: 9366 - DNA, 20 bp, Artificial Sequence
  Antisense compound
gtaggcagcacaagtcacca

SEQ ID NO: 9367 - DNA, 20 bp, Artificial Sequence
  Antisense compound
agtaggcagcacaagtcacc

SEQ ID NO: 9368 - DNA, 20 bp, Artificial Sequence
  Antisense compound
tagtaggcagcacaagtcac

SEQ ID NO: 9369 - DNA, 20 bp, Artificial Sequence
  Antisense compound
gtagtaggcagcacaagtca

SEQ ID NO: 9370 - DNA, 20 bp, Artificial Sequence
  Antisense compound
agtagtaggcagcacaagtc

SEQ ID NO: 9371 - DNA, 20 bp, Artificial Sequence
  Antisense compound
aagtagtaggcagcacaagt

SEQ ID NO: 9372 - DNA, 20 bp, Artificial Sequence
  Antisense compound
aaagtagtaggcagcacaag

SEQ ID NO: 9373 - DNA, 20 bp, Artificial Sequence
  Antisense compound
taaagtagtaggcagcacaa

SEQ ID NO: 9374 - DNA, 20 bp, Artificial Sequence
  Antisense compound
ataaagtagtaggcagcaca

SEQ ID NO: 9375 - DNA, 20 bp, Artificial Sequence
  Antisense compound
cataaagtagtaggcagcac

SEQ ID NO: 9376 - DNA, 20 bp, Artificial Sequence
  Antisense compound
tcataaagtagtaggcagca

SEQ ID NO: 9377 - DNA, 20 bp, Artificial Sequence
  Antisense compound
ttcataaagtagtaggcagc

SEQ ID NO: 9378 - DNA, 20 bp, Artificial Sequence
  Antisense compound
tttcataaagtagtaggcag

SEQ ID NO: 9379 - DNA, 20 bp, Artificial Sequence
  Antisense compound
atttcataaagtagtaggca

SEQ ID NO: 9380 - DNA, 20 bp, Artificial Sequence
  Antisense compound
aatttcataaagtagtaggc

SEQ ID NO: 9381 - DNA, 20 bp, Artificial Sequence
  Antisense compound
gaatttcataaagtagtagg

SEQ ID NO: 9382 - DNA, 20 bp, Artificial Sequence
  Antisense compound
tgaatttcataaagtagtag

SEQ ID NO: 9383 - DNA, 20 bp, Artificial Sequence
  Antisense compound
ctgaatttcataaagtagta

SEQ ID NO: 9384 - DNA, 20 bp, Artificial Sequence
  Antisense compound
tctgaatttcataaagtagt

SEQ ID NO: 9385 - DNA, 20 bp, Artificial Sequence
  Antisense compound
gtctgaatttcataaagtag

SEQ ID NO: 9386 - DNA, 20 bp, Artificial Sequence
  Antisense compound
cgtctgaatttcataaagta

SEQ ID NO: 9387 - DNA, 20 bp, Artificial Sequence
  Antisense compound
acgtctgaatttcataaagt

SEQ ID NO: 9388 - DNA, 20 bp, Artificial Sequence
  Antisense compound
cacgtctgaatttcataaag

SEQ ID NO: 9389 - DNA, 20 bp, Artificial Sequence
  Antisense compound
acacgtctgaatttcataaa

SEQ ID NO: 9390 - DNA, 20 bp, Artificial Sequence
  Antisense compound
aacacgtctgaatttcataa

SEQ ID NO: 9391 - DNA, 20 bp, Artificial Sequence
  Antisense compound
aaacacgtctgaatttcata

SEQ ID NO: 9392 - DNA, 20 bp, Artificial Sequence
  Antisense compound
aaaacacgtctgaatttcat

SEQ ID NO: 9393 - DNA, 20 bp, Artificial Sequence
  Antisense compound
aaaaacacgtctgaatttca

SEQ ID NO: 9394 - DNA, 20 bp, Artificial Sequence
  Antisense compound
caaaaacacgtctgaatttc

SEQ ID NO: 9395 - DNA, 20 bp, Artificial Sequence
  Antisense compound
ccaaaaacacgtctgaattt

SEQ ID NO: 9396 - DNA, 20 bp, Artificial Sequence
  Antisense compound
accaaaaacacgtctgaatt

SEQ ID NO: 9397 - DNA, 20 bp, Artificial Sequence
  Antisense compound
caccaaaaacacgtctgaat

SEQ ID NO: 9398 - DNA, 20 bp, Artificial Sequence
  Antisense compound
tcaccaaaaacacgtctgaa

SEQ ID NO: 9399 - DNA, 20 bp, Artificial Sequence
  Antisense compound
ctcaccaaaaacacgtctga

SEQ ID NO: 9400 - DNA, 20 bp, Artificial Sequence
  Antisense compound
actcaccaaaaacacgtctg

SEQ ID NO: 9401 - DNA, 20 bp, Artificial Sequence
  Antisense compound
tactcaccaaaaacacgtct

SEQ ID NO: 9402 - DNA, 20 bp, Artificial Sequence
  Antisense compound
gtactcaccaaaaacacgtc

SEQ ID NO: 9403 - DNA, 20 bp, Artificial Sequence
  Antisense compound
tgtactcaccaaaaacacgt

SEQ ID NO: 9404 - DNA, 20 bp, Artificial Sequence
  Antisense compound
ttgtactcaccaaaaacacg

SEQ ID NO: 9405 - DNA, 20 bp, Artificial Sequence
  Antisense compound
gttgtactcaccaaaaacac

SEQ ID NO: 9406 - DNA, 20 bp, Artificial Sequence
  Antisense compound
ggttgtactcaccaaaaaca

SEQ ID NO: 9407 - DNA, 20 bp, Artificial Sequence
  Antisense compound
tggttgtactcaccaaaaac

SEQ ID NO: 9408 - DNA, 20 bp, Artificial Sequence
  Antisense compound
atggttgtactcaccaaaaa

SEQ ID NO: 9409 - DNA, 20 bp, Artificial Sequence
  Antisense compound
catggttgtactcaccaaaa

SEQ ID NO: 9410 - DNA, 20 bp, Artificial Sequence
  Antisense compound
acatggttgtactcaccaaa

SEQ ID NO: 9411 - DNA, 20 bp, Artificial Sequence
  Antisense compound
aacatggttgtactcaccaa

SEQ ID NO: 9412 - DNA, 20 bp, Artificial Sequence
  Antisense compound
caacatggttgtactcacca

SEQ ID NO: 9413 - DNA, 20 bp, Artificial Sequence
  Antisense compound
acaacatggttgtactcacc

SEQ ID NO: 9414 - DNA, 20 bp, Artificial Sequence
  Antisense compound
aacaacatggttgtactcac

SEQ ID NO: 9415 - DNA, 20 bp, Artificial Sequence
  Antisense compound
caacaacatggttgtactca

SEQ ID NO: 9416 - DNA, 20 bp, Artificial Sequence
  Antisense compound
gcaacaacatggttgtactc

SEQ ID NO: 9417 - DNA, 20 bp, Artificial Sequence
  Antisense compound
agcaacaacatggttgtact

SEQ ID NO: 9418 - DNA, 20 bp, Artificial Sequence
  Antisense compound
cagcaacaacatggttgtac

SEQ ID NO: 9419 - DNA, 20 bp, Artificial Sequence
  Antisense compound
gcagcaacaacatggttgta

SEQ ID NO: 9420 - DNA, 20 bp, Artificial Sequence
  Antisense compound
agcagcaacaacatggttgt

SEQ ID NO: 9421 - DNA, 20 bp, Artificial Sequence
  Antisense compound
tagcagcaacaacatggttg

SEQ ID NO: 9422 - DNA, 20 bp, Artificial Sequence
  Antisense compound
ttagcagcaacaacatggtt

SEQ ID NO: 9423 - DNA, 20 bp, Artificial Sequence
  Antisense compound
attagcagcaacaacatggt

SEQ ID NO: 9424 - DNA, 20 bp, Artificial Sequence
  Antisense compound
cattagcagcaacaacatgg

SEQ ID NO: 9425 - DNA, 20 bp, Artificial Sequence
  Antisense compound
gcattagcagcaacaacatg

SEQ ID NO: 9426 - DNA, 20 bp, Artificial Sequence
  Antisense compound
tgcattagcagcaacaacat

SEQ ID NO: 9427 - DNA, 20 bp, Artificial Sequence
  Antisense compound
gtgcattagcagcaacaaca

SEQ ID NO: 9428 - DNA, 20 bp, Artificial Sequence
  Antisense compound
agtgcattagcagcaacaac

SEQ ID NO: 9429 - DNA, 20 bp, Artificial Sequence
  Antisense compound
aagtgcattagcagcaacaa

SEQ ID NO: 9430 - DNA, 20 bp, Artificial Sequence
  Antisense compound
aaagtgcattagcagcaaca

SEQ ID NO: 9431 - DNA, 20 bp, Artificial Sequence
  Antisense compound
aaaagtgcattagcagcaac

SEQ ID NO: 9432 - DNA, 20 bp, Artificial Sequence
  Antisense compound
caaaagtgcattagcagcaa

SEQ ID NO: 9433 - DNA, 20 bp, Artificial Sequence
  Antisense compound
acaaaagtgcattagcagca

SEQ ID NO: 9434 - DNA, 20 bp, Artificial Sequence
  Antisense compound
aacaaaagtgcattagcagc

SEQ ID NO: 9435 - DNA, 20 bp, Artificial Sequence
  Antisense compound
aaacaaaagtgcattagcag

SEQ ID NO: 9436 - DNA, 20 bp, Artificial Sequence
  Antisense compound
aaaacaaaagtgcattagca

SEQ ID NO: 9437 - DNA, 20 bp, Artificial Sequence
  Antisense compound
aaaaacaaaagtgcattagc

SEQ ID NO: 9438 - DNA, 20 bp, Artificial Sequence
  Antisense compound
caaaaacaaaagtgcattag

SEQ ID NO: 9439 - DNA, 20 bp, Artificial Sequence
  Antisense compound
tcaaaaacaaaagtgcatta

SEQ ID NO: 9440 - DNA, 20 bp, Artificial Sequence
  Antisense compound
atcaaaaacaaaagtgcatt

SEQ ID NO: 9441 - DNA, 20 bp, Artificial Sequence
  Antisense compound
catcaaaaacaaaagtgcat

SEQ ID NO: 9442 - DNA, 20 bp, Artificial Sequence
  Antisense compound
acatcaaaaacaaaagtgca

SEQ ID NO: 9443 - DNA, 20 bp, Artificial Sequence
  Antisense compound
gacatcaaaaacaaaagtgc

SEQ ID NO: 9444 - DNA, 20 bp, Artificial Sequence
  Antisense compound
agacatcaaaaacaaaagtg

SEQ ID NO: 9445 - DNA, 20 bp, Artificial Sequence
  Antisense compound
aagacatcaaaaacaaaagt

SEQ ID NO: 9446 - DNA, 20 bp, Artificial Sequence
  Antisense compound
aaagacatcaaaaacaaaag

SEQ ID NO: 9447 - DNA, 20 bp, Artificial Sequence
  Antisense compound
gaaagacatcaaaaacaaaa

SEQ ID NO: 9448 - DNA, 20 bp, Artificial Sequence
  Antisense compound
tgaaagacatcaaaaacaaa

SEQ ID NO: 9449 - DNA, 20 bp, Artificial Sequence
  Antisense compound
gtgaaagacatcaaaaacaa

SEQ ID NO: 9450 - DNA, 20 bp, Artificial Sequence
  Antisense compound
agtgaaagacatcaaaaaca

SEQ ID NO: 9451 - DNA, 20 bp, Artificial Sequence
  Antisense compound
tagtgaaagacatcaaaaac

SEQ ID NO: 9452 - DNA, 20 bp, Artificial Sequence
  Antisense compound
atagtgaaagacatcaaaaa

SEQ ID NO: 9453 - DNA, 20 bp, Artificial Sequence
  Antisense compound
tatagtgaaagacatcaaaa

SEQ ID NO: 9454 - DNA, 20 bp, Artificial Sequence
  Antisense compound
gtatagtgaaagacatcaaa

SEQ ID NO: 9455 - DNA, 20 bp, Artificial Sequence
  Antisense compound
agtatagtgaaagacatcaa

SEQ ID NO: 9456 - DNA, 20 bp, Artificial Sequence
  Antisense compound
gagtatagtgaaagacatca

SEQ ID NO: 9457 - DNA, 20 bp, Artificial Sequence
  Antisense compound
agagtatagtgaaagacatc

SEQ ID NO: 9458 - DNA, 20 bp, Artificial Sequence
  Antisense compound
cagagtatagtgaaagacat

SEQ ID NO: 9459 - DNA, 20 bp, Artificial Sequence
  Antisense compound
acagagtatagtgaaagaca

SEQ ID NO: 9460 - DNA, 20 bp, Artificial Sequence
  Antisense compound
gacagagtatagtgaaagac

SEQ ID NO: 9461 - DNA, 20 bp, Artificial Sequence
  Antisense compound
agacagagtatagtgaaaga

SEQ ID NO: 9462 - DNA, 20 bp, Artificial Sequence
  Antisense compound
cagacagagtatagtgaaag

SEQ ID NO: 9463 - DNA, 20 bp, Artificial Sequence
  Antisense compound
ccagacagagtatagtgaaa

SEQ ID NO: 9464 - DNA, 20 bp, Artificial Sequence
  Antisense compound
accagacagagtatagtgaa

SEQ ID NO: 9465 - DNA, 20 bp, Artificial Sequence
  Antisense compound
taccagacagagtatagtga

SEQ ID NO: 9466 - DNA, 20 bp, Artificial Sequence
  Antisense compound
gtaccagacagagtatagtg

SEQ ID NO: 9467 - DNA, 20 bp, Artificial Sequence
  Antisense compound
ggtaccagacagagtatagt

SEQ ID NO: 9468 - DNA, 20 bp, Artificial Sequence
  Antisense compound
tggtaccagacagagtatag

SEQ ID NO: 9469 - DNA, 20 bp, Artificial Sequence
  Antisense compound
ctggtaccagacagagtata

SEQ ID NO: 9470 - DNA, 20 bp, Artificial Sequence
  Antisense compound
gctggtaccagacagagtat

SEQ ID NO: 9471 - DNA, 20 bp, Artificial Sequence
  Antisense compound
agctggtaccagacagagta

SEQ ID NO: 9472 - DNA, 20 bp, Artificial Sequence
  Antisense compound
aagctggtaccagacagagt

SEQ ID NO: 9473 - DNA, 20 bp, Artificial Sequence
  Antisense compound
taagctggtaccagacagag

SEQ ID NO: 9474 - DNA, 20 bp, Artificial Sequence
  Antisense compound
gtaagctggtaccagacaga

SEQ ID NO: 9475 - DNA, 20 bp, Artificial Sequence
  Antisense compound
tgtaagctggtaccagacag

SEQ ID NO: 9476 - DNA, 20 bp, Artificial Sequence
  Antisense compound
ctgtaagctggtaccagaca

SEQ ID NO: 9477 - DNA, 20 bp, Artificial Sequence
  Antisense compound
gctgtaagctggtaccagac

SEQ ID NO: 9478 - DNA, 20 bp, Artificial Sequence
  Antisense compound
agctgtaagctggtaccaga

SEQ ID NO: 9479 - DNA, 20 bp, Artificial Sequence
  Antisense compound
aagctgtaagctggtaccag

SEQ ID NO: 9480 - DNA, 20 bp, Artificial Sequence
  Antisense compound
aaagctgtaagctggtacca

SEQ ID NO: 9481 - DNA, 20 bp, Artificial Sequence
  Antisense compound
gaaagctgtaagctggtacc

SEQ ID NO: 9482 - DNA, 20 bp, Artificial Sequence
  Antisense compound
agaaagctgtaagctggtac

SEQ ID NO: 9483 - DNA, 20 bp, Artificial Sequence
  Antisense compound
cagaaagctgtaagctggta

SEQ ID NO: 9484 - DNA, 20 bp, Artificial Sequence
  Antisense compound
gcagaaagctgtaagctggt

SEQ ID NO: 9485 - DNA, 20 bp, Artificial Sequence
  Antisense compound
ggcagaaagctgtaagctgg

SEQ ID NO: 9486 - DNA, 20 bp, Artificial Sequence
  Antisense compound
cggcagaaagctgtaagctg

SEQ ID NO: 9487 - DNA, 20 bp, Artificial Sequence
  Antisense compound
ccggcagaaagctgtaagct

SEQ ID NO: 9488 - DNA, 20 bp, Artificial Sequence
  Antisense compound
cccggcagaaagctgtaagc

SEQ ID NO: 9489 - DNA, 20 bp, Artificial Sequence
  Antisense compound
tcccggcagaaagctgtaag

SEQ ID NO: 9490 - DNA, 20 bp, Artificial Sequence
  Antisense compound
ctcccggcagaaagctgtaa

SEQ ID NO: 9491 - DNA, 20 bp, Artificial Sequence
  Antisense compound
actcccggcagaaagctgta

SEQ ID NO: 9492 - DNA, 20 bp, Artificial Sequence
  Antisense compound
gactcccggcagaaagctgt

SEQ ID NO: 9493 - DNA, 20 bp, Artificial Sequence
  Antisense compound
agactcccggcagaaagctg

SEQ ID NO: 9494 - DNA, 20 bp, Artificial Sequence
  Antisense compound
tagactcccggcagaaagct

SEQ ID NO: 9495 - DNA, 20 bp, Artificial Sequence
  Antisense compound
gtagactcccggcagaaagc

SEQ ID NO: 9496 - DNA, 20 bp, Artificial Sequence
  Antisense compound
agtagactcccggcagaaag

SEQ ID NO: 9497 - DNA, 20 bp, Artificial Sequence
  Antisense compound
gagtagactcccggcagaaa

SEQ ID NO: 9498 - DNA, 20 bp, Artificial Sequence
  Antisense compound
tgagtagactcccggcagaa

SEQ ID NO: 9499 - DNA, 20 bp, Artificial Sequence
  Antisense compound
ctgagtagactcccggcaga

SEQ ID NO: 9500 - DNA, 20 bp, Artificial Sequence
  Antisense compound
actgagtagactcccggcag

SEQ ID NO: 9501 - DNA, 20 bp, Artificial Sequence
  Antisense compound
gactgagtagactcccggca

SEQ ID NO: 9502 - DNA, 20 bp, Artificial Sequence
  Antisense compound
agactgagtagactcccggc

SEQ ID NO: 9503 - DNA, 20 bp, Artificial Sequence
  Antisense compound
aagactgagtagactcccgg

SEQ ID NO: 9504 - DNA, 20 bp, Artificial Sequence
  Antisense compound
aaagactgagtagactcccg

SEQ ID NO: 9505 - DNA, 20 bp, Artificial Sequence
  Antisense compound
aaaagactgagtagactccc

SEQ ID NO: 9506 - DNA, 20 bp, Artificial Sequence
  Antisense compound
taaaagactgagtagactcc

SEQ ID NO: 9507 - DNA, 20 bp, Artificial Sequence
  Antisense compound
gtaaaagactgagtagactc

SEQ ID NO: 9508 - DNA, 20 bp, Artificial Sequence
  Antisense compound
agtaaaagactgagtagact

SEQ ID NO: 9509 - DNA, 20 bp, Artificial Sequence
  Antisense compound
aagtaaaagactgagtagac

SEQ ID NO: 9510 - DNA, 20 bp, Artificial Sequence
  Antisense compound
caagtaaaagactgagtaga

SEQ ID NO: 9511 - DNA, 20 bp, Artificial Sequence
  Antisense compound
acaagtaaaagactgagtag

SEQ ID NO: 9512 - DNA, 20 bp, Artificial Sequence
  Antisense compound
tacaagtaaaagactgagta

SEQ ID NO: 9513 - DNA, 20 bp, Artificial Sequence
  Antisense compound
gtacaagtaaaagactgagt

SEQ ID NO: 9514 - DNA, 20 bp, Artificial Sequence
  Antisense compound
agtacaagtaaaagactgag

SEQ ID NO: 9515 - DNA, 20 bp, Artificial Sequence
  Antisense compound
aagtacaagtaaaagactga

SEQ ID NO: 9516 - DNA, 20 bp, Artificial Sequence
  Antisense compound
caagtacaagtaaaagactg

SEQ ID NO: 9517 - DNA, 20 bp, Artificial Sequence
  Antisense compound
tcaagtacaagtaaaagact

SEQ ID NO: 9518 - DNA, 20 bp, Artificial Sequence
  Antisense compound
gtcaagtacaagtaaaagac

SEQ ID NO: 9519 - DNA, 20 bp, Artificial Sequence
  Antisense compound
tgtcaagtacaagtaaaaga

SEQ ID NO: 9520 - DNA, 20 bp, Artificial Sequence
  Antisense compound
atgtcaagtacaagtaaaag

SEQ ID NO: 9521 - DNA, 20 bp, Artificial Sequence
  Antisense compound
aatgtcaagtacaagtaaaa

SEQ ID NO: 9522 - DNA, 20 bp, Artificial Sequence
  Antisense compound
gaatgtcaagtacaagtaaa

SEQ ID NO: 9523 - DNA, 20 bp, Artificial Sequence
  Antisense compound
agaatgtcaagtacaagtaa

SEQ ID NO: 9524 - DNA, 20 bp, Artificial Sequence
  Antisense compound
tagaatgtcaagtacaagta

SEQ ID NO: 9525 - DNA, 20 bp, Artificial Sequence
  Antisense compound
atagaatgtcaagtacaagt

SEQ ID NO: 9526 - DNA, 20 bp, Artificial Sequence
  Antisense compound
aatagaatgtcaagtacaag

SEQ ID NO: 9527 - DNA, 20 bp, Artificial Sequence
  Antisense compound
aaatagaatgtcaagtacaa

SEQ ID NO: 9528 - DNA, 20 bp, Artificial Sequence
  Antisense compound
gaaatagaatgtcaagtaca

SEQ ID NO: 9529 - DNA, 20 bp, Artificial Sequence
  Antisense compound
tgaaatagaatgtcaagtac

SEQ ID NO: 9530 - DNA, 20 bp, Artificial Sequence
  Antisense compound
gtgaaatagaatgtcaagta

SEQ ID NO: 9531 - DNA, 20 bp, Artificial Sequence
  Antisense compound
ggtgaaatagaatgtcaagt

SEQ ID NO: 9532 - DNA, 20 bp, Artificial Sequence
  Antisense compound
tggtgaaatagaatgtcaag

SEQ ID NO: 9533 - DNA, 20 bp, Artificial Sequence
  Antisense compound
ttggtgaaatagaatgtcaa

SEQ ID NO: 9534 - DNA, 20 bp, Artificial Sequence
  Antisense compound
attggtgaaatagaatgtca

SEQ ID NO: 9535 - DNA, 20 bp, Artificial Sequence
  Antisense compound
cattggtgaaatagaatgtc

SEQ ID NO: 9536 - DNA, 20 bp, Artificial Sequence
  Antisense compound
tcattggtgaaatagaatgt

SEQ ID NO: 9537 - DNA, 20 bp, Artificial Sequence
  Antisense compound
atcattggtgaaatagaatg

SEQ ID NO: 9538 - DNA, 20 bp, Artificial Sequence
  Antisense compound
catcattggtgaaatagaat

SEQ ID NO: 9539 - DNA, 20 bp, Artificial Sequence
  Antisense compound
acatcattggtgaaatagaa

SEQ ID NO: 9540 - DNA, 20 bp, Artificial Sequence
  Antisense compound
aacatcattggtgaaataga

SEQ ID NO: 9541 - DNA, 20 bp, Artificial Sequence
  Antisense compound
aaacatcattggtgaaatag

SEQ ID NO: 9542 - DNA, 20 bp, Artificial Sequence
  Antisense compound
gaaacatcattggtgaaata

SEQ ID NO: 9543 - DNA, 20 bp, Artificial Sequence
  Antisense compound
tgaaacatcattggtgaaat

SEQ ID NO: 9544 - DNA, 20 bp, Artificial Sequence
  Antisense compound
atgaaacatcattggtgaaa

SEQ ID NO: 9545 - DNA, 20 bp, Artificial Sequence
  Antisense compound
aatgaaacatcattggtgaa

SEQ ID NO: 9546 - DNA, 20 bp, Artificial Sequence
  Antisense compound
gaatgaaacatcattggtga

SEQ ID NO: 9547 - DNA, 20 bp, Artificial Sequence
  Antisense compound
agaatgaaacatcattggtg

SEQ ID NO: 9548 - DNA, 20 bp, Artificial Sequence
  Antisense compound
aagaatgaaacatcattggt

SEQ ID NO: 9549 - DNA, 20 bp, Artificial Sequence
  Antisense compound
caagaatgaaacatcattgg

SEQ ID NO: 9550 - DNA, 20 bp, Artificial Sequence
  Antisense compound
ccaagaatgaaacatcattg

SEQ ID NO: 9551 - DNA, 20 bp, Artificial Sequence
  Antisense compound
gccaagaatgaaacatcatt

SEQ ID NO: 9552 - DNA, 20 bp, Artificial Sequence
  Antisense compound
agccaagaatgaaacatcat

SEQ ID NO: 9553 - DNA, 20 bp, Artificial Sequence
  Antisense compound
gagccaagaatgaaacatca

SEQ ID NO: 9554 - DNA, 20 bp, Artificial Sequence
  Antisense compound
tgagccaagaatgaaacatc

SEQ ID NO: 9555 - DNA, 20 bp, Artificial Sequence
  Antisense compound
gtgagccaagaatgaaacat

SEQ ID NO: 9556 - DNA, 20 bp, Artificial Sequence
  Antisense compound
ggtgagccaagaatgaaaca

SEQ ID NO: 9557 - DNA, 20 bp, Artificial Sequence
  Antisense compound
aggtgagccaagaatgaaac

SEQ ID NO: 9558 - DNA, 20 bp, Artificial Sequence
  Antisense compound
aaggtgagccaagaatgaaa

SEQ ID NO: 9559 - DNA, 20 bp, Artificial Sequence
  Antisense compound
gaaggtgagccaagaatgaa

SEQ ID NO: 9560 - DNA, 20 bp, Artificial Sequence
  Antisense compound
tgaaggtgagccaagaatga

SEQ ID NO: 9561 - DNA, 20 bp, Artificial Sequence
  Antisense compound
ttgaaggtgagccaagaatg

SEQ ID NO: 9562 - DNA, 20 bp, Artificial Sequence
  Antisense compound
attgaaggtgagccaagaat

SEQ ID NO: 9563 - DNA, 20 bp, Artificial Sequence
  Antisense compound
cattgaaggtgagccaagaa

SEQ ID NO: 9564 - DNA, 20 bp, Artificial Sequence
  Antisense compound
ccattgaaggtgagccaaga

SEQ ID NO: 9565 - DNA, 20 bp, Artificial Sequence
  Antisense compound
accattgaaggtgagccaag

SEQ ID NO: 9566 - DNA, 20 bp, Artificial Sequence
  Antisense compound
aaccattgaaggtgagccaa

SEQ ID NO: 9567 - DNA, 20 bp, Artificial Sequence
  Antisense compound
aaaccattgaaggtgagcca

SEQ ID NO: 9568 - DNA, 20 bp, Artificial Sequence
  Antisense compound
caaaccattgaaggtgagcc

SEQ ID NO: 9569 - DNA, 20 bp, Artificial Sequence
  Antisense compound
gcaaaccattgaaggtgagc

SEQ ID NO: 9570 - DNA, 20 bp, Artificial Sequence
  Antisense compound
ggcaaaccattgaaggtgag

SEQ ID NO: 9571 - DNA, 20 bp, Artificial Sequence
  Antisense compound
tggcaaaccattgaaggtga

SEQ ID NO: 9572 - DNA, 20 bp, Artificial Sequence
  Antisense compound
atggcaaaccattgaaggtg

SEQ ID NO: 9573 - DNA, 20 bp, Artificial Sequence
  Antisense compound
catggcaaaccattgaaggt

SEQ ID NO: 9574 - DNA, 20 bp, Artificial Sequence
  Antisense compound
acatggcaaaccattgaagg

SEQ ID NO: 9575 - DNA, 20 bp, Artificial Sequence
  Antisense compound
aacatggcaaaccattgaag

SEQ ID NO: 9576 - DNA, 20 bp, Artificial Sequence
  Antisense compound
aaacatggcaaaccattgaa

SEQ ID NO: 9577 - DNA, 20 bp, Artificial Sequence
  Antisense compound
aaaacatggcaaaccattga

SEQ ID NO: 9578 - DNA, 20 bp, Artificial Sequence
  Antisense compound
gaaaacatggcaaaccattg

SEQ ID NO: 9579 - DNA, 20 bp, Artificial Sequence
  Antisense compound
agaaaacatggcaaaccatt

SEQ ID NO: 9580 - DNA, 20 bp, Artificial Sequence
  Antisense compound
gagaaaacatggcaaaccat

SEQ ID NO: 9581 - DNA, 20 bp, Artificial Sequence
  Antisense compound
ggagaaaacatggcaaacca

SEQ ID NO: 9582 - DNA, 20 bp, Artificial Sequence
  Antisense compound
aggagaaaacatggcaaacc

SEQ ID NO: 9583 - DNA, 20 bp, Artificial Sequence
  Antisense compound
taggagaaaacatggcaaac

SEQ ID NO: 9584 - DNA, 20 bp, Artificial Sequence
  Antisense compound
ataggagaaaacatggcaaa

SEQ ID NO: 9585 - DNA, 20 bp, Artificial Sequence
  Antisense compound
aataggagaaaacatggcaa

SEQ ID NO: 9586 - DNA, 20 bp, Artificial Sequence
  Antisense compound
caataggagaaaacatggca

SEQ ID NO: 9587 - DNA, 20 bp, Artificial Sequence
  Antisense compound
acaataggagaaaacatggc

SEQ ID NO: 9588 - DNA, 20 bp, Artificial Sequence
  Antisense compound
cacaataggagaaaacatgg

SEQ ID NO: 9589 - DNA, 20 bp, Artificial Sequence
  Antisense compound
gcacaataggagaaaacatg

SEQ ID NO: 9590 - DNA, 20 bp, Artificial Sequence
  Antisense compound
ggcacaataggagaaaacat

SEQ ID NO: 9591 - DNA, 20 bp, Artificial Sequence
  Antisense compound
aggcacaataggagaaaaca

SEQ ID NO: 9592 - DNA, 20 bp, Artificial Sequence
  Antisense compound
aaggcacaataggagaaaac

SEQ ID NO: 9593 - DNA, 20 bp, Artificial Sequence
  Antisense compound
aaaggcacaataggagaaaa

SEQ ID NO: 9594 - DNA, 20 bp, Artificial Sequence
  Antisense compound
aaaaggcacaataggagaaa

SEQ ID NO: 9595 - DNA, 20 bp, Artificial Sequence
  Antisense compound
aaaaaggcacaataggagaa

SEQ ID NO: 9596 - DNA, 20 bp, Artificial Sequence
  Antisense compound
caaaaaggcacaataggaga

SEQ ID NO: 9597 - DNA, 20 bp, Artificial Sequence
  Antisense compound
ccaaaaaggcacaataggag

SEQ ID NO: 9598 - DNA, 20 bp, Artificial Sequence
  Antisense compound
tccaaaaaggcacaatagga

SEQ ID NO: 9599 - DNA, 20 bp, Artificial Sequence
  Antisense compound
atccaaaaaggcacaatagg

SEQ ID NO: 9600 - DNA, 20 bp, Artificial Sequence
  Antisense compound
tatccaaaaaggcacaatag

SEQ ID NO: 9601 - DNA, 20 bp, Artificial Sequence
  Antisense compound
ttatccaaaaaggcacaata

SEQ ID NO: 9602 - DNA, 20 bp, Artificial Sequence
  Antisense compound
gttatccaaaaaggcacaat

SEQ ID NO: 9603 - DNA, 20 bp, Artificial Sequence
  Antisense compound
tgttatccaaaaaggcacaa

SEQ ID NO: 9604 - DNA, 20 bp, Artificial Sequence
  Antisense compound
ctgttatccaaaaaggcaca

SEQ ID NO: 9605 - DNA, 20 bp, Artificial Sequence
  Antisense compound
gctgttatccaaaaaggcac

SEQ ID NO: 9606 - DNA, 20 bp, Artificial Sequence
  Antisense compound
tgctgttatccaaaaaggca

SEQ ID NO: 9607 - DNA, 20 bp, Artificial Sequence
  Antisense compound
ttgctgttatccaaaaaggc

SEQ ID NO: 9608 - DNA, 20 bp, Artificial Sequence
  Antisense compound
attgctgttatccaaaaagg

SEQ ID NO: 9609 - DNA, 20 bp, Artificial Sequence
  Antisense compound
gattgctgttatccaaaaag

SEQ ID NO: 9610 - DNA, 20 bp, Artificial Sequence
  Antisense compound
agattgctgttatccaaaaa

SEQ ID NO: 9611 - DNA, 20 bp, Artificial Sequence
  Antisense compound
tagattgctgttatccaaaa

SEQ ID NO: 9612 - DNA, 20 bp, Artificial Sequence
  Antisense compound
atagattgctgttatccaaa

SEQ ID NO: 9613 - DNA, 20 bp, Artificial Sequence
  Antisense compound
catagattgctgttatccaa

SEQ ID NO: 9614 - DNA, 20 bp, Artificial Sequence
  Antisense compound
acatagattgctgttatcca

SEQ ID NO: 9615 - DNA, 20 bp, Artificial Sequence
  Antisense compound
tacatagattgctgttatcc

SEQ ID NO: 9616 - DNA, 20 bp, Artificial Sequence
  Antisense compound
atacatagattgctgttatc

SEQ ID NO: 9617 - DNA, 20 bp, Artificial Sequence
  Antisense compound
aatacatagattgctgttat

SEQ ID NO: 9618 - DNA, 20 bp, Artificial Sequence
  Antisense compound
gaatacatagattgctgtta

SEQ ID NO: 9619 - DNA, 20 bp, Artificial Sequence
  Antisense compound
agaatacatagattgctgtt

SEQ ID NO: 9620 - DNA, 20 bp, Artificial Sequence
  Antisense compound
cagaatacatagattgctgt

SEQ ID NO: 9621 - DNA, 20 bp, Artificial Sequence
  Antisense compound
acagaatacatagattgctg

SEQ ID NO: 9622 - DNA, 20 bp, Artificial Sequence
  Antisense compound
tacagaatacatagattgct

SEQ ID NO: 9623 - DNA, 20 bp, Artificial Sequence
  Antisense compound
atacagaatacatagattgc

SEQ ID NO: 9624 - DNA, 20 bp, Artificial Sequence
  Antisense compound
aatacagaatacatagattg

SEQ ID NO: 9625 - DNA, 20 bp, Artificial Sequence
  Antisense compound
aaatacagaatacatagatt

SEQ ID NO: 9626 - DNA, 20 bp, Artificial Sequence
  Antisense compound
gaaatacagaatacatagat

SEQ ID NO: 9627 - DNA, 20 bp, Artificial Sequence
  Antisense compound
agaaatacagaatacataga

SEQ ID NO: 9628 - DNA, 20 bp, Artificial Sequence
  Antisense compound
gagaaatacagaatacatag

SEQ ID NO: 9629 - DNA, 20 bp, Artificial Sequence
  Antisense compound
agagaaatacagaatacata

SEQ ID NO: 9630 - DNA, 20 bp, Artificial Sequence
  Antisense compound
cagagaaatacagaatacat

SEQ ID NO: 9631 - DNA, 20 bp, Artificial Sequence
  Antisense compound
tcagagaaatacagaataca

SEQ ID NO: 9632 - DNA, 20 bp, Artificial Sequence
  Antisense compound
ttcagagaaatacagaatac

SEQ ID NO: 9633 - DNA, 20 bp, Artificial Sequence
  Antisense compound
cttcagagaaatacagaata

SEQ ID NO: 9634 - DNA, 20 bp, Artificial Sequence
  Antisense compound
gcttcagagaaatacagaat

SEQ ID NO: 9635 - DNA, 20 bp, Artificial Sequence
  Antisense compound
tgcttcagagaaatacagaa

SEQ ID NO: 9636 - DNA, 20 bp, Artificial Sequence
  Antisense compound
gtgcttcagagaaatacaga

SEQ ID NO: 9637 - DNA, 20 bp, Artificial Sequence
  Antisense compound
agtgcttcagagaaatacag

SEQ ID NO: 9638 - DNA, 20 bp, Artificial Sequence
  Antisense compound
cagtgcttcagagaaataca

SEQ ID NO: 9639 - DNA, 20 bp, Artificial Sequence
  Antisense compound
gcagtgcttcagagaaatac

SEQ ID NO: 9640 - DNA, 20 bp, Artificial Sequence
  Antisense compound
ggcagtgcttcagagaaata

SEQ ID NO: 9641 - DNA, 20 bp, Artificial Sequence
  Antisense compound
tggcagtgcttcagagaaat

SEQ ID NO: 9642 - DNA, 20 bp, Artificial Sequence
  Antisense compound
atggcagtgcttcagagaaa

SEQ ID NO: 9643 - DNA, 20 bp, Artificial Sequence
  Antisense compound
aatggcagtgcttcagagaa

SEQ ID NO: 9644 - DNA, 20 bp, Artificial Sequence
  Antisense compound
caatggcagtgcttcagaga

SEQ ID NO: 9645 - DNA, 20 bp, Artificial Sequence
  Antisense compound
ccaatggcagtgcttcagag

SEQ ID NO: 9646 - DNA, 20 bp, Artificial Sequence
  Antisense compound
accaatggcagtgcttcaga

SEQ ID NO: 9647 - DNA, 20 bp, Artificial Sequence
  Antisense compound
aaccaatggcagtgcttcag

SEQ ID NO: 9648 - DNA, 20 bp, Artificial Sequence
  Antisense compound
gaaccaatggcagtgcttca

SEQ ID NO: 9649 - DNA, 20 bp, Artificial Sequence
  Antisense compound
agaaccaatggcagtgcttc

SEQ ID NO: 9650 - DNA, 20 bp, Artificial Sequence
  Antisense compound
aagaaccaatggcagtgctt

SEQ ID NO: 9651 - DNA, 20 bp, Artificial Sequence
  Antisense compound
aaagaaccaatggcagtgct

SEQ ID NO: 9652 - DNA, 20 bp, Artificial Sequence
  Antisense compound
taaagaaccaatggcagtgc

SEQ ID NO: 9653 - DNA, 20 bp, Artificial Sequence
  Antisense compound
ttaaagaaccaatggcagtg

SEQ ID NO: 9654 - DNA, 20 bp, Artificial Sequence
  Antisense compound
gttaaagaaccaatggcagt

SEQ ID NO: 9655 - DNA, 20 bp, Artificial Sequence
  Antisense compound
tgttaaagaaccaatggcag

SEQ ID NO: 9656 - DNA, 20 bp, Artificial Sequence
  Antisense compound
ttgttaaagaaccaatggca

SEQ ID NO: 9657 - DNA, 20 bp, Artificial Sequence
  Antisense compound
gttgttaaagaaccaatggc

SEQ ID NO: 9658 - DNA, 20 bp, Artificial Sequence
  Antisense compound
agttgttaaagaaccaatgg

SEQ ID NO: 9659 - DNA, 20 bp, Artificial Sequence
  Antisense compound
tagttgttaaagaaccaatg

SEQ ID NO: 9660 - DNA, 20 bp, Artificial Sequence
  Antisense compound
atagttgttaaagaaccaat

SEQ ID NO: 9661 - DNA, 20 bp, Artificial Sequence
  Antisense compound
gatagttgttaaagaaccaa

SEQ ID NO: 9662 - DNA, 20 bp, Artificial Sequence
  Antisense compound
agatagttgttaaagaacca

SEQ ID NO: 9663 - DNA, 20 bp, Artificial Sequence
  Antisense compound
aagatagttgttaaagaacc

SEQ ID NO: 9664 - DNA, 20 bp, Artificial Sequence
  Antisense compound
taagatagttgttaaagaac

SEQ ID NO: 9665 - DNA, 20 bp, Artificial Sequence
  Antisense compound
ctaagatagttgttaaagaa

SEQ ID NO: 9666 - DNA, 20 bp, Artificial Sequence
  Antisense compound
cctaagatagttgttaaaga

SEQ ID NO: 9667 - DNA, 20 bp, Artificial Sequence
  Antisense compound
tcctaagatagttgttaaag

SEQ ID NO: 9668 - DNA, 20 bp, Artificial Sequence
  Antisense compound
ttcctaagatagttgttaaa

SEQ ID NO: 9669 - DNA, 20 bp, Artificial Sequence
  Antisense compound
tttcctaagatagttgttaa

SEQ ID NO: 9670 - DNA, 20 bp, Artificial Sequence
  Antisense compound
ttttcctaagatagttgtta

SEQ ID NO: 9671 - DNA, 20 bp, Artificial Sequence
  Antisense compound
cttttcctaagatagttgtt

SEQ ID NO: 9672 - DNA, 20 bp, Artificial Sequence
  Antisense compound
tcttttcctaagatagttgt

SEQ ID NO: 9673 - DNA, 20 bp, Artificial Sequence
  Antisense compound
ctcttttcctaagatagttg

SEQ ID NO: 9674 - DNA, 20 bp, Artificial Sequence
  Antisense compound
actcttttcctaagatagtt

SEQ ID NO: 9675 - DNA, 20 bp, Artificial Sequence
  Antisense compound
gactcttttcctaagatagt

SEQ ID NO: 9676 - DNA, 20 bp, Artificial Sequence
  Antisense compound
tgactcttttcctaagatag

SEQ ID NO: 9677 - DNA, 20 bp, Artificial Sequence
  Antisense compound
atgactcttttcctaagata

SEQ ID NO: 9678 - DNA, 20 bp, Artificial Sequence
  Antisense compound
catgactcttttcctaagat

SEQ ID NO: 9679 - DNA, 20 bp, Artificial Sequence
  Antisense compound
acatgactcttttcctaaga

SEQ ID NO: 9680 - DNA, 20 bp, Artificial Sequence
  Antisense compound
aacatgactcttttcctaag

SEQ ID NO: 9681 - DNA, 20 bp, Artificial Sequence
  Antisense compound
aaacatgactcttttcctaa

SEQ ID NO: 9682 - DNA, 20 bp, Artificial Sequence
  Antisense compound
taaacatgactcttttccta

SEQ ID NO: 9683 - DNA, 20 bp, Artificial Sequence
  Antisense compound
ttaaacatgactcttttcct

SEQ ID NO: 9684 - DNA, 20 bp, Artificial Sequence
  Antisense compound
attaaacatgactcttttcc

SEQ ID NO: 9685 - DNA, 20 bp, Artificial Sequence
  Antisense compound
cattaaacatgactcttttc

SEQ ID NO: 9686 - DNA, 20 bp, Artificial Sequence
  Antisense compound
ccattaaacatgactctttt

SEQ ID NO: 9687 - DNA, 20 bp, Artificial Sequence
  Antisense compound
tccattaaacatgactcttt

SEQ ID NO: 9688 - DNA, 20 bp, Artificial Sequence
  Antisense compound
ctccattaaacatgactctt

SEQ ID NO: 9689 - DNA, 20 bp, Artificial Sequence
  Antisense compound
actccattaaacatgactct

SEQ ID NO: 9690 - DNA, 20 bp, Artificial Sequence
  Antisense compound
aactccattaaacatgactc

SEQ ID NO: 9691 - DNA, 20 bp, Artificial Sequence
  Antisense compound
taactccattaaacatgact

SEQ ID NO: 9692 - DNA, 20 bp, Artificial Sequence
  Antisense compound
gtaactccattaaacatgac

SEQ ID NO: 9693 - DNA, 20 bp, Artificial Sequence
  Antisense compound
tgtaactccattaaacatga

SEQ ID NO: 9694 - DNA, 20 bp, Artificial Sequence
  Antisense compound
atgtaactccattaaacatg

SEQ ID NO: 9695 - DNA, 20 bp, Artificial Sequence
  Antisense compound
aatgtaactccattaaacat

SEQ ID NO: 9696 - DNA, 20 bp, Artificial Sequence
  Antisense compound
aaatgtaactccattaaaca

SEQ ID NO: 9697 - DNA, 20 bp, Artificial Sequence
  Antisense compound
taaatgtaactccattaaac

SEQ ID NO: 9698 - DNA, 20 bp, Artificial Sequence
  Antisense compound
ctaaatgtaactccattaaa

SEQ ID NO: 9699 - DNA, 20 bp, Artificial Sequence
  Antisense compound
actaaatgtaactccattaa

SEQ ID NO: 9700 - DNA, 20 bp, Artificial Sequence
  Antisense compound
tactaaatgtaactccatta

SEQ ID NO: 9701 - DNA, 20 bp, Artificial Sequence
  Antisense compound
gtactaaatgtaactccatt

SEQ ID NO: 9702 - DNA, 20 bp, Artificial Sequence
  Antisense compound
ggtactaaatgtaactccat

SEQ ID NO: 9703 - DNA, 20 bp, Artificial Sequence
  Antisense compound
aggtactaaatgtaactcca

SEQ ID NO: 9704 - DNA, 20 bp, Artificial Sequence
  Antisense compound
aaggtactaaatgtaactcc

SEQ ID NO: 9705 - DNA, 20 bp, Artificial Sequence
  Antisense compound
gaaggtactaaatgtaactc

SEQ ID NO: 9706 - DNA, 20 bp, Artificial Sequence
  Antisense compound
cgaaggtactaaatgtaact

SEQ ID NO: 9707 - DNA, 20 bp, Artificial Sequence
  Antisense compound
tcgaaggtactaaatgtaac

SEQ ID NO: 9708 - DNA, 20 bp, Artificial Sequence
  Antisense compound
ctcgaaggtactaaatgtaa

SEQ ID NO: 9709 - DNA, 20 bp, Artificial Sequence
  Antisense compound
cctcgaaggtactaaatgta

SEQ ID NO: 9710 - DNA, 20 bp, Artificial Sequence
  Antisense compound
tcctcgaaggtactaaatgt

SEQ ID NO: 9711 - DNA, 20 bp, Artificial Sequence
  Antisense compound
ctcctcgaaggtactaaatg

SEQ ID NO: 9712 - DNA, 20 bp, Artificial Sequence
  Antisense compound
cctcctcgaaggtactaaat

SEQ ID NO: 9713 - DNA, 20 bp, Artificial Sequence
  Antisense compound
gcctcctcgaaggtactaaa

SEQ ID NO: 9714 - DNA, 20 bp, Artificial Sequence
  Antisense compound
agcctcctcgaaggtactaa

SEQ ID NO: 9715 - DNA, 20 bp, Artificial Sequence
  Antisense compound
cagcctcctcgaaggtacta

SEQ ID NO: 9716 - DNA, 20 bp, Artificial Sequence
  Antisense compound
gcagcctcctcgaaggtact

SEQ ID NO: 9717 - DNA, 20 bp, Artificial Sequence
  Antisense compound
agcagcctcctcgaaggtac

SEQ ID NO: 9718 - DNA, 20 bp, Artificial Sequence
  Antisense compound
aagcagcctcctcgaaggta

SEQ ID NO: 9719 - DNA, 20 bp, Artificial Sequence
  Antisense compound
aaagcagcctcctcgaaggt

SEQ ID NO: 9720 - DNA, 20 bp, Artificial Sequence
  Antisense compound
caaagcagcctcctcgaagg

SEQ ID NO: 9721 - DNA, 20 bp, Artificial Sequence
  Antisense compound
acaaagcagcctcctcgaag

SEQ ID NO: 9722 - DNA, 20 bp, Artificial Sequence
  Antisense compound
cacaaagcagcctcctcgaa

SEQ ID NO: 9723 - DNA, 20 bp, Artificial Sequence
  Antisense compound
acacaaagcagcctcctcga

SEQ ID NO: 9724 - DNA, 20 bp, Artificial Sequence
  Antisense compound
tacacaaagcagcctcctcg

SEQ ID NO: 9725 - DNA, 20 bp, Artificial Sequence
  Antisense compound
gtacacaaagcagcctcctc

SEQ ID NO: 9726 - DNA, 20 bp, Artificial Sequence
  Antisense compound
ggtacacaaagcagcctcct

SEQ ID NO: 9727 - DNA, 20 bp, Artificial Sequence
  Antisense compound
aggtacacaaagcagcctcc

SEQ ID NO: 9728 - DNA, 20 bp, Artificial Sequence
  Antisense compound
aaggtacacaaagcagcctc

SEQ ID NO: 9729 - DNA, 20 bp, Artificial Sequence
  Antisense compound
aaaggtacacaaagcagcct

SEQ ID NO: 9730 - DNA, 20 bp, Artificial Sequence
  Antisense compound
aaaaggtacacaaagcagcc

SEQ ID NO: 9731 - DNA, 20 bp, Artificial Sequence
  Antisense compound
aaaaaggtacacaaagcagc

SEQ ID NO: 9732 - DNA, 20 bp, Artificial Sequence
  Antisense compound
caaaaaggtacacaaagcag

SEQ ID NO: 9733 - DNA, 20 bp, Artificial Sequence
  Antisense compound
gcaaaaaggtacacaaagca

SEQ ID NO: 9734 - DNA, 20 bp, Artificial Sequence
  Antisense compound
agcaaaaaggtacacaaagc

SEQ ID NO: 9735 - DNA, 20 bp, Artificial Sequence
  Antisense compound
gagcaaaaaggtacacaaag

SEQ ID NO: 9736 - DNA, 20 bp, Artificial Sequence
  Antisense compound
tgagcaaaaaggtacacaaa

SEQ ID NO: 9737 - DNA, 20 bp, Artificial Sequence
  Antisense compound
ttgagcaaaaaggtacacaa

SEQ ID NO: 9738 - DNA, 20 bp, Artificial Sequence
  Antisense compound
gttgagcaaaaaggtacaca

SEQ ID NO: 9739 - DNA, 20 bp, Artificial Sequence
  Antisense compound
tgttgagcaaaaaggtacac

SEQ ID NO: 9740 - DNA, 20 bp, Artificial Sequence
  Antisense compound
ttgttgagcaaaaaggtaca

SEQ ID NO: 9741 - DNA, 20 bp, Artificial Sequence
  Antisense compound
cttgttgagcaaaaaggtac

SEQ ID NO: 9742 - DNA, 20 bp, Artificial Sequence
  Antisense compound
ccttgttgagcaaaaaggta

SEQ ID NO: 9743 - DNA, 20 bp, Artificial Sequence
  Antisense compound
tccttgttgagcaaaaaggt

SEQ ID NO: 9744 - DNA, 20 bp, Artificial Sequence
  Antisense compound
ttccttgttgagcaaaaagg

SEQ ID NO: 9745 - DNA, 20 bp, Artificial Sequence
  Antisense compound
tttccttgttgagcaaaaag

SEQ ID NO: 9746 - DNA, 20 bp, Artificial Sequence
  Antisense compound
atttccttgttgagcaaaaa

SEQ ID NO: 9747 - DNA, 20 bp, Artificial Sequence
  Antisense compound
catttccttgttgagcaaaa

SEQ ID NO: 9748 - DNA, 20 bp, Artificial Sequence
  Antisense compound
acatttccttgttgagcaaa

SEQ ID NO: 9749 - DNA, 20 bp, Artificial Sequence
  Antisense compound
tacatttccttgttgagcaa

SEQ ID NO: 9750 - DNA, 20 bp, Artificial Sequence
  Antisense compound
gtacatttccttgttgagca

SEQ ID NO: 9751 - DNA, 20 bp, Artificial Sequence
  Antisense compound
ggtacatttccttgttgagc

SEQ ID NO: 9752 - DNA, 20 bp, Artificial Sequence
  Antisense compound
aggtacatttccttgttgag

SEQ ID NO: 9753 - DNA, 20 bp, Artificial Sequence
  Antisense compound
taggtacatttccttgttga

SEQ ID NO: 9754 - DNA, 20 bp, Artificial Sequence
  Antisense compound
ttaggtacatttccttgttg

SEQ ID NO: 9755 - DNA, 20 bp, Artificial Sequence
  Antisense compound
tttaggtacatttccttgtt

SEQ ID NO: 9756 - DNA, 20 bp, Artificial Sequence
  Antisense compound
ttttaggtacatttccttgt

SEQ ID NO: 9757 - DNA, 20 bp, Artificial Sequence
  Antisense compound
attttaggtacatttccttg

SEQ ID NO: 9758 - DNA, 20 bp, Artificial Sequence
  Antisense compound
aattttaggtacatttcctt

SEQ ID NO: 9759 - DNA, 20 bp, Artificial Sequence
  Antisense compound
caattttaggtacatttcct

SEQ ID NO: 9760 - DNA, 20 bp, Artificial Sequence
  Antisense compound
gcaattttaggtacatttcc

SEQ ID NO: 9761 - DNA, 20 bp, Artificial Sequence
  Antisense compound
cgcaattttaggtacatttc

SEQ ID NO: 9762 - DNA, 20 bp, Artificial Sequence
  Antisense compound
acgcaattttaggtacattt

SEQ ID NO: 9763 - DNA, 20 bp, Artificial Sequence
  Antisense compound
tacgcaattttaggtacatt

SEQ ID NO: 9764 - DNA, 20 bp, Artificial Sequence
  Antisense compound
ctacgcaattttaggtacat

SEQ ID NO: 9765 - DNA, 20 bp, Artificial Sequence
  Antisense compound
gctacgcaattttaggtaca

SEQ ID NO: 9766 - DNA, 20 bp, Artificial Sequence
  Antisense compound
cgctacgcaattttaggtac

SEQ ID NO: 9767 - DNA, 20 bp, Artificial Sequence
  Antisense compound
tcgctacgcaattttaggta

SEQ ID NO: 9768 - DNA, 20 bp, Artificial Sequence
  Antisense compound
ctcgctacgcaattttaggt

SEQ ID NO: 9769 - DNA, 20 bp, Artificial Sequence
  Antisense compound
tctcgctacgcaattttagg

SEQ ID NO: 9770 - DNA, 20 bp, Artificial Sequence
  Antisense compound
gtctcgctacgcaattttag

SEQ ID NO: 9771 - DNA, 20 bp, Artificial Sequence
  Antisense compound
tgtctcgctacgcaatttta

SEQ ID NO: 9772 - DNA, 20 bp, Artificial Sequence
  Antisense compound
gtgtctcgctacgcaatttt

SEQ ID NO: 9773 - DNA, 20 bp, Artificial Sequence
  Antisense compound
agtgtctcgctacgcaattt

SEQ ID NO: 9774 - DNA, 20 bp, Artificial Sequence
  Antisense compound
cagtgtctcgctacgcaatt

SEQ ID NO: 9775 - DNA, 20 bp, Artificial Sequence
  Antisense compound
acagtgtctcgctacgcaat

SEQ ID NO: 9776 - DNA, 20 bp, Artificial Sequence
  Antisense compound
aacagtgtctcgctacgcaa

SEQ ID NO: 9777 - DNA, 20 bp, Artificial Sequence
  Antisense compound
caacagtgtctcgctacgca

SEQ ID NO: 9778 - DNA, 20 bp, Artificial Sequence
  Antisense compound
gcaacagtgtctcgctacgc

SEQ ID NO: 9779 - DNA, 20 bp, Artificial Sequence
  Antisense compound
ggcaacagtgtctcgctacg

SEQ ID NO: 9780 - DNA, 20 bp, Artificial Sequence
  Antisense compound
tggcaacagtgtctcgctac

SEQ ID NO: 9781 - DNA, 20 bp, Artificial Sequence
  Antisense compound
gtggcaacagtgtctcgcta

SEQ ID NO: 9782 - DNA, 20 bp, Artificial Sequence
  Antisense compound
agtggcaacagtgtctcgct

SEQ ID NO: 9783 - DNA, 20 bp, Artificial Sequence
  Antisense compound
aagtggcaacagtgtctcgc

SEQ ID NO: 9784 - DNA, 20 bp, Artificial Sequence
  Antisense compound
taagtggcaacagtgtctcg

SEQ ID NO: 9785 - DNA, 20 bp, Artificial Sequence
  Antisense compound
gtaagtggcaacagtgtctc

SEQ ID NO: 9786 - DNA, 20 bp, Artificial Sequence
  Antisense compound
tgtaagtggcaacagtgtct

SEQ ID NO: 9787 - DNA, 20 bp, Artificial Sequence
  Antisense compound
gtgtaagtggcaacagtgtc

SEQ ID NO: 9788 - DNA, 20 bp, Artificial Sequence
  Antisense compound
tgtgtaagtggcaacagtgt

SEQ ID NO: 9789 - DNA, 20 bp, Artificial Sequence
  Antisense compound
ctgtgtaagtggcaacagtg

SEQ ID NO: 9790 - DNA, 20 bp, Artificial Sequence
  Antisense compound
actgtgtaagtggcaacagt

SEQ ID NO: 9791 - DNA, 20 bp, Artificial Sequence
  Antisense compound
tactgtgtaagtggcaacag

SEQ ID NO: 9792 - DNA, 20 bp, Artificial Sequence
  Antisense compound
atactgtgtaagtggcaaca

SEQ ID NO: 9793 - DNA, 20 bp, Artificial Sequence
  Antisense compound
tatactgtgtaagtggcaac

SEQ ID NO: 9794 - DNA, 20 bp, Artificial Sequence
  Antisense compound
ttatactgtgtaagtggcaa

SEQ ID NO: 9795 - DNA, 20 bp, Artificial Sequence
  Antisense compound
gttatactgtgtaagtggca

SEQ ID NO: 9796 - DNA, 20 bp, Artificial Sequence
  Antisense compound
tgttatactgtgtaagtggc

SEQ ID NO: 9797 - DNA, 20 bp, Artificial Sequence
  Antisense compound
ctgttatactgtgtaagtgg

SEQ ID NO: 9798 - DNA, 20 bp, Artificial Sequence
  Antisense compound
cctgttatactgtgtaagtg

SEQ ID NO: 9799 - DNA, 20 bp, Artificial Sequence
  Antisense compound
acctgttatactgtgtaagt

SEQ ID NO: 9800 - DNA, 20 bp, Artificial Sequence
  Antisense compound
tacctgttatactgtgtaag

SEQ ID NO: 9801 - DNA, 20 bp, Artificial Sequence
  Antisense compound
atacctgttatactgtgtaa

SEQ ID NO: 9802 - DNA, 20 bp, Artificial Sequence
  Antisense compound
gatacctgttatactgtgta

SEQ ID NO: 9803 - DNA, 20 bp, Artificial Sequence
  Antisense compound
agatacctgttatactgtgt

SEQ ID NO: 9804 - DNA, 20 bp, Artificial Sequence
  Antisense compound
aagatacctgttatactgtg

SEQ ID NO: 9805 - DNA, 20 bp, Artificial Sequence
  Antisense compound
caagatacctgttatactgt

SEQ ID NO: 9806 - DNA, 20 bp, Artificial Sequence
  Antisense compound
gcaagatacctgttatactg

SEQ ID NO: 9807 - DNA, 20 bp, Artificial Sequence
  Antisense compound
agcaagatacctgttatact

SEQ ID NO: 9808 - DNA, 20 bp, Artificial Sequence
  Antisense compound
gagcaagatacctgttatac

SEQ ID NO: 9809 - DNA, 20 bp, Artificial Sequence
  Antisense compound
agagcaagatacctgttata

SEQ ID NO: 9810 - DNA, 20 bp, Artificial Sequence
  Antisense compound
tagagcaagatacctgttat

SEQ ID NO: 9811 - DNA, 20 bp, Artificial Sequence
  Antisense compound
atagagcaagatacctgtta

SEQ ID NO: 9812 - DNA, 20 bp, Artificial Sequence
  Antisense compound
tatagagcaagatacctgtt

SEQ ID NO: 9813 - DNA, 20 bp, Artificial Sequence
  Antisense compound
atatagagcaagatacctgt

SEQ ID NO: 9814 - DNA, 20 bp, Artificial Sequence
  Antisense compound
tatatagagcaagatacctg

SEQ ID NO: 9815 - DNA, 20 bp, Artificial Sequence
  Antisense compound
ttatatagagcaagatacct

SEQ ID NO: 9816 - DNA, 20 bp, Artificial Sequence
  Antisense compound
gttatatagagcaagatacc

SEQ ID NO: 9817 - DNA, 20 bp, Artificial Sequence
  Antisense compound
tgttatatagagcaagatac

SEQ ID NO: 9818 - DNA, 20 bp, Artificial Sequence
  Antisense compound
ttgttatatagagcaagata

SEQ ID NO: 9819 - DNA, 20 bp, Artificial Sequence
  Antisense compound
cttgttatatagagcaagat

SEQ ID NO: 9820 - DNA, 20 bp, Artificial Sequence
  Antisense compound
acttgttatatagagcaaga

SEQ ID NO: 9821 - DNA, 20 bp, Artificial Sequence
  Antisense compound
tacttgttatatagagcaag

SEQ ID NO: 9822 - DNA, 20 bp, Artificial Sequence
  Antisense compound
gtacttgttatatagagcaa

SEQ ID NO: 9823 - DNA, 20 bp, Artificial Sequence
  Antisense compound
tgtacttgttatatagagca

SEQ ID NO: 9824 - DNA, 20 bp, Artificial Sequence
  Antisense compound
ttgtacttgttatatagagc

SEQ ID NO: 9825 - DNA, 20 bp, Artificial Sequence
  Antisense compound
cttgtacttgttatatagag

SEQ ID NO: 9826 - DNA, 20 bp, Artificial Sequence
  Antisense compound
acttgtacttgttatataga

SEQ ID NO: 9827 - DNA, 20 bp, Artificial Sequence
  Antisense compound
tacttgtacttgttatatag

SEQ ID NO: 9828 - DNA, 20 bp, Artificial Sequence
  Antisense compound
atacttgtacttgttatata

SEQ ID NO: 9829 - DNA, 20 bp, Artificial Sequence
  Antisense compound
aatacttgtacttgttatat

SEQ ID NO: 9830 - DNA, 20 bp, Artificial Sequence
  Antisense compound
aaatacttgtacttgttata

SEQ ID NO: 9831 - DNA, 20 bp, Artificial Sequence
  Antisense compound
gaaatacttgtacttgttat

SEQ ID NO: 9832 - DNA, 20 bp, Artificial Sequence
  Antisense compound
tgaaatacttgtacttgtta

SEQ ID NO: 9833 - DNA, 20 bp, Artificial Sequence
  Antisense compound
ctgaaatacttgtacttgtt

SEQ ID NO: 9834 - DNA, 20 bp, Artificial Sequence
  Antisense compound
actgaaatacttgtacttgt

SEQ ID NO: 9835 - DNA, 20 bp, Artificial Sequence
  Antisense compound
cactgaaatacttgtacttg

SEQ ID NO: 9836 - DNA, 20 bp, Artificial Sequence
  Antisense compound
ccactgaaatacttgtactt

SEQ ID NO: 9837 - DNA, 20 bp, Artificial Sequence
  Antisense compound
tccactgaaatacttgtact

SEQ ID NO: 9838 - DNA, 20 bp, Artificial Sequence
  Antisense compound
ctccactgaaatacttgtac

SEQ ID NO: 9839 - DNA, 20 bp, Artificial Sequence
  Antisense compound
gctccactgaaatacttgta

SEQ ID NO: 9840 - DNA, 20 bp, Artificial Sequence
  Antisense compound
ggctccactgaaatacttgt

SEQ ID NO: 9841 - DNA, 20 bp, Artificial Sequence
  Antisense compound
aggctccactgaaatacttg

SEQ ID NO: 9842 - DNA, 20 bp, Artificial Sequence
  Antisense compound
aaggctccactgaaatactt

SEQ ID NO: 9843 - DNA, 20 bp, Artificial Sequence
  Antisense compound
taaggctccactgaaatact

SEQ ID NO: 9844 - DNA, 20 bp, Artificial Sequence
  Antisense compound
ctaaggctccactgaaatac

SEQ ID NO: 9845 - DNA, 20 bp, Artificial Sequence
  Antisense compound
tctaaggctccactgaaata

SEQ ID NO: 9846 - DNA, 20 bp, Artificial Sequence
  Antisense compound
atctaaggctccactgaaat

SEQ ID NO: 9847 - DNA, 20 bp, Artificial Sequence
  Antisense compound
tatctaaggctccactgaaa

SEQ ID NO: 9848 - DNA, 20 bp, Artificial Sequence
  Antisense compound
gtatctaaggctccactgaa

SEQ ID NO: 9849 - DNA, 20 bp, Artificial Sequence
  Antisense compound
agtatctaaggctccactga

SEQ ID NO: 9850 - DNA, 20 bp, Artificial Sequence
  Antisense compound
tagtatctaaggctccactg

SEQ ID NO: 9851 - DNA, 20 bp, Artificial Sequence
  Antisense compound
gtagtatctaaggctccact

SEQ ID NO: 9852 - DNA, 20 bp, Artificial Sequence
  Antisense compound
ggtagtatctaaggctccac

SEQ ID NO: 9853 - DNA, 20 bp, Artificial Sequence
  Antisense compound
tggtagtatctaaggctcca

SEQ ID NO: 9854 - DNA, 20 bp, Artificial Sequence
  Antisense compound
ctggtagtatctaaggctcc

SEQ ID NO: 9855 - DNA, 20 bp, Artificial Sequence
  Antisense compound
gctggtagtatctaaggctc

SEQ ID NO: 9856 - DNA, 20 bp, Artificial Sequence
  Antisense compound
agctggtagtatctaaggct

SEQ ID NO: 9857 - DNA, 20 bp, Artificial Sequence
  Antisense compound
tagctggtagtatctaaggc

SEQ ID NO: 9858 - DNA, 20 bp, Artificial Sequence
  Antisense compound
atagctggtagtatctaagg

SEQ ID NO: 9859 - DNA, 20 bp, Artificial Sequence
  Antisense compound
gatagctggtagtatctaag

SEQ ID NO: 9860 - DNA, 20 bp, Artificial Sequence
  Antisense compound
cgatagctggtagtatctaa

SEQ ID NO: 9861 - DNA, 20 bp, Artificial Sequence
  Antisense compound
acgatagctggtagtatcta

SEQ ID NO: 9862 - DNA, 20 bp, Artificial Sequence
  Antisense compound
cacgatagctggtagtatct

SEQ ID NO: 9863 - DNA, 20 bp, Artificial Sequence
  Antisense compound
tcacgatagctggtagtatc

SEQ ID NO: 9864 - DNA, 20 bp, Artificial Sequence
  Antisense compound
ttcacgatagctggtagtat

SEQ ID NO: 9865 - DNA, 20 bp, Artificial Sequence
  Antisense compound
cttcacgatagctggtagta

SEQ ID NO: 9866 - DNA, 20 bp, Artificial Sequence
  Antisense compound
gcttcacgatagctggtagt

SEQ ID NO: 9867 - DNA, 20 bp, Artificial Sequence
  Antisense compound
tgcttcacgatagctggtag

SEQ ID NO: 9868 - DNA, 20 bp, Artificial Sequence
  Antisense compound
ctgcttcacgatagctggta

SEQ ID NO: 9869 - DNA, 20 bp, Artificial Sequence
  Antisense compound
gctgcttcacgatagctggt

SEQ ID NO: 9870 - DNA, 20 bp, Artificial Sequence
  Antisense compound
agctgcttcacgatagctgg

SEQ ID NO: 9871 - DNA, 20 bp, Artificial Sequence
  Antisense compound
aagctgcttcacgatagctg

SEQ ID NO: 9872 - DNA, 20 bp, Artificial Sequence
  Antisense compound
caagctgcttcacgatagct

SEQ ID NO: 9873 - DNA, 20 bp, Artificial Sequence
  Antisense compound
gcaagctgcttcacgatagc

SEQ ID NO: 9874 - DNA, 20 bp, Artificial Sequence
  Antisense compound
agcaagctgcttcacgatag

SEQ ID NO: 9875 - DNA, 20 bp, Artificial Sequence
  Antisense compound
cagcaagctgcttcacgata

SEQ ID NO: 9876 - DNA, 20 bp, Artificial Sequence
  Antisense compound
gcagcaagctgcttcacgat

SEQ ID NO: 9877 - DNA, 20 bp, Artificial Sequence
  Antisense compound
ggcagcaagctgcttcacga

SEQ ID NO: 9878 - DNA, 20 bp, Artificial Sequence
  Antisense compound
tggcagcaagctgcttcacg

SEQ ID NO: 9879 - DNA, 20 bp, Artificial Sequence
  Antisense compound
gtggcagcaagctgcttcac

SEQ ID NO: 9880 - DNA, 20 bp, Artificial Sequence
  Antisense compound
agtggcagcaagctgcttca

SEQ ID NO: 9881 - DNA, 20 bp, Artificial Sequence
  Antisense compound
aagtggcagcaagctgcttc

SEQ ID NO: 9882 - DNA, 20 bp, Artificial Sequence
  Antisense compound
taagtggcagcaagctgctt

SEQ ID NO: 9883 - DNA, 20 bp, Artificial Sequence
  Antisense compound
ctaagtggcagcaagctgct

SEQ ID NO: 9884 - DNA, 20 bp, Artificial Sequence
  Antisense compound
gctaagtggcagcaagctgc

SEQ ID NO: 9885 - DNA, 20 bp, Artificial Sequence
  Antisense compound
tgctaagtggcagcaagctg

SEQ ID NO: 9886 - DNA, 20 bp, Artificial Sequence
  Antisense compound
ttgctaagtggcagcaagct

SEQ ID NO: 9887 - DNA, 20 bp, Artificial Sequence
  Antisense compound
tttgctaagtggcagcaagc

SEQ ID NO: 9888 - DNA, 20 bp, Artificial Sequence
  Antisense compound
ctttgctaagtggcagcaag

SEQ ID NO: 9889 - DNA, 20 bp, Artificial Sequence
  Antisense compound
cctttgctaagtggcagcaa

SEQ ID NO: 9890 - DNA, 20 bp, Artificial Sequence
  Antisense compound
gcctttgctaagtggcagca

SEQ ID NO: 9891 - DNA, 20 bp, Artificial Sequence
  Antisense compound
agcctttgctaagtggcagc

SEQ ID NO: 9892 - DNA, 20 bp, Artificial Sequence
  Antisense compound
gagcctttgctaagtggcag

SEQ ID NO: 9893 - DNA, 20 bp, Artificial Sequence
  Antisense compound
agagcctttgctaagtggca

SEQ ID NO: 9894 - DNA, 20 bp, Artificial Sequence
  Antisense compound
tagagcctttgctaagtggc

SEQ ID NO: 9895 - DNA, 20 bp, Artificial Sequence
  Antisense compound
ttagagcctttgctaagtgg

SEQ ID NO: 9896 - DNA, 20 bp, Artificial Sequence
  Antisense compound
tttagagcctttgctaagtg

SEQ ID NO: 9897 - DNA, 20 bp, Artificial Sequence
  Antisense compound
atttagagcctttgctaagt

SEQ ID NO: 9898 - DNA, 20 bp, Artificial Sequence
  Antisense compound
catttagagcctttgctaag

SEQ ID NO: 9899 - DNA, 20 bp, Artificial Sequence
  Antisense compound
tcatttagagcctttgctaa

SEQ ID NO: 9900 - DNA, 20 bp, Artificial Sequence
  Antisense compound
gtcatttagagcctttgcta

SEQ ID NO: 9901 - DNA, 20 bp, Artificial Sequence
  Antisense compound
agtcatttagagcctttgct

SEQ ID NO: 9902 - DNA, 20 bp, Artificial Sequence
  Antisense compound
aagtcatttagagcctttgc

SEQ ID NO: 9903 - DNA, 20 bp, Artificial Sequence
  Antisense compound
aaagtcatttagagcctttg

SEQ ID NO: 9904 - DNA, 20 bp, Artificial Sequence
  Antisense compound
taaagtcatttagagccttt

SEQ ID NO: 9905 - DNA, 20 bp, Artificial Sequence
  Antisense compound
ctaaagtcatttagagcctt

SEQ ID NO: 9906 - DNA, 20 bp, Artificial Sequence
  Antisense compound
gctaaagtcatttagagcct

SEQ ID NO: 9907 - DNA, 20 bp, Artificial Sequence
  Antisense compound
tgctaaagtcatttagagcc

SEQ ID NO: 9908 - DNA, 20 bp, Artificial Sequence
  Antisense compound
ttgctaaagtcatttagagc

SEQ ID NO: 9909 - DNA, 20 bp, Artificial Sequence
  Antisense compound
gttgctaaagtcatttagag

SEQ ID NO: 9910 - DNA, 20 bp, Artificial Sequence
  Antisense compound
agttgctaaagtcatttaga

SEQ ID NO: 9911 - DNA, 20 bp, Artificial Sequence
  Antisense compound
gagttgctaaagtcatttag

SEQ ID NO: 9912 - DNA, 20 bp, Artificial Sequence
  Antisense compound
tgagttgctaaagtcattta

SEQ ID NO: 9913 - DNA, 20 bp, Artificial Sequence
  Antisense compound
ctgagttgctaaagtcattt

SEQ ID NO: 9914 - DNA, 20 bp, Artificial Sequence
  Antisense compound
cctgagttgctaaagtcatt

SEQ ID NO: 9915 - DNA, 20 bp, Artificial Sequence
  Antisense compound
acctgagttgctaaagtcat

SEQ ID NO: 9916 - DNA, 20 bp, Artificial Sequence
  Antisense compound
cacctgagttgctaaagtca

SEQ ID NO: 9917 - DNA, 20 bp, Artificial Sequence
  Antisense compound
gcacctgagttgctaaagtc

SEQ ID NO: 9918 - DNA, 20 bp, Artificial Sequence
  Antisense compound
agcacctgagttgctaaagt

SEQ ID NO: 9919 - DNA, 20 bp, Artificial Sequence
  Antisense compound
cagcacctgagttgctaaag

SEQ ID NO: 9920 - DNA, 20 bp, Artificial Sequence
  Antisense compound
tcagcacctgagttgctaaa

SEQ ID NO: 9921 - DNA, 20 bp, Artificial Sequence
  Antisense compound
atcagcacctgagttgctaa

SEQ ID NO: 9922 - DNA, 20 bp, Artificial Sequence
  Antisense compound
catcagcacctgagttgcta

SEQ ID NO: 9923 - DNA, 20 bp, Artificial Sequence
  Antisense compound
acatcagcacctgagttgct

SEQ ID NO: 9924 - DNA, 20 bp, Artificial Sequence
  Antisense compound
aacatcagcacctgagttgc

SEQ ID NO: 9925 - DNA, 20 bp, Artificial Sequence
  Antisense compound
gaacatcagcacctgagttg

SEQ ID NO: 9926 - DNA, 20 bp, Artificial Sequence
  Antisense compound
agaacatcagcacctgagtt

SEQ ID NO: 9927 - DNA, 20 bp, Artificial Sequence
  Antisense compound
gagaacatcagcacctgagt

SEQ ID NO: 9928 - DNA, 20 bp, Artificial Sequence
  Antisense compound
agagaacatcagcacctgag

SEQ ID NO: 9929 - DNA, 20 bp, Artificial Sequence
  Antisense compound
tagagaacatcagcacctga

SEQ ID NO: 9930 - DNA, 20 bp, Artificial Sequence
  Antisense compound
gtagagaacatcagcacctg

SEQ ID NO: 9931 - DNA, 20 bp, Artificial Sequence
  Antisense compound
ggtagagaacatcagcacct

SEQ ID NO: 9932 - DNA, 20 bp, Artificial Sequence
  Antisense compound
tggtagagaacatcagcacc

SEQ ID NO: 9933 - DNA, 20 bp, Artificial Sequence
  Antisense compound
ttggtagagaacatcagcac

SEQ ID NO: 9934 - DNA, 20 bp, Artificial Sequence
  Antisense compound
gttggtagagaacatcagca

SEQ ID NO: 9935 - DNA, 20 bp, Artificial Sequence
  Antisense compound
ggttggtagagaacatcagc

SEQ ID NO: 9936 - DNA, 20 bp, Artificial Sequence
  Antisense compound
tggttggtagagaacatcag

SEQ ID NO: 9937 - DNA, 20 bp, Artificial Sequence
  Antisense compound
gtggttggtagagaacatca

SEQ ID NO: 9938 - DNA, 20 bp, Artificial Sequence
  Antisense compound
ggtggttggtagagaacatc

SEQ ID NO: 9939 - DNA, 20 bp, Artificial Sequence
  Antisense compound
tggtggttggtagagaacat

SEQ ID NO: 9940 - DNA, 20 bp, Artificial Sequence
  Antisense compound
gtggtggttggtagagaaca

SEQ ID NO: 9941 - DNA, 20 bp, Artificial Sequence
  Antisense compound
tgtggtggttggtagagaac

SEQ ID NO: 9942 - DNA, 20 bp, Artificial Sequence
  Antisense compound
ctgtggtggttggtagagaa

SEQ ID NO: 9943 - DNA, 20 bp, Artificial Sequence
  Antisense compound
tctgtggtggttggtagaga

SEQ ID NO: 9944 - DNA, 20 bp, Artificial Sequence
  Antisense compound
gtctgtggtggttggtagag

SEQ ID NO: 9945 - DNA, 20 bp, Artificial Sequence
  Antisense compound
tgtctgtggtggttggtaga

SEQ ID NO: 9946 - DNA, 20 bp, Artificial Sequence
  Antisense compound
atgtctgtggtggttggtag

SEQ ID NO: 9947 - DNA, 20 bp, Artificial Sequence
  Antisense compound
gatgtctgtggtggttggta

SEQ ID NO: 9948 - DNA, 20 bp, Artificial Sequence
  Antisense compound
tgatgtctgtggtggttggt

SEQ ID NO: 9949 - DNA, 20 bp, Artificial Sequence
  Antisense compound
ttgatgtctgtggtggttgg

SEQ ID NO: 9950 - DNA, 20 bp, Artificial Sequence
  Antisense compound
attgatgtctgtggtggttg

SEQ ID NO: 9951 - DNA, 20 bp, Artificial Sequence
  Antisense compound
gattgatgtctgtggtggtt

SEQ ID NO: 9952 - DNA, 20 bp, Artificial Sequence
  Antisense compound
tgattgatgtctgtggtggt

SEQ ID NO: 9953 - DNA, 20 bp, Artificial Sequence
  Antisense compound
gtgattgatgtctgtggtgg

SEQ ID NO: 9954 - DNA, 20 bp, Artificial Sequence
  Antisense compound
agtgattgatgtctgtggtg

SEQ ID NO: 9955 - DNA, 20 bp, Artificial Sequence
  Antisense compound
aagtgattgatgtctgtggt

SEQ ID NO: 9956 - DNA, 20 bp, Artificial Sequence
  Antisense compound
gaagtgattgatgtctgtgg

SEQ ID NO: 9957 - DNA, 20 bp, Artificial Sequence
  Antisense compound
agaagtgattgatgtctgtg

SEQ ID NO: 9958 - DNA, 20 bp, Artificial Sequence
  Antisense compound
cagaagtgattgatgtctgt

SEQ ID NO: 9959 - DNA, 20 bp, Artificial Sequence
  Antisense compound
gcagaagtgattgatgtctg

SEQ ID NO: 9960 - DNA, 20 bp, Artificial Sequence
  Antisense compound
agcagaagtgattgatgtct

SEQ ID NO: 9961 - DNA, 20 bp, Artificial Sequence
  Antisense compound
cagcagaagtgattgatgtc

SEQ ID NO: 9962 - DNA, 20 bp, Artificial Sequence
  Antisense compound
acagcagaagtgattgatgt

SEQ ID NO: 9963 - DNA, 20 bp, Artificial Sequence
  Antisense compound
aacagcagaagtgattgatg

SEQ ID NO: 9964 - DNA, 20 bp, Artificial Sequence
  Antisense compound
gaacagcagaagtgattgat

SEQ ID NO: 9965 - DNA, 20 bp, Artificial Sequence
  Antisense compound
agaacagcagaagtgattga

SEQ ID NO: 9966 - DNA, 20 bp, Artificial Sequence
  Antisense compound
cagaacagcagaagtgattg

SEQ ID NO: 9967 - DNA, 20 bp, Artificial Sequence
  Antisense compound
gcagaacagcagaagtgatt

SEQ ID NO: 9968 - DNA, 20 bp, Artificial Sequence
  Antisense compound
tgcagaacagcagaagtgat

SEQ ID NO: 9969 - DNA, 20 bp, Artificial Sequence
  Antisense compound
ctgcagaacagcagaagtga

SEQ ID NO: 9970 - DNA, 20 bp, Artificial Sequence
  Antisense compound
tctgcagaacagcagaagtg

SEQ ID NO: 9971 - DNA, 20 bp, Artificial Sequence
  Antisense compound
ctctgcagaacagcagaagt

SEQ ID NO: 9972 - DNA, 20 bp, Artificial Sequence
  Antisense compound
actctgcagaacagcagaag

SEQ ID NO: 9973 - DNA, 20 bp, Artificial Sequence
  Antisense compound
cactctgcagaacagcagaa

SEQ ID NO: 9974 - DNA, 20 bp, Artificial Sequence
  Antisense compound
ccactctgcagaacagcaga

SEQ ID NO: 9975 - DNA, 20 bp, Artificial Sequence
  Antisense compound
accactctgcagaacagcag

SEQ ID NO: 9976 - DNA, 20 bp, Artificial Sequence
  Antisense compound
aaccactctgcagaacagca

SEQ ID NO: 9977 - DNA, 20 bp, Artificial Sequence
  Antisense compound
aaaccactctgcagaacagc

SEQ ID NO: 9978 - DNA, 20 bp, Artificial Sequence
  Antisense compound
aaaaccactctgcagaacag

SEQ ID NO: 9979 - DNA, 20 bp, Artificial Sequence
  Antisense compound
taaaaccactctgcagaaca

SEQ ID NO: 9980 - DNA, 20 bp, Artificial Sequence
  Antisense compound
ctaaaaccactctgcagaac

SEQ ID NO: 9981 - DNA, 20 bp, Artificial Sequence
  Antisense compound
cctaaaaccactctgcagaa

SEQ ID NO: 9982 - DNA, 20 bp, Artificial Sequence
  Antisense compound
tcctaaaaccactctgcaga

SEQ ID NO: 9983 - DNA, 20 bp, Artificial Sequence
  Antisense compound
ttcctaaaaccactctgcag

SEQ ID NO: 9984 - DNA, 20 bp, Artificial Sequence
  Antisense compound
tttcctaaaaccactctgca

SEQ ID NO: 9985 - DNA, 20 bp, Artificial Sequence
  Antisense compound
ttttcctaaaaccactctgc

SEQ ID NO: 9986 - DNA, 20 bp, Artificial Sequence
  Antisense compound
attttcctaaaaccactctg

SEQ ID NO: 9987 - DNA, 20 bp, Artificial Sequence
  Antisense compound
cattttcctaaaaccactct

SEQ ID NO: 9988 - DNA, 20 bp, Artificial Sequence
  Antisense compound
ccattttcctaaaaccactc

SEQ ID NO: 9989 - DNA, 20 bp, Artificial Sequence
  Antisense compound
gccattttcctaaaaccact

SEQ ID NO: 9990 - DNA, 20 bp, Artificial Sequence
  Antisense compound
tgccattttcctaaaaccac

SEQ ID NO: 9991 - DNA, 20 bp, Artificial Sequence
  Antisense compound
atgccattttcctaaaacca

SEQ ID NO: 9992 - DNA, 20 bp, Artificial Sequence
  Antisense compound
aatgccattttcctaaaacc

SEQ ID NO: 9993 - DNA, 20 bp, Artificial Sequence
  Antisense compound
gaatgccattttcctaaaac

SEQ ID NO: 9994 - DNA, 20 bp, Artificial Sequence
  Antisense compound
ggaatgccattttcctaaaa

SEQ ID NO: 9995 - DNA, 20 bp, Artificial Sequence
  Antisense compound
gggaatgccattttcctaaa

SEQ ID NO: 9996 - DNA, 20 bp, Artificial Sequence
  Antisense compound
cgggaatgccattttcctaa

SEQ ID NO: 9997 - DNA, 20 bp, Artificial Sequence
  Antisense compound
acgggaatgccattttccta

SEQ ID NO: 9998 - DNA, 20 bp, Artificial Sequence
  Antisense compound
gacgggaatgccattttcct

SEQ ID NO: 9999 - DNA, 20 bp, Artificial Sequence
  Antisense compound
tgacgggaatgccattttcc

SEQ ID NO: 10000 - DNA, 20 bp, Artificial Sequence
  Antisense compound
ctgacgggaatgccattttc

SEQ ID NO: 10001 - DNA, 20 bp, Artificial Sequence
  Antisense compound
cctgacgggaatgccatttt

SEQ ID NO: 10002 - DNA, 20 bp, Artificial Sequence
  Antisense compound
gcctgacgggaatgccattt

SEQ ID NO: 10003 - DNA, 20 bp, Artificial Sequence
  Antisense compound
tgcctgacgggaatgccatt

SEQ ID NO: 10004 - DNA, 20 bp, Artificial Sequence
  Antisense compound
ttgcctgacgggaatgccat

SEQ ID NO: 10005 - DNA, 20 bp, Artificial Sequence
  Antisense compound
tttgcctgacgggaatgcca

SEQ ID NO: 10006 - DNA, 20 bp, Artificial Sequence
  Antisense compound
ctttgcctgacgggaatgcc

SEQ ID NO: 10007 - DNA, 20 bp, Artificial Sequence
  Antisense compound
actttgcctgacgggaatgc

SEQ ID NO: 10008 - DNA, 20 bp, Artificial Sequence
  Antisense compound
aactttgcctgacgggaatg

SEQ ID NO: 10009 - DNA, 20 bp, Artificial Sequence
  Antisense compound
caactttgcctgacgggaat

SEQ ID NO: 10010 - DNA, 20 bp, Artificial Sequence
  Antisense compound
tcaactttgcctgacgggaa

SEQ ID NO: 10011 - DNA, 20 bp, Artificial Sequence
  Antisense compound
ttcaactttgcctgacggga

SEQ ID NO: 10012 - DNA, 20 bp, Artificial Sequence
  Antisense compound
cttcaactttgcctgacggg

SEQ ID NO: 10013 - DNA, 20 bp, Artificial Sequence
  Antisense compound
ccttcaactttgcctgacgg

SEQ ID NO: 10014 - DNA, 20 bp, Artificial Sequence
  Antisense compound
cccttcaactttgcctgacg

SEQ ID NO: 10015 - DNA, 20 bp, Artificial Sequence
  Antisense compound
acccttcaactttgcctgac

SEQ ID NO: 10016 - DNA, 20 bp, Artificial Sequence
  Antisense compound
cacccttcaactttgcctga

SEQ ID NO: 10017 - DNA, 20 bp, Artificial Sequence
  Antisense compound
gcacccttcaactttgcctg

SEQ ID NO: 10018 - DNA, 20 bp, Artificial Sequence
  Antisense compound
tgcacccttcaactttgcct

SEQ ID NO: 10019 - DNA, 20 bp, Artificial Sequence
  Antisense compound
atgcacccttcaactttgcc

SEQ ID NO: 10020 - DNA, 20 bp, Artificial Sequence
  Antisense compound
catgcacccttcaactttgc

SEQ ID NO: 10021 - DNA, 20 bp, Artificial Sequence
  Antisense compound
ccatgcacccttcaactttg

SEQ ID NO: 10022 - DNA, 20 bp, Artificial Sequence
  Antisense compound
accatgcacccttcaacttt

SEQ ID NO: 10023 - DNA, 20 bp, Artificial Sequence
  Antisense compound
taccatgcacccttcaactt

SEQ ID NO: 10024 - DNA, 20 bp, Artificial Sequence
  Antisense compound
gtaccatgcacccttcaact

SEQ ID NO: 10025 - DNA, 20 bp, Artificial Sequence
  Antisense compound
tgtaccatgcacccttcaac

SEQ ID NO: 10026 - DNA, 20 bp, Artificial Sequence
  Antisense compound
ttgtaccatgcacccttcaa

SEQ ID NO: 10027 - DNA, 20 bp, Artificial Sequence
  Antisense compound
cttgtaccatgcacccttca

SEQ ID NO: 10028 - DNA, 20 bp, Artificial Sequence
  Antisense compound
acttgtaccatgcacccttc

SEQ ID NO: 10029 - DNA, 20 bp, Artificial Sequence
  Antisense compound
tacttgtaccatgcaccctt

SEQ ID NO: 10030 - DNA, 20 bp, Artificial Sequence
  Antisense compound
ttacttgtaccatgcaccct

SEQ ID NO: 10031 - DNA, 20 bp, Artificial Sequence
  Antisense compound
gttacttgtaccatgcaccc

SEQ ID NO: 10032 - DNA, 20 bp, Artificial Sequence
  Antisense compound
ggttacttgtaccatgcacc

SEQ ID NO: 10033 - DNA, 20 bp, Artificial Sequence
  Antisense compound
aggttacttgtaccatgcac

SEQ ID NO: 10034 - DNA, 20 bp, Artificial Sequence
  Antisense compound
caggttacttgtaccatgca

SEQ ID NO: 10035 - DNA, 20 bp, Artificial Sequence
  Antisense compound
acaggttacttgtaccatgc

SEQ ID NO: 10036 - DNA, 20 bp, Artificial Sequence
  Antisense compound
cacaggttacttgtaccatg

SEQ ID NO: 10037 - DNA, 20 bp, Artificial Sequence
  Antisense compound
ccacaggttacttgtaccat

SEQ ID NO: 10038 - DNA, 20 bp, Artificial Sequence
  Antisense compound
tccacaggttacttgtacca

SEQ ID NO: 10039 - DNA, 20 bp, Artificial Sequence
  Antisense compound
ttccacaggttacttgtacc

SEQ ID NO: 10040 - DNA, 20 bp, Artificial Sequence
  Antisense compound
gttccacaggttacttgtac

SEQ ID NO: 10041 - DNA, 20 bp, Artificial Sequence
  Antisense compound
agttccacaggttacttgta

SEQ ID NO: 10042 - DNA, 20 bp, Artificial Sequence
  Antisense compound
tagttccacaggttacttgt

SEQ ID NO: 10043 - DNA, 20 bp, Artificial Sequence
  Antisense compound
gtagttccacaggttacttg

SEQ ID NO: 10044 - DNA, 20 bp, Artificial Sequence
  Antisense compound
tgtagttccacaggttactt

SEQ ID NO: 10045 - DNA, 20 bp, Artificial Sequence
  Antisense compound
ttgtagttccacaggttact

SEQ ID NO: 10046 - DNA, 20 bp, Artificial Sequence
  Antisense compound
gttgtagttccacaggttac

SEQ ID NO: 10047 - DNA, 20 bp, Artificial Sequence
  Antisense compound
agttgtagttccacaggtta

SEQ ID NO: 10048 - DNA, 20 bp, Artificial Sequence
  Antisense compound
gagttgtagttccacaggtt

SEQ ID NO: 10049 - DNA, 20 bp, Artificial Sequence
  Antisense compound
agagttgtagttccacaggt

SEQ ID NO: 10050 - DNA, 20 bp, Artificial Sequence
  Antisense compound
aagagttgtagttccacagg

SEQ ID NO: 10051 - DNA, 20 bp, Artificial Sequence
  Antisense compound
taagagttgtagttccacag

SEQ ID NO: 10052 - DNA, 20 bp, Artificial Sequence
  Antisense compound
ttaagagttgtagttccaca

SEQ ID NO: 10053 - DNA, 20 bp, Artificial Sequence
  Antisense compound
attaagagttgtagttccac

SEQ ID NO: 10054 - DNA, 20 bp, Artificial Sequence
  Antisense compound
cattaagagttgtagttcca

SEQ ID NO: 10055 - DNA, 20 bp, Artificial Sequence
  Antisense compound
ccattaagagttgtagttcc

SEQ ID NO: 10056 - DNA, 20 bp, Artificial Sequence
  Antisense compound
tccattaagagttgtagttc

SEQ ID NO: 10057 - DNA, 20 bp, Artificial Sequence
  Antisense compound
atccattaagagttgtagtt

SEQ ID NO: 10058 - DNA, 20 bp, Artificial Sequence
  Antisense compound
aatccattaagagttgtagt

SEQ ID NO: 10059 - DNA, 20 bp, Artificial Sequence
  Antisense compound
caatccattaagagttgtag

SEQ ID NO: 10060 - DNA, 20 bp, Artificial Sequence
  Antisense compound
acaatccattaagagttgta

SEQ ID NO: 10061 - DNA, 20 bp, Artificial Sequence
  Antisense compound
cacaatccattaagagttgt

SEQ ID NO: 10062 - DNA, 20 bp, Artificial Sequence
  Antisense compound
ccacaatccattaagagttg

SEQ ID NO: 10063 - DNA, 20 bp, Artificial Sequence
  Antisense compound
accacaatccattaagagtt

SEQ ID NO: 10064 - DNA, 20 bp, Artificial Sequence
  Antisense compound
aaccacaatccattaagagt

SEQ ID NO: 10065 - DNA, 20 bp, Artificial Sequence
  Antisense compound
caaccacaatccattaagag

SEQ ID NO: 10066 - DNA, 20 bp, Artificial Sequence
  Antisense compound
ccaaccacaatccattaaga

SEQ ID NO: 10067 - DNA, 20 bp, Artificial Sequence
  Antisense compound
tccaaccacaatccattaag

SEQ ID NO: 10068 - DNA, 20 bp, Artificial Sequence
  Antisense compound
atccaaccacaatccattaa

SEQ ID NO: 10069 - DNA, 20 bp, Artificial Sequence
  Antisense compound
catccaaccacaatccatta

SEQ ID NO: 10070 - DNA, 20 bp, Artificial Sequence
  Antisense compound
tcatccaaccacaatccatt

SEQ ID NO: 10071 - DNA, 20 bp, Artificial Sequence
  Antisense compound
gtcatccaaccacaatccat

SEQ ID NO: 10072 - DNA, 20 bp, Artificial Sequence
  Antisense compound
tgtcatccaaccacaatcca

SEQ ID NO: 10073 - DNA, 20 bp, Artificial Sequence
  Antisense compound
gtgtcatccaaccacaatcc

SEQ ID NO: 10074 - DNA, 20 bp, Artificial Sequence
  Antisense compound
tgtgtcatccaaccacaatc

SEQ ID NO: 10075 - DNA, 20 bp, Artificial Sequence
  Antisense compound
ctgtgtcatccaaccacaat

SEQ ID NO: 10076 - DNA, 20 bp, Artificial Sequence
  Antisense compound
actgtgtcatccaaccacaa

SEQ ID NO: 10077 - DNA, 20 bp, Artificial Sequence
  Antisense compound
tactgtgtcatccaaccaca

SEQ ID NO: 10078 - DNA, 20 bp, Artificial Sequence
  Antisense compound
atactgtgtcatccaaccac

SEQ ID NO: 10079 - DNA, 20 bp, Artificial Sequence
  Antisense compound
tatactgtgtcatccaacca

SEQ ID NO: 10080 - DNA, 20 bp, Artificial Sequence
  Antisense compound
gtatactgtgtcatccaacc

SEQ ID NO: 10081 - DNA, 20 bp, Artificial Sequence
  Antisense compound
agtatactgtgtcatccaac

SEQ ID NO: 10082 - DNA, 20 bp, Artificial Sequence
  Antisense compound
cagtatactgtgtcatccaa

SEQ ID NO: 10083 - DNA, 20 bp, Artificial Sequence
  Antisense compound
acagtatactgtgtcatcca

SEQ ID NO: 10084 - DNA, 20 bp, Artificial Sequence
  Antisense compound
gacagtatactgtgtcatcc

SEQ ID NO: 10085 - DNA, 20 bp, Artificial Sequence
  Antisense compound
ggacagtatactgtgtcatc

SEQ ID NO: 10086 - DNA, 20 bp, Artificial Sequence
  Antisense compound
tggacagtatactgtgtcat

SEQ ID NO: 10087 - DNA, 20 bp, Artificial Sequence
  Antisense compound
ttggacagtatactgtgtca

SEQ ID NO: 10088 - DNA, 20 bp, Artificial Sequence
  Antisense compound
cttggacagtatactgtgtc

SEQ ID NO: 10089 - DNA, 20 bp, Artificial Sequence
  Antisense compound
tcttggacagtatactgtgt

SEQ ID NO: 10090 - DNA, 20 bp, Artificial Sequence
  Antisense compound
gtcttggacagtatactgtg

SEQ ID NO: 10091 - DNA, 20 bp, Artificial Sequence
  Antisense compound
tgtcttggacagtatactgt

SEQ ID NO: 10092 - DNA, 20 bp, Artificial Sequence
  Antisense compound
atgtcttggacagtatactg

SEQ ID NO: 10093 - DNA, 20 bp, Artificial Sequence
  Antisense compound
catgtcttggacagtatact

SEQ ID NO: 10094 - DNA, 20 bp, Artificial Sequence
  Antisense compound
acatgtcttggacagtatac

SEQ ID NO: 10095 - DNA, 20 bp, Artificial Sequence
  Antisense compound
gacatgtcttggacagtata

SEQ ID NO: 10096 - DNA, 20 bp, Artificial Sequence
  Antisense compound
tgacatgtcttggacagtat

SEQ ID NO: 10097 - DNA, 20 bp, Artificial Sequence
  Antisense compound
atgacatgtcttggacagta

SEQ ID NO: 10098 - DNA, 20 bp, Artificial Sequence
  Antisense compound
aatgacatgtcttggacagt

SEQ ID NO: 10099 - DNA, 20 bp, Artificial Sequence
  Antisense compound
aaatgacatgtcttggacag

SEQ ID NO: 10100 - DNA, 20 bp, Artificial Sequence
  Antisense compound
caaatgacatgtcttggaca

SEQ ID NO: 10101 - DNA, 20 bp, Artificial Sequence
  Antisense compound
gcaaatgacatgtcttggac

SEQ ID NO: 10102 - DNA, 20 bp, Artificial Sequence
  Antisense compound
tgcaaatgacatgtcttgga

SEQ ID NO: 10103 - DNA, 20 bp, Artificial Sequence
  Antisense compound
gtgcaaatgacatgtcttgg

SEQ ID NO: 10104 - DNA, 20 bp, Artificial Sequence
  Antisense compound
tgtgcaaatgacatgtcttg

SEQ ID NO: 10105 - DNA, 20 bp, Artificial Sequence
  Antisense compound
ctgtgcaaatgacatgtctt

SEQ ID NO: 10106 - DNA, 20 bp, Artificial Sequence
  Antisense compound
gctgtgcaaatgacatgtct

SEQ ID NO: 10107 - DNA, 20 bp, Artificial Sequence
  Antisense compound
tgctgtgcaaatgacatgtc

SEQ ID NO: 10108 - DNA, 20 bp, Artificial Sequence
  Antisense compound
ctgctgtgcaaatgacatgt

SEQ ID NO: 10109 - DNA, 20 bp, Artificial Sequence
  Antisense compound
tctgctgtgcaaatgacatg

SEQ ID NO: 10110 - DNA, 20 bp, Artificial Sequence
  Antisense compound
ttctgctgtgcaaatgacat

SEQ ID NO: 10111 - DNA, 20 bp, Artificial Sequence
  Antisense compound
cttctgctgtgcaaatgaca

SEQ ID NO: 10112 - DNA, 20 bp, Artificial Sequence
  Antisense compound
tcttctgctgtgcaaatgac

SEQ ID NO: 10113 - DNA, 20 bp, Artificial Sequence
  Antisense compound
gtcttctgctgtgcaaatga

SEQ ID NO: 10114 - DNA, 20 bp, Artificial Sequence
  Antisense compound
tgtcttctgctgtgcaaatg

SEQ ID NO: 10115 - DNA, 20 bp, Artificial Sequence
  Antisense compound
atgtcttctgctgtgcaaat

SEQ ID NO: 10116 - DNA, 20 bp, Artificial Sequence
  Antisense compound
catgtcttctgctgtgcaaa

SEQ ID NO: 10117 - DNA, 20 bp, Artificial Sequence
  Antisense compound
gcatgtcttctgctgtgcaa

SEQ ID NO: 10118 - DNA, 20 bp, Artificial Sequence
  Antisense compound
agcatgtcttctgctgtgca

SEQ ID NO: 10119 - DNA, 20 bp, Artificial Sequence
  Antisense compound
aagcatgtcttctgctgtgc

SEQ ID NO: 10120 - DNA, 20 bp, Artificial Sequence
  Antisense compound
taagcatgtcttctgctgtg

SEQ ID NO: 10121 - DNA, 20 bp, Artificial Sequence
  Antisense compound
ttaagcatgtcttctgctgt

SEQ ID NO: 10122 - DNA, 20 bp, Artificial Sequence
  Antisense compound
attaagcatgtcttctgctg

SEQ ID NO: 10123 - DNA, 20 bp, Artificial Sequence
  Antisense compound
gattaagcatgtcttctgct

SEQ ID NO: 10124 - DNA, 20 bp, Artificial Sequence
  Antisense compound
ggattaagcatgtcttctgc

SEQ ID NO: 10125 - DNA, 20 bp, Artificial Sequence
  Antisense compound
aggattaagcatgtcttctg

SEQ ID NO: 10126 - DNA, 20 bp, Artificial Sequence
  Antisense compound
taggattaagcatgtcttct

SEQ ID NO: 10127 - DNA, 20 bp, Artificial Sequence
  Antisense compound
ttaggattaagcatgtcttc

SEQ ID NO: 10128 - DNA, 20 bp, Artificial Sequence
  Antisense compound
gttaggattaagcatgtctt

SEQ ID NO: 10129 - DNA, 20 bp, Artificial Sequence
  Antisense compound
agttaggattaagcatgtct

SEQ ID NO: 10130 - DNA, 20 bp, Artificial Sequence
  Antisense compound
tagttaggattaagcatgtc

SEQ ID NO: 10131 - DNA, 20 bp, Artificial Sequence
  Antisense compound
atagttaggattaagcatgt

SEQ ID NO: 10132 - DNA, 20 bp, Artificial Sequence
  Antisense compound
catagttaggattaagcatg

SEQ ID NO: 10133 - DNA, 20 bp, Artificial Sequence
  Antisense compound
tcatagttaggattaagcat

SEQ ID NO: 10134 - DNA, 20 bp, Artificial Sequence
  Antisense compound
ttcatagttaggattaagca

SEQ ID NO: 10135 - DNA, 20 bp, Artificial Sequence
  Antisense compound
cttcatagttaggattaagc

SEQ ID NO: 10136 - DNA, 20 bp, Artificial Sequence
  Antisense compound
tcttcatagttaggattaag

SEQ ID NO: 10137 - DNA, 20 bp, Artificial Sequence
  Antisense compound
atcttcatagttaggattaa

SEQ ID NO: 10138 - DNA, 20 bp, Artificial Sequence
  Antisense compound
gatcttcatagttaggatta

SEQ ID NO: 10139 - DNA, 20 bp, Artificial Sequence
  Antisense compound
agatcttcatagttaggatt

SEQ ID NO: 10140 - DNA, 20 bp, Artificial Sequence
  Antisense compound
cagatcttcatagttaggat

SEQ ID NO: 10141 - DNA, 20 bp, Artificial Sequence
  Antisense compound
gcagatcttcatagttagga

SEQ ID NO: 10142 - DNA, 20 bp, Artificial Sequence
  Antisense compound
agcagatcttcatagttagg

SEQ ID NO: 10143 - DNA, 20 bp, Artificial Sequence
  Antisense compound
gagcagatcttcatagttag

SEQ ID NO: 10144 - DNA, 20 bp, Artificial Sequence
  Antisense compound
tgagcagatcttcatagtta

SEQ ID NO: 10145 - DNA, 20 bp, Artificial Sequence
  Antisense compound
atgagcagatcttcatagtt

SEQ ID NO: 10146 - DNA, 20 bp, Artificial Sequence
  Antisense compound
aatgagcagatcttcatagt

SEQ ID NO: 10147 - DNA, 20 bp, Artificial Sequence
  Antisense compound
gaatgagcagatcttcatag

SEQ ID NO: 10148 - DNA, 20 bp, Artificial Sequence
  Antisense compound
cgaatgagcagatcttcata

SEQ ID NO: 10149 - DNA, 20 bp, Artificial Sequence
  Antisense compound
gcgaatgagcagatcttcat

SEQ ID NO: 10150 - DNA, 20 bp, Artificial Sequence
  Antisense compound
tgcgaatgagcagatcttca

SEQ ID NO: 10151 - DNA, 20 bp, Artificial Sequence
  Antisense compound
ttgcgaatgagcagatcttc

SEQ ID NO: 10152 - DNA, 20 bp, Artificial Sequence
  Antisense compound
tttgcgaatgagcagatctt

SEQ ID NO: 10153 - DNA, 20 bp, Artificial Sequence
  Antisense compound
atttgcgaatgagcagatct

SEQ ID NO: 10154 - DNA, 20 bp, Artificial Sequence
  Antisense compound
gatttgcgaatgagcagatc

SEQ ID NO: 10155 - DNA, 20 bp, Artificial Sequence
  Antisense compound
ggatttgcgaatgagcagat

SEQ ID NO: 10156 - DNA, 20 bp, Artificial Sequence
  Antisense compound
tggatttgcgaatgagcaga

SEQ ID NO: 10157 - DNA, 20 bp, Artificial Sequence
  Antisense compound
ttggatttgcgaatgagcag

SEQ ID NO: 10158 - DNA, 20 bp, Artificial Sequence
  Antisense compound
gttggatttgcgaatgagca

SEQ ID NO: 10159 - DNA, 20 bp, Artificial Sequence
  Antisense compound
ggttggatttgcgaatgagc

SEQ ID NO: 10160 - DNA, 20 bp, Artificial Sequence
  Antisense compound
tggttggatttgcgaatgag

SEQ ID NO: 10161 - DNA, 20 bp, Artificial Sequence
  Antisense compound
atggttggatttgcgaatga

SEQ ID NO: 10162 - DNA, 20 bp, Artificial Sequence
  Antisense compound
tatggttggatttgcgaatg

SEQ ID NO: 10163 - DNA, 20 bp, Artificial Sequence
  Antisense compound
ctatggttggatttgcgaat

SEQ ID NO: 10164 - DNA, 20 bp, Artificial Sequence
  Antisense compound
gctatggttggatttgcgaa

SEQ ID NO: 10165 - DNA, 20 bp, Artificial Sequence
  Antisense compound
agctatggttggatttgcga

SEQ ID NO: 10166 - DNA, 20 bp, Artificial Sequence
  Antisense compound
aagctatggttggatttgcg

SEQ ID NO: 10167 - DNA, 20 bp, Artificial Sequence
  Antisense compound
aaagctatggttggatttgc

SEQ ID NO: 10168 - DNA, 20 bp, Artificial Sequence
  Antisense compound
gaaagctatggttggatttg

SEQ ID NO: 10169 - DNA, 20 bp, Artificial Sequence
  Antisense compound
agaaagctatggttggattt

SEQ ID NO: 10170 - DNA, 20 bp, Artificial Sequence
  Antisense compound
aagaaagctatggttggatt

SEQ ID NO: 10171 - DNA, 20 bp, Artificial Sequence
  Antisense compound
caagaaagctatggttggat

SEQ ID NO: 10172 - DNA, 20 bp, Artificial Sequence
  Antisense compound
acaagaaagctatggttgga

SEQ ID NO: 10173 - DNA, 20 bp, Artificial Sequence
  Antisense compound
aacaagaaagctatggttgg

SEQ ID NO: 10174 - DNA, 20 bp, Artificial Sequence
  Antisense compound
gaacaagaaagctatggttg

SEQ ID NO: 10175 - DNA, 20 bp, Artificial Sequence
  Antisense compound
tgaacaagaaagctatggtt

SEQ ID NO: 10176 - DNA, 20 bp, Artificial Sequence
  Antisense compound
ctgaacaagaaagctatggt

SEQ ID NO: 10177 - DNA, 20 bp, Artificial Sequence
  Antisense compound
cctgaacaagaaagctatgg

SEQ ID NO: 10178 - DNA, 20 bp, Artificial Sequence
  Antisense compound
gcctgaacaagaaagctatg

SEQ ID NO: 10179 - DNA, 20 bp, Artificial Sequence
  Antisense compound
agcctgaacaagaaagctat

SEQ ID NO: 10180 - DNA, 20 bp, Artificial Sequence
  Antisense compound
cagcctgaacaagaaagcta

SEQ ID NO: 10181 - DNA, 20 bp, Artificial Sequence
  Antisense compound
ccagcctgaacaagaaagct

SEQ ID NO: 10182 - DNA, 20 bp, Artificial Sequence
  Antisense compound
gccagcctgaacaagaaagc

SEQ ID NO: 10183 - DNA, 20 bp, Artificial Sequence
  Antisense compound
tgccagcctgaacaagaaag

SEQ ID NO: 10184 - DNA, 20 bp, Artificial Sequence
  Antisense compound
ttgccagcctgaacaagaaa

SEQ ID NO: 10185 - DNA, 20 bp, Artificial Sequence
  Antisense compound
attgccagcctgaacaagaa

SEQ ID NO: 10186 - DNA, 20 bp, Artificial Sequence
  Antisense compound
cattgccagcctgaacaaga

SEQ ID NO: 10187 - DNA, 20 bp, Artificial Sequence
  Antisense compound
acattgccagcctgaacaag

SEQ ID NO: 10188 - DNA, 20 bp, Artificial Sequence
  Antisense compound
aacattgccagcctgaacaa

SEQ ID NO: 10189 - DNA, 20 bp, Artificial Sequence
  Antisense compound
gaacattgccagcctgaaca

SEQ ID NO: 10190 - DNA, 20 bp, Artificial Sequence
  Antisense compound
tgaacattgccagcctgaac

SEQ ID NO: 10191 - DNA, 20 bp, Artificial Sequence
  Antisense compound
ttgaacattgccagcctgaa

SEQ ID NO: 10192 - DNA, 20 bp, Artificial Sequence
  Antisense compound
gttgaacattgccagcctga

SEQ ID NO: 10193 - DNA, 20 bp, Artificial Sequence
  Antisense compound
agttgaacattgccagcctg

SEQ ID NO: 10194 - DNA, 20 bp, Artificial Sequence
  Antisense compound
aagttgaacattgccagcct

SEQ ID NO: 10195 - DNA, 20 bp, Artificial Sequence
  Antisense compound
gaagttgaacattgccagcc

SEQ ID NO: 10196 - DNA, 20 bp, Artificial Sequence
  Antisense compound
cgaagttgaacattgccagc

SEQ ID NO: 10197 - DNA, 20 bp, Artificial Sequence
  Antisense compound
acgaagttgaacattgccag

SEQ ID NO: 10198 - DNA, 20 bp, Artificial Sequence
  Antisense compound
cacgaagttgaacattgcca

SEQ ID NO: 10199 - DNA, 20 bp, Artificial Sequence
  Antisense compound
acacgaagttgaacattgcc

SEQ ID NO: 10200 - DNA, 20 bp, Artificial Sequence
  Antisense compound
aacacgaagttgaacattgc

SEQ ID NO: 10201 - DNA, 20 bp, Artificial Sequence
  Antisense compound
taacacgaagttgaacattg

SEQ ID NO: 10202 - DNA, 20 bp, Artificial Sequence
  Antisense compound
ataacacgaagttgaacatt

SEQ ID NO: 10203 - DNA, 20 bp, Artificial Sequence
  Antisense compound
aataacacgaagttgaacat

SEQ ID NO: 10204 - DNA, 20 bp, Artificial Sequence
  Antisense compound
caataacacgaagttgaaca

SEQ ID NO: 10205 - DNA, 20 bp, Artificial Sequence
  Antisense compound
ccaataacacgaagttgaac

SEQ ID NO: 10206 - DNA, 20 bp, Artificial Sequence
  Antisense compound
gccaataacacgaagttgaa

SEQ ID NO: 10207 - DNA, 20 bp, Artificial Sequence
  Antisense compound
ggccaataacacgaagttga

SEQ ID NO: 10208 - DNA, 20 bp, Artificial Sequence
  Antisense compound
tggccaataacacgaagttg

SEQ ID NO: 10209 - DNA, 20 bp, Artificial Sequence
  Antisense compound
atggccaataacacgaagtt

SEQ ID NO: 10210 - DNA, 20 bp, Artificial Sequence
  Antisense compound
aatggccaataacacgaagt

SEQ ID NO: 10211 - DNA, 20 bp, Artificial Sequence
  Antisense compound
gaatggccaataacacgaag

SEQ ID NO: 10212 - DNA, 20 bp, Artificial Sequence
  Antisense compound
agaatggccaataacacgaa

SEQ ID NO: 10213 - DNA, 20 bp, Artificial Sequence
  Antisense compound
tagaatggccaataacacga

SEQ ID NO: 10214 - DNA, 20 bp, Artificial Sequence
  Antisense compound
atagaatggccaataacacg

SEQ ID NO: 10215 - DNA, 20 bp, Artificial Sequence
  Antisense compound
catagaatggccaataacac

SEQ ID NO: 10216 - DNA, 20 bp, Artificial Sequence
  Antisense compound
gcatagaatggccaataaca

SEQ ID NO: 10217 - DNA, 20 bp, Artificial Sequence
  Antisense compound
tgcatagaatggccaataac

SEQ ID NO: 10218 - DNA, 20 bp, Artificial Sequence
  Antisense compound
ttgcatagaatggccaataa

SEQ ID NO: 10219 - DNA, 20 bp, Artificial Sequence
  Antisense compound
tttgcatagaatggccaata

SEQ ID NO: 10220 - DNA, 20 bp, Artificial Sequence
  Antisense compound
ttttgcatagaatggccaat

SEQ ID NO: 10221 - DNA, 20 bp, Artificial Sequence
  Antisense compound
attttgcatagaatggccaa

SEQ ID NO: 10222 - DNA, 20 bp, Artificial Sequence
  Antisense compound
aattttgcatagaatggcca

SEQ ID NO: 10223 - DNA, 20 bp, Artificial Sequence
  Antisense compound
caattttgcatagaatggcc

SEQ ID NO: 10224 - DNA, 20 bp, Artificial Sequence
  Antisense compound
acaattttgcatagaatggc

SEQ ID NO: 10225 - DNA, 20 bp, Artificial Sequence
  Antisense compound
gacaattttgcatagaatgg

SEQ ID NO: 10226 - DNA, 20 bp, Artificial Sequence
  Antisense compound
agacaattttgcatagaatg

SEQ ID NO: 10227 - DNA, 20 bp, Artificial Sequence
  Antisense compound
cagacaattttgcatagaat

SEQ ID NO: 10228 - DNA, 20 bp, Artificial Sequence
  Antisense compound
gcagacaattttgcatagaa

SEQ ID NO: 10229 - DNA, 20 bp, Artificial Sequence
  Antisense compound
agcagacaattttgcataga

SEQ ID NO: 10230 - DNA, 20 bp, Artificial Sequence
  Antisense compound
aagcagacaattttgcatag

SEQ ID NO: 10231 - DNA, 20 bp, Artificial Sequence
  Antisense compound
taagcagacaattttgcata

SEQ ID NO: 10232 - DNA, 20 bp, Artificial Sequence
  Antisense compound
ctaagcagacaattttgcat

SEQ ID NO: 10233 - DNA, 20 bp, Artificial Sequence
  Antisense compound
cctaagcagacaattttgca

SEQ ID NO: 10234 - DNA, 20 bp, Artificial Sequence
  Antisense compound
gcctaagcagacaattttgc

SEQ ID NO: 10235 - DNA, 20 bp, Artificial Sequence
  Antisense compound
agcctaagcagacaattttg

SEQ ID NO: 10236 - DNA, 20 bp, Artificial Sequence
  Antisense compound
aagcctaagcagacaatttt

SEQ ID NO: 10237 - DNA, 20 bp, Artificial Sequence
  Antisense compound
taagcctaagcagacaattt

SEQ ID NO: 10238 - DNA, 20 bp, Artificial Sequence
  Antisense compound
ttaagcctaagcagacaatt

SEQ ID NO: 10239 - DNA, 20 bp, Artificial Sequence
  Antisense compound
tttaagcctaagcagacaat

SEQ ID NO: 10240 - DNA, 20 bp, Artificial Sequence
  Antisense compound
ctttaagcctaagcagacaa

SEQ ID NO: 10241 - DNA, 20 bp, Artificial Sequence
  Antisense compound
actttaagcctaagcagaca

SEQ ID NO: 10242 - DNA, 20 bp, Artificial Sequence
  Antisense compound
aactttaagcctaagcagac

SEQ ID NO: 10243 - DNA, 20 bp, Artificial Sequence
  Antisense compound
caactttaagcctaagcaga

SEQ ID NO: 10244 - DNA, 20 bp, Artificial Sequence
  Antisense compound
tcaactttaagcctaagcag

SEQ ID NO: 10245 - DNA, 20 bp, Artificial Sequence
  Antisense compound
atcaactttaagcctaagca

SEQ ID NO: 10246 - DNA, 20 bp, Artificial Sequence
  Antisense compound
tatcaactttaagcctaagc

SEQ ID NO: 10247 - DNA, 20 bp, Artificial Sequence
  Antisense compound
gtatcaactttaagcctaag

SEQ ID NO: 10248 - DNA, 20 bp, Artificial Sequence
  Antisense compound
agtatcaactttaagcctaa

SEQ ID NO: 10249 - DNA, 20 bp, Artificial Sequence
  Antisense compound
aagtatcaactttaagccta

SEQ ID NO: 10250 - DNA, 20 bp, Artificial Sequence
  Antisense compound
gaagtatcaactttaagcct

SEQ ID NO: 10251 - DNA, 20 bp, Artificial Sequence
  Antisense compound
agaagtatcaactttaagcc

SEQ ID NO: 10252 - DNA, 20 bp, Artificial Sequence
  Antisense compound
tagaagtatcaactttaagc

SEQ ID NO: 10253 - DNA, 20 bp, Artificial Sequence
  Antisense compound
ttagaagtatcaactttaag

SEQ ID NO: 10254 - DNA, 20 bp, Artificial Sequence
  Antisense compound
gttagaagtatcaactttaa

SEQ ID NO: 10255 - DNA, 20 bp, Artificial Sequence
  Antisense compound
ggttagaagtatcaacttta

SEQ ID NO: 10256 - DNA, 20 bp, Artificial Sequence
  Antisense compound
gggttagaagtatcaacttt

SEQ ID NO: 10257 - DNA, 20 bp, Artificial Sequence
  Antisense compound
agggttagaagtatcaactt

SEQ ID NO: 10258 - DNA, 20 bp, Artificial Sequence
  Antisense compound
tagggttagaagtatcaact

SEQ ID NO: 10259 - DNA, 20 bp, Artificial Sequence
  Antisense compound
ttagggttagaagtatcaac

SEQ ID NO: 10260 - DNA, 20 bp, Artificial Sequence
  Antisense compound
cttagggttagaagtatcaa

SEQ ID NO: 10261 - DNA, 20 bp, Artificial Sequence
  Antisense compound
tcttagggttagaagtatca

SEQ ID NO: 10262 - DNA, 20 bp, Artificial Sequence
  Antisense compound
gtcttagggttagaagtatc

SEQ ID NO: 10263 - DNA, 20 bp, Artificial Sequence
  Antisense compound
tgtcttagggttagaagtat

SEQ ID NO: 10264 - DNA, 20 bp, Artificial Sequence
  Antisense compound
gtgtcttagggttagaagta

SEQ ID NO: 10265 - DNA, 20 bp, Artificial Sequence
  Antisense compound
ggtgtcttagggttagaagt

SEQ ID NO: 10266 - DNA, 20 bp, Artificial Sequence
  Antisense compound
gggtgtcttagggttagaag

SEQ ID NO: 10267 - DNA, 20 bp, Artificial Sequence
  Antisense compound
tgggtgtcttagggttagaa

SEQ ID NO: 10268 - DNA, 20 bp, Artificial Sequence
  Antisense compound
ttgggtgtcttagggttaga

SEQ ID NO: 10269 - DNA, 20 bp, Artificial Sequence
  Antisense compound
cttgggtgtcttagggttag

SEQ ID NO: 10270 - DNA, 20 bp, Artificial Sequence
  Antisense compound
acttgggtgtcttagggtta

SEQ ID NO: 10271 - DNA, 20 bp, Artificial Sequence
  Antisense compound
tacttgggtgtcttagggtt

SEQ ID NO: 10272 - DNA, 20 bp, Artificial Sequence
  Antisense compound
atacttgggtgtcttagggt

SEQ ID NO: 10273 - DNA, 20 bp, Artificial Sequence
  Antisense compound
tatacttgggtgtcttaggg

SEQ ID NO: 10274 - DNA, 20 bp, Artificial Sequence
  Antisense compound
ttatacttgggtgtcttagg

SEQ ID NO: 10275 - DNA, 20 bp, Artificial Sequence
  Antisense compound
tttatacttgggtgtcttag

SEQ ID NO: 10276 - DNA, 20 bp, Artificial Sequence
  Antisense compound
atttatacttgggtgtctta

SEQ ID NO: 10277 - DNA, 20 bp, Artificial Sequence
  Antisense compound
aatttatacttgggtgtctt

SEQ ID NO: 10278 - DNA, 20 bp, Artificial Sequence
  Antisense compound
aaatttatacttgggtgtct

SEQ ID NO: 10279 - DNA, 20 bp, Artificial Sequence
  Antisense compound
caaatttatacttgggtgtc

SEQ ID NO: 10280 - DNA, 20 bp, Artificial Sequence
  Antisense compound
acaaatttatacttgggtgt

SEQ ID NO: 10281 - DNA, 20 bp, Artificial Sequence
  Antisense compound
gacaaatttatacttgggtg

SEQ ID NO: 10282 - DNA, 20 bp, Artificial Sequence
  Antisense compound
ggacaaatttatacttgggt

SEQ ID NO: 10283 - DNA, 20 bp, Artificial Sequence
  Antisense compound
cggacaaatttatacttggg

SEQ ID NO: 10284 - DNA, 20 bp, Artificial Sequence
  Antisense compound
acggacaaatttatacttgg

SEQ ID NO: 10285 - DNA, 20 bp, Artificial Sequence
  Antisense compound
tacggacaaatttatacttg

SEQ ID NO: 10286 - DNA, 20 bp, Artificial Sequence
  Antisense compound
atacggacaaatttatactt

SEQ ID NO: 10287 - DNA, 20 bp, Artificial Sequence
  Antisense compound
gatacggacaaatttatact

SEQ ID NO: 10288 - DNA, 20 bp, Artificial Sequence
  Antisense compound
ggatacggacaaatttatac

SEQ ID NO: 10289 - DNA, 20 bp, Artificial Sequence
  Antisense compound
tggatacggacaaatttata

SEQ ID NO: 10290 - DNA, 20 bp, Artificial Sequence
  Antisense compound
ttggatacggacaaatttat

SEQ ID NO: 10291 - DNA, 20 bp, Artificial Sequence
  Antisense compound
gttggatacggacaaattta

SEQ ID NO: 10292 - DNA, 20 bp, Artificial Sequence
  Antisense compound
ggttggatacggacaaattt

SEQ ID NO: 10293 - DNA, 20 bp, Artificial Sequence
  Antisense compound
aggttggatacggacaaatt

SEQ ID NO: 10294 - DNA, 20 bp, Artificial Sequence
  Antisense compound
caggttggatacggacaaat

SEQ ID NO: 10295 - DNA, 20 bp, Artificial Sequence
  Antisense compound
ccaggttggatacggacaaa

SEQ ID NO: 10296 - DNA, 20 bp, Artificial Sequence
  Antisense compound
accaggttggatacggacaa

SEQ ID NO: 10297 - DNA, 20 bp, Artificial Sequence
  Antisense compound
gaccaggttggatacggaca

SEQ ID NO: 10298 - DNA, 20 bp, Artificial Sequence
  Antisense compound
tgaccaggttggatacggac

SEQ ID NO: 10299 - DNA, 20 bp, Artificial Sequence
  Antisense compound
ttgaccaggttggatacgga

SEQ ID NO: 10300 - DNA, 20 bp, Artificial Sequence
  Antisense compound
tttgaccaggttggatacgg

SEQ ID NO: 10301 - DNA, 20 bp, Artificial Sequence
  Antisense compound
gtttgaccaggttggatacg

SEQ ID NO: 10302 - DNA, 20 bp, Artificial Sequence
  Antisense compound
tgtttgaccaggttggatac

SEQ ID NO: 10303 - DNA, 20 bp, Artificial Sequence
  Antisense compound
atgtttgaccaggttggata

SEQ ID NO: 10304 - DNA, 20 bp, Artificial Sequence
  Antisense compound
aatgtttgaccaggttggat

SEQ ID NO: 10305 - DNA, 20 bp, Artificial Sequence
  Antisense compound
aaatgtttgaccaggttgga

SEQ ID NO: 10306 - DNA, 20 bp, Artificial Sequence
  Antisense compound
aaaatgtttgaccaggttgg

SEQ ID NO: 10307 - DNA, 20 bp, Artificial Sequence
  Antisense compound
gaaaatgtttgaccaggttg

SEQ ID NO: 10308 - DNA, 20 bp, Artificial Sequence
  Antisense compound
tgaaaatgtttgaccaggtt

SEQ ID NO: 10309 - DNA, 20 bp, Artificial Sequence
  Antisense compound
ctgaaaatgtttgaccaggt

SEQ ID NO: 10310 - DNA, 20 bp, Artificial Sequence
  Antisense compound
actgaaaatgtttgaccagg

SEQ ID NO: 10311 - DNA, 20 bp, Artificial Sequence
  Antisense compound
aactgaaaatgtttgaccag

SEQ ID NO: 10312 - DNA, 20 bp, Artificial Sequence
  Antisense compound
gaactgaaaatgtttgacca

SEQ ID NO: 10313 - DNA, 20 bp, Artificial Sequence
  Antisense compound
agaactgaaaatgtttgacc

SEQ ID NO: 10314 - DNA, 20 bp, Artificial Sequence
  Antisense compound
tagaactgaaaatgtttgac

SEQ ID NO: 10315 - DNA, 20 bp, Artificial Sequence
  Antisense compound
ctagaactgaaaatgtttga

SEQ ID NO: 10316 - DNA, 20 bp, Artificial Sequence
  Antisense compound
gctagaactgaaaatgtttg

SEQ ID NO: 10317 - DNA, 20 bp, Artificial Sequence
  Antisense compound
tgctagaactgaaaatgttt

SEQ ID NO: 10318 - DNA, 20 bp, Artificial Sequence
  Antisense compound
atgctagaactgaaaatgtt

SEQ ID NO: 10319 - DNA, 20 bp, Artificial Sequence
  Antisense compound
catgctagaactgaaaatgt

SEQ ID NO: 10320 - DNA, 20 bp, Artificial Sequence
  Antisense compound
gcatgctagaactgaaaatg

SEQ ID NO: 10321 - DNA, 20 bp, Artificial Sequence
  Antisense compound
agcatgctagaactgaaaat

SEQ ID NO: 10322 - DNA, 20 bp, Artificial Sequence
  Antisense compound
tagcatgctagaactgaaaa

SEQ ID NO: 10323 - DNA, 20 bp, Artificial Sequence
  Antisense compound
gtagcatgctagaactgaaa

SEQ ID NO: 10324 - DNA, 20 bp, Artificial Sequence
  Antisense compound
tgtagcatgctagaactgaa

SEQ ID NO: 10325 - DNA, 20 bp, Artificial Sequence
  Antisense compound
ttgtagcatgctagaactga

SEQ ID NO: 10326 - DNA, 20 bp, Artificial Sequence
  Antisense compound
attgtagcatgctagaactg

SEQ ID NO: 10327 - DNA, 20 bp, Artificial Sequence
  Antisense compound
cattgtagcatgctagaact

SEQ ID NO: 10328 - DNA, 20 bp, Artificial Sequence
  Antisense compound
ccattgtagcatgctagaac

SEQ ID NO: 10329 - DNA, 20 bp, Artificial Sequence
  Antisense compound
accattgtagcatgctagaa

SEQ ID NO: 10330 - DNA, 20 bp, Artificial Sequence
  Antisense compound
aaccattgtagcatgctaga

SEQ ID NO: 10331 - DNA, 20 bp, Artificial Sequence
  Antisense compound
gaaccattgtagcatgctag

SEQ ID NO: 10332 - DNA, 20 bp, Artificial Sequence
  Antisense compound
tgaaccattgtagcatgcta

SEQ ID NO: 10333 - DNA, 20 bp, Artificial Sequence
  Antisense compound
gtgaaccattgtagcatgct

SEQ ID NO: 10334 - DNA, 20 bp, Artificial Sequence
  Antisense compound
ggtgaaccattgtagcatgc

SEQ ID NO: 10335 - DNA, 20 bp, Artificial Sequence
  Antisense compound
tggtgaaccattgtagcatg

SEQ ID NO: 10336 - DNA, 20 bp, Artificial Sequence
  Antisense compound
atggtgaaccattgtagcat

SEQ ID NO: 10337 - DNA, 20 bp, Artificial Sequence
  Antisense compound
gatggtgaaccattgtagca

SEQ ID NO: 10338 - DNA, 20 bp, Artificial Sequence
  Antisense compound
agatggtgaaccattgtagc

SEQ ID NO: 10339 - DNA, 20 bp, Artificial Sequence
  Antisense compound
cagatggtgaaccattgtag

SEQ ID NO: 10340 - DNA, 20 bp, Artificial Sequence
  Antisense compound
ccagatggtgaaccattgta

SEQ ID NO: 10341 - DNA, 20 bp, Artificial Sequence
  Antisense compound
accagatggtgaaccattgt

SEQ ID NO: 10342 - DNA, 20 bp, Artificial Sequence
  Antisense compound
caccagatggtgaaccattg

SEQ ID NO: 10343 - DNA, 20 bp, Artificial Sequence
  Antisense compound
acaccagatggtgaaccatt

SEQ ID NO: 10344 - DNA, 20 bp, Artificial Sequence
  Antisense compound
aacaccagatggtgaaccat

SEQ ID NO: 10345 - DNA, 20 bp, Artificial Sequence
  Antisense compound
aaacaccagatggtgaacca

SEQ ID NO: 10346 - DNA, 20 bp, Artificial Sequence
  Antisense compound
taaacaccagatggtgaacc

SEQ ID NO: 10347 - DNA, 20 bp, Artificial Sequence
  Antisense compound
ataaacaccagatggtgaac

SEQ ID NO: 10348 - DNA, 20 bp, Artificial Sequence
  Antisense compound
gataaacaccagatggtgaa

SEQ ID NO: 10349 - DNA, 20 bp, Artificial Sequence
  Antisense compound
tgataaacaccagatggtga

SEQ ID NO: 10350 - DNA, 20 bp, Artificial Sequence
  Antisense compound
ctgataaacaccagatggtg

SEQ ID NO: 10351 - DNA, 20 bp, Artificial Sequence
  Antisense compound
actgataaacaccagatggt

SEQ ID NO: 10352 - DNA, 20 bp, Artificial Sequence
  Antisense compound
cactgataaacaccagatgg

SEQ ID NO: 10353 - DNA, 20 bp, Artificial Sequence
  Antisense compound
acactgataaacaccagatg

SEQ ID NO: 10354 - DNA, 20 bp, Artificial Sequence
  Antisense compound
cacactgataaacaccagat

SEQ ID NO: 10355 - DNA, 20 bp, Artificial Sequence
  Antisense compound
gcacactgataaacaccaga

SEQ ID NO: 10356 - DNA, 20 bp, Artificial Sequence
  Antisense compound
ggcacactgataaacaccag

SEQ ID NO: 10357 - DNA, 20 bp, Artificial Sequence
  Antisense compound
tggcacactgataaacacca

SEQ ID NO: 10358 - DNA, 20 bp, Artificial Sequence
  Antisense compound
atggcacactgataaacacc

SEQ ID NO: 10359 - DNA, 20 bp, Artificial Sequence
  Antisense compound
catggcacactgataaacac

SEQ ID NO: 10360 - DNA, 20 bp, Artificial Sequence
  Antisense compound
tcatggcacactgataaaca

SEQ ID NO: 10361 - DNA, 20 bp, Artificial Sequence
  Antisense compound
ctcatggcacactgataaac

SEQ ID NO: 10362 - DNA, 20 bp, Artificial Sequence
  Antisense compound
tctcatggcacactgataaa

SEQ ID NO: 10363 - DNA, 20 bp, Artificial Sequence
  Antisense compound
gtctcatggcacactgataa

SEQ ID NO: 10364 - DNA, 20 bp, Artificial Sequence
  Antisense compound
ggtctcatggcacactgata

SEQ ID NO: 10365 - DNA, 20 bp, Artificial Sequence
  Antisense compound
aggtctcatggcacactgat

SEQ ID NO: 10366 - DNA, 20 bp, Artificial Sequence
  Antisense compound
taggtctcatggcacactga

SEQ ID NO: 10367 - DNA, 20 bp, Artificial Sequence
  Antisense compound
ttaggtctcatggcacactg

SEQ ID NO: 10368 - DNA, 20 bp, Artificial Sequence
  Antisense compound
attaggtctcatggcacact

SEQ ID NO: 10369 - DNA, 20 bp, Artificial Sequence
  Antisense compound
gattaggtctcatggcacac

SEQ ID NO: 10370 - DNA, 20 bp, Artificial Sequence
  Antisense compound
tgattaggtctcatggcaca

SEQ ID NO: 10371 - DNA, 20 bp, Artificial Sequence
  Antisense compound
atgattaggtctcatggcac

SEQ ID NO: 10372 - DNA, 20 bp, Artificial Sequence
  Antisense compound
tatgattaggtctcatggca

SEQ ID NO: 10373 - DNA, 20 bp, Artificial Sequence
  Antisense compound
gtatgattaggtctcatggc

SEQ ID NO: 10374 - DNA, 20 bp, Artificial Sequence
  Antisense compound
ggtatgattaggtctcatgg

SEQ ID NO: 10375 - DNA, 20 bp, Artificial Sequence
  Antisense compound
tggtatgattaggtctcatg

SEQ ID NO: 10376 - DNA, 20 bp, Artificial Sequence
  Antisense compound
atggtatgattaggtctcat

SEQ ID NO: 10377 - DNA, 20 bp, Artificial Sequence
  Antisense compound
aatggtatgattaggtctca

SEQ ID NO: 10378 - DNA, 20 bp, Artificial Sequence
  Antisense compound
taatggtatgattaggtctc

SEQ ID NO: 10379 - DNA, 20 bp, Artificial Sequence
  Antisense compound
ttaatggtatgattaggtct

SEQ ID NO: 10380 - DNA, 20 bp, Artificial Sequence
  Antisense compound
tttaatggtatgattaggtc

SEQ ID NO: 10381 - DNA, 20 bp, Artificial Sequence
  Antisense compound
ctttaatggtatgattaggt

SEQ ID NO: 10382 - DNA, 20 bp, Artificial Sequence
  Antisense compound
cctttaatggtatgattagg

SEQ ID NO: 10383 - DNA, 20 bp, Artificial Sequence
  Antisense compound
acctttaatggtatgattag

SEQ ID NO: 10384 - DNA, 20 bp, Artificial Sequence
  Antisense compound
aacctttaatggtatgatta

SEQ ID NO: 10385 - DNA, 20 bp, Artificial Sequence
  Antisense compound
gaacctttaatggtatgatt

SEQ ID NO: 10386 - DNA, 20 bp, Artificial Sequence
  Antisense compound
agaacctttaatggtatgat

SEQ ID NO: 10387 - DNA, 20 bp, Artificial Sequence
  Antisense compound
aagaacctttaatggtatga

SEQ ID NO: 10388 - DNA, 20 bp, Artificial Sequence
  Antisense compound
aaagaacctttaatggtatg

SEQ ID NO: 10389 - DNA, 20 bp, Artificial Sequence
  Antisense compound
gaaagaacctttaatggtat

SEQ ID NO: 10390 - DNA, 20 bp, Artificial Sequence
  Antisense compound
ggaaagaacctttaatggta

SEQ ID NO: 10391 - DNA, 20 bp, Artificial Sequence
  Antisense compound
aggaaagaacctttaatggt

SEQ ID NO: 10392 - DNA, 20 bp, Artificial Sequence
  Antisense compound
aaggaaagaacctttaatgg

SEQ ID NO: 10393 - DNA, 20 bp, Artificial Sequence
  Antisense compound
taaggaaagaacctttaatg

SEQ ID NO: 10394 - DNA, 20 bp, Artificial Sequence
  Antisense compound
ttaaggaaagaacctttaat

SEQ ID NO: 10395 - DNA, 20 bp, Artificial Sequence
  Antisense compound
attaaggaaagaacctttaa

SEQ ID NO: 10396 - DNA, 20 bp, Artificial Sequence
  Antisense compound
cattaaggaaagaaccttta

SEQ ID NO: 10397 - DNA, 20 bp, Artificial Sequence
  Antisense compound
ccattaaggaaagaaccttt

SEQ ID NO: 10398 - DNA, 20 bp, Artificial Sequence
  Antisense compound
tccattaaggaaagaacctt

SEQ ID NO: 10399 - DNA, 20 bp, Artificial Sequence
  Antisense compound
atccattaaggaaagaacct

SEQ ID NO: 10400 - DNA, 20 bp, Artificial Sequence
  Antisense compound
gatccattaaggaaagaacc

SEQ ID NO: 10401 - DNA, 20 bp, Artificial Sequence
  Antisense compound
tgatccattaaggaaagaac

SEQ ID NO: 10402 - DNA, 20 bp, Artificial Sequence
  Antisense compound
atgatccattaaggaaagaa

SEQ ID NO: 10403 - DNA, 20 bp, Artificial Sequence
  Antisense compound
catgatccattaaggaaaga

SEQ ID NO: 10404 - DNA, 20 bp, Artificial Sequence
  Antisense compound
acatgatccattaaggaaag

SEQ ID NO: 10405 - DNA, 20 bp, Artificial Sequence
  Antisense compound
cacatgatccattaaggaaa

SEQ ID NO: 10406 - DNA, 20 bp, Artificial Sequence
  Antisense compound
ccacatgatccattaaggaa

SEQ ID NO: 10407 - DNA, 20 bp, Artificial Sequence
  Antisense compound
accacatgatccattaagga

SEQ ID NO: 10408 - DNA, 20 bp, Artificial Sequence
  Antisense compound
taccacatgatccattaagg

SEQ ID NO: 10409 - DNA, 20 bp, Artificial Sequence
  Antisense compound
ctaccacatgatccattaag

SEQ ID NO: 10410 - DNA, 20 bp, Artificial Sequence
  Antisense compound
actaccacatgatccattaa

SEQ ID NO: 10411 - DNA, 20 bp, Artificial Sequence
  Antisense compound
cactaccacatgatccatta

SEQ ID NO: 10412 - DNA, 20 bp, Artificial Sequence
  Antisense compound
acactaccacatgatccatt

SEQ ID NO: 10413 - DNA, 20 bp, Artificial Sequence
  Antisense compound
aacactaccacatgatccat

SEQ ID NO: 10414 - DNA, 20 bp, Artificial Sequence
  Antisense compound
caacactaccacatgatcca

SEQ ID NO: 10415 - DNA, 20 bp, Artificial Sequence
  Antisense compound
ccaacactaccacatgatcc

SEQ ID NO: 10416 - DNA, 20 bp, Artificial Sequence
  Antisense compound
accaacactaccacatgatc

SEQ ID NO: 10417 - DNA, 20 bp, Artificial Sequence
  Antisense compound
aaccaacactaccacatgat

SEQ ID NO: 10418 - DNA, 20 bp, Artificial Sequence
  Antisense compound
aaaccaacactaccacatga

SEQ ID NO: 10419 - DNA, 20 bp, Artificial Sequence
  Antisense compound
aaaaccaacactaccacatg

SEQ ID NO: 10420 - DNA, 20 bp, Artificial Sequence
  Antisense compound
taaaaccaacactaccacat

SEQ ID NO: 10421 - DNA, 20 bp, Artificial Sequence
  Antisense compound
ttaaaaccaacactaccaca

SEQ ID NO: 10422 - DNA, 20 bp, Artificial Sequence
  Antisense compound
gttaaaaccaacactaccac

SEQ ID NO: 10423 - DNA, 20 bp, Artificial Sequence
  Antisense compound
tgttaaaaccaacactacca

SEQ ID NO: 10424 - DNA, 20 bp, Artificial Sequence
  Antisense compound
atgttaaaaccaacactacc

SEQ ID NO: 10425 - DNA, 20 bp, Artificial Sequence
  Antisense compound
aatgttaaaaccaacactac

SEQ ID NO: 10426 - DNA, 20 bp, Artificial Sequence
  Antisense compound
caatgttaaaaccaacacta

SEQ ID NO: 10427 - DNA, 20 bp, Artificial Sequence
  Antisense compound
tcaatgttaaaaccaacact

SEQ ID NO: 10428 - DNA, 20 bp, Artificial Sequence
  Antisense compound
atcaatgttaaaaccaacac

SEQ ID NO: 10429 - DNA, 20 bp, Artificial Sequence
  Antisense compound
aatcaatgttaaaaccaaca

SEQ ID NO: 10430 - DNA, 20 bp, Artificial Sequence
  Antisense compound
taatcaatgttaaaaccaac

SEQ ID NO: 10431 - DNA, 20 bp, Artificial Sequence
  Antisense compound
ataatcaatgttaaaaccaa

SEQ ID NO: 10432 - DNA, 20 bp, Artificial Sequence
  Antisense compound
cataatcaatgttaaaacca

SEQ ID NO: 10433 - DNA, 20 bp, Artificial Sequence
  Antisense compound
tcataatcaatgttaaaacc

SEQ ID NO: 10434 - DNA, 20 bp, Artificial Sequence
  Antisense compound
atcataatcaatgttaaaac

SEQ ID NO: 10435 - DNA, 20 bp, Artificial Sequence
  Antisense compound
aatcataatcaatgttaaaa

SEQ ID NO: 10436 - DNA, 20 bp, Artificial Sequence
  Antisense compound
caatcataatcaatgttaaa

SEQ ID NO: 10437 - DNA, 20 bp, Artificial Sequence
  Antisense compound
gcaatcataatcaatgttaa

SEQ ID NO: 10438 - DNA, 20 bp, Artificial Sequence
  Antisense compound
cgcaatcataatcaatgtta

SEQ ID NO: 10439 - DNA, 20 bp, Artificial Sequence
  Antisense compound
acgcaatcataatcaatgtt

SEQ ID NO: 10440 - DNA, 20 bp, Artificial Sequence
  Antisense compound
cacgcaatcataatcaatgt

SEQ ID NO: 10441 - DNA, 20 bp, Artificial Sequence
  Antisense compound
acacgcaatcataatcaatg

SEQ ID NO: 10442 - DNA, 20 bp, Artificial Sequence
  Antisense compound
gacacgcaatcataatcaat

SEQ ID NO: 10443 - DNA, 20 bp, Artificial Sequence
  Antisense compound
agacacgcaatcataatcaa

SEQ ID NO: 10444 - DNA, 20 bp, Artificial Sequence
  Antisense compound
aagacacgcaatcataatca

SEQ ID NO: 10445 - DNA, 20 bp, Artificial Sequence
  Antisense compound
aaagacacgcaatcataatc

SEQ ID NO: 10446 - DNA, 20 bp, Artificial Sequence
  Antisense compound
gaaagacacgcaatcataat

SEQ ID NO: 10447 - DNA, 20 bp, Artificial Sequence
  Antisense compound
agaaagacacgcaatcataa

SEQ ID NO: 10448 - DNA, 20 bp, Artificial Sequence
  Antisense compound
cagaaagacacgcaatcata

SEQ ID NO: 10449 - DNA, 20 bp, Artificial Sequence
  Antisense compound
gcagaaagacacgcaatcat

SEQ ID NO: 10450 - DNA, 20 bp, Artificial Sequence
  Antisense compound
agcagaaagacacgcaatca

SEQ ID NO: 10451 - DNA, 20 bp, Artificial Sequence
  Antisense compound
tagcagaaagacacgcaatc

SEQ ID NO: 10452 - DNA, 20 bp, Artificial Sequence
  Antisense compound
atagcagaaagacacgcaat

SEQ ID NO: 10453 - DNA, 20 bp, Artificial Sequence
  Antisense compound
tatagcagaaagacacgcaa

SEQ ID NO: 10454 - DNA, 20 bp, Artificial Sequence
  Antisense compound
atatagcagaaagacacgca

SEQ ID NO: 10455 - DNA, 20 bp, Artificial Sequence
  Antisense compound
catatagcagaaagacacgc

SEQ ID NO: 10456 - DNA, 20 bp, Artificial Sequence
  Antisense compound
gcatatagcagaaagacacg

SEQ ID NO: 10457 - DNA, 20 bp, Artificial Sequence
  Antisense compound
tgcatatagcagaaagacac

SEQ ID NO: 10458 - DNA, 20 bp, Artificial Sequence
  Antisense compound
atgcatatagcagaaagaca

SEQ ID NO: 10459 - DNA, 20 bp, Artificial Sequence
  Antisense compound
gatgcatatagcagaaagac

SEQ ID NO: 10460 - DNA, 20 bp, Artificial Sequence
  Antisense compound
tgatgcatatagcagaaaga

SEQ ID NO: 10461 - DNA, 20 bp, Artificial Sequence
  Antisense compound
atgatgcatatagcagaaag

SEQ ID NO: 10462 - DNA, 20 bp, Artificial Sequence
  Antisense compound
tatgatgcatatagcagaaa

SEQ ID NO: 10463 - DNA, 20 bp, Artificial Sequence
  Antisense compound
atatgatgcatatagcagaa

SEQ ID NO: 10464 - DNA, 20 bp, Artificial Sequence
  Antisense compound
catatgatgcatatagcaga

SEQ ID NO: 10465 - DNA, 20 bp, Artificial Sequence
  Antisense compound
ccatatgatgcatatagcag

SEQ ID NO: 10466 - DNA, 20 bp, Artificial Sequence
  Antisense compound
tccatatgatgcatatagca

SEQ ID NO: 10467 - DNA, 20 bp, Artificial Sequence
  Antisense compound
ctccatatgatgcatatagc

SEQ ID NO: 10468 - DNA, 20 bp, Artificial Sequence
  Antisense compound
gctccatatgatgcatatag

SEQ ID NO: 10469 - DNA, 20 bp, Artificial Sequence
  Antisense compound
agctccatatgatgcatata

SEQ ID NO: 10470 - DNA, 20 bp, Artificial Sequence
  Antisense compound
aagctccatatgatgcatat

SEQ ID NO: 10471 - DNA, 20 bp, Artificial Sequence
  Antisense compound
gaagctccatatgatgcata

SEQ ID NO: 10472 - DNA, 20 bp, Artificial Sequence
  Antisense compound
ggaagctccatatgatgcat

SEQ ID NO: 10473 - DNA, 20 bp, Artificial Sequence
  Antisense compound
tggaagctccatatgatgca

SEQ ID NO: 10474 - DNA, 20 bp, Artificial Sequence
  Antisense compound
ttggaagctccatatgatgc

SEQ ID NO: 10475 - DNA, 20 bp, Artificial Sequence
  Antisense compound
gttggaagctccatatgatg

SEQ ID NO: 10476 - DNA, 20 bp, Artificial Sequence
  Antisense compound
tgttggaagctccatatgat

SEQ ID NO: 10477 - DNA, 20 bp, Artificial Sequence
  Antisense compound
ctgttggaagctccatatga

SEQ ID NO: 10478 - DNA, 20 bp, Artificial Sequence
  Antisense compound
cctgttggaagctccatatg

SEQ ID NO: 10479 - DNA, 20 bp, Artificial Sequence
  Antisense compound
tcctgttggaagctccatat

SEQ ID NO: 10480 - DNA, 20 bp, Artificial Sequence
  Antisense compound
ctcctgttggaagctccata

SEQ ID NO: 10481 - DNA, 20 bp, Artificial Sequence
  Antisense compound
actcctgttggaagctccat

SEQ ID NO: 10482 - DNA, 20 bp, Artificial Sequence
  Antisense compound
tactcctgttggaagctcca

SEQ ID NO: 10483 - DNA, 20 bp, Artificial Sequence
  Antisense compound
gtactcctgttggaagctcc

SEQ ID NO: 10484 - DNA, 20 bp, Artificial Sequence
  Antisense compound
tgtactcctgttggaagctc

SEQ ID NO: 10485 - DNA, 20 bp, Artificial Sequence
  Antisense compound
gtgtactcctgttggaagct

SEQ ID NO: 10486 - DNA, 20 bp, Artificial Sequence
  Antisense compound
cgtgtactcctgttggaagc

SEQ ID NO: 10487 - DNA, 20 bp, Artificial Sequence
  Antisense compound
gcgtgtactcctgttggaag

SEQ ID NO: 10488 - DNA, 20 bp, Artificial Sequence
  Antisense compound
agcgtgtactcctgttggaa

SEQ ID NO: 10489 - DNA, 20 bp, Artificial Sequence
  Antisense compound
cagcgtgtactcctgttgga

SEQ ID NO: 10490 - DNA, 20 bp, Artificial Sequence
  Antisense compound
ccagcgtgtactcctgttgg

SEQ ID NO: 10491 - DNA, 20 bp, Artificial Sequence
  Antisense compound
accagcgtgtactcctgttg

SEQ ID NO: 10492 - DNA, 20 bp, Artificial Sequence
  Antisense compound
taccagcgtgtactcctgtt

SEQ ID NO: 10493 - DNA, 20 bp, Artificial Sequence
  Antisense compound
gtaccagcgtgtactcctgt

SEQ ID NO: 10494 - DNA, 20 bp, Artificial Sequence
  Antisense compound
agtaccagcgtgtactcctg

SEQ ID NO: 10495 - DNA, 20 bp, Artificial Sequence
  Antisense compound
cagtaccagcgtgtactcct

SEQ ID NO: 10496 - DNA, 20 bp, Artificial Sequence
  Antisense compound
tcagtaccagcgtgtactcc

SEQ ID NO: 10497 - DNA, 20 bp, Artificial Sequence
  Antisense compound
gtcagtaccagcgtgtactc

SEQ ID NO: 10498 - DNA, 20 bp, Artificial Sequence
  Antisense compound
agtcagtaccagcgtgtact

SEQ ID NO: 10499 - DNA, 20 bp, Artificial Sequence
  Antisense compound
aagtcagtaccagcgtgtac

SEQ ID NO: 10500 - DNA, 20 bp, Artificial Sequence
  Antisense compound
taagtcagtaccagcgtgta

SEQ ID NO: 10501 - DNA, 20 bp, Artificial Sequence
  Antisense compound
ctaagtcagtaccagcgtgt

SEQ ID NO: 10502 - DNA, 20 bp, Artificial Sequence
  Antisense compound
tctaagtcagtaccagcgtg

SEQ ID NO: 10503 - DNA, 20 bp, Artificial Sequence
  Antisense compound
ttctaagtcagtaccagcgt

SEQ ID NO: 10504 - DNA, 20 bp, Artificial Sequence
  Antisense compound
cttctaagtcagtaccagcg

SEQ ID NO: 10505 - DNA, 20 bp, Artificial Sequence
  Antisense compound
ccttctaagtcagtaccagc

SEQ ID NO: 10506 - DNA, 20 bp, Artificial Sequence
  Antisense compound
accttctaagtcagtaccag

SEQ ID NO: 10507 - DNA, 20 bp, Artificial Sequence
  Antisense compound
taccttctaagtcagtacca

SEQ ID NO: 10508 - DNA, 20 bp, Artificial Sequence
  Antisense compound
ttaccttctaagtcagtacc

SEQ ID NO: 10509 - DNA, 20 bp, Artificial Sequence
  Antisense compound
tttaccttctaagtcagtac

SEQ ID NO: 10510 - DNA, 20 bp, Artificial Sequence
  Antisense compound
atttaccttctaagtcagta

SEQ ID NO: 10511 - DNA, 20 bp, Artificial Sequence
  Antisense compound
aatttaccttctaagtcagt

SEQ ID NO: 10512 - DNA, 20 bp, Artificial Sequence
  Antisense compound
gaatttaccttctaagtcag

SEQ ID NO: 10513 - DNA, 20 bp, Artificial Sequence
  Antisense compound
agaatttaccttctaagtca

SEQ ID NO: 10514 - DNA, 20 bp, Artificial Sequence
  Antisense compound
tagaatttaccttctaagtc

SEQ ID NO: 10515 - DNA, 20 bp, Artificial Sequence
  Antisense compound
atagaatttaccttctaagt

SEQ ID NO: 10516 - DNA, 20 bp, Artificial Sequence
  Antisense compound
catagaatttaccttctaag

SEQ ID NO: 10517 - DNA, 20 bp, Artificial Sequence
  Antisense compound
ccatagaatttaccttctaa

SEQ ID NO: 10518 - DNA, 20 bp, Artificial Sequence
  Antisense compound
accatagaatttaccttcta

SEQ ID NO: 10519 - DNA, 20 bp, Artificial Sequence
  Antisense compound
gaccatagaatttaccttct

SEQ ID NO: 10520 - DNA, 20 bp, Artificial Sequence
  Antisense compound
ggaccatagaatttaccttc

SEQ ID NO: 10521 - DNA, 20 bp, Artificial Sequence
  Antisense compound
tggaccatagaatttacctt

SEQ ID NO: 10522 - DNA, 20 bp, Artificial Sequence
  Antisense compound
atggaccatagaatttacct

SEQ ID NO: 10523 - DNA, 20 bp, Artificial Sequence
  Antisense compound
aatggaccatagaatttacc

SEQ ID NO: 10524 - DNA, 20 bp, Artificial Sequence
  Antisense compound
aaatggaccatagaatttac

SEQ ID NO: 10525 - DNA, 20 bp, Artificial Sequence
  Antisense compound
caaatggaccatagaattta

SEQ ID NO: 10526 - DNA, 20 bp, Artificial Sequence
  Antisense compound
acaaatggaccatagaattt

SEQ ID NO: 10527 - DNA, 20 bp, Artificial Sequence
  Antisense compound
aacaaatggaccatagaatt

SEQ ID NO: 10528 - DNA, 20 bp, Artificial Sequence
  Antisense compound
caacaaatggaccatagaat

SEQ ID NO: 10529 - DNA, 20 bp, Artificial Sequence
  Antisense compound
tcaacaaatggaccatagaa

SEQ ID NO: 10530 - DNA, 20 bp, Artificial Sequence
  Antisense compound
gtcaacaaatggaccataga

SEQ ID NO: 10531 - DNA, 20 bp, Artificial Sequence
  Antisense compound
tgtcaacaaatggaccatag

SEQ ID NO: 10532 - DNA, 20 bp, Artificial Sequence
  Antisense compound
ctgtcaacaaatggaccata

SEQ ID NO: 10533 - DNA, 20 bp, Artificial Sequence
  Antisense compound
tctgtcaacaaatggaccat

SEQ ID NO: 10534 - DNA, 20 bp, Artificial Sequence
  Antisense compound
gtctgtcaacaaatggacca

SEQ ID NO: 10535 - DNA, 20 bp, Artificial Sequence
  Antisense compound
tgtctgtcaacaaatggacc

SEQ ID NO: 10536 - DNA, 20 bp, Artificial Sequence
  Antisense compound
ttgtctgtcaacaaatggac

SEQ ID NO: 10537 - DNA, 20 bp, Artificial Sequence
  Antisense compound
tttgtctgtcaacaaatgga

SEQ ID NO: 10538 - DNA, 20 bp, Artificial Sequence
  Antisense compound
gtttgtctgtcaacaaatgg

SEQ ID NO: 10539 - DNA, 20 bp, Artificial Sequence
  Antisense compound
agtttgtctgtcaacaaatg

SEQ ID NO: 10540 - DNA, 20 bp, Artificial Sequence
  Antisense compound
cagtttgtctgtcaacaaat

SEQ ID NO: 10541 - DNA, 20 bp, Artificial Sequence
  Antisense compound
gcagtttgtctgtcaacaaa

SEQ ID NO: 10542 - DNA, 20 bp, Artificial Sequence
  Antisense compound
tgcagtttgtctgtcaacaa

SEQ ID NO: 10543 - DNA, 20 bp, Artificial Sequence
  Antisense compound
gtgcagtttgtctgtcaaca

SEQ ID NO: 10544 - DNA, 20 bp, Artificial Sequence
  Antisense compound
tgtgcagtttgtctgtcaac

SEQ ID NO: 10545 - DNA, 20 bp, Artificial Sequence
  Antisense compound
ctgtgcagtttgtctgtcaa

SEQ ID NO: 10546 - DNA, 20 bp, Artificial Sequence
  Antisense compound
cctgtgcagtttgtctgtca

SEQ ID NO: 10547 - DNA, 20 bp, Artificial Sequence
  Antisense compound
gcctgtgcagtttgtctgtc

SEQ ID NO: 10548 - DNA, 20 bp, Artificial Sequence
  Antisense compound
agcctgtgcagtttgtctgt

SEQ ID NO: 10549 - DNA, 20 bp, Artificial Sequence
  Antisense compound
cagcctgtgcagtttgtctg

SEQ ID NO: 10550 - DNA, 20 bp, Artificial Sequence
  Antisense compound
gcagcctgtgcagtttgtct

SEQ ID NO: 10551 - DNA, 20 bp, Artificial Sequence
  Antisense compound
tgcagcctgtgcagtttgtc

SEQ ID NO: 10552 - DNA, 20 bp, Artificial Sequence
  Antisense compound
ctgcagcctgtgcagtttgt

SEQ ID NO: 10553 - DNA, 20 bp, Artificial Sequence
  Antisense compound
cctgcagcctgtgcagtttg

SEQ ID NO: 10554 - DNA, 20 bp, Artificial Sequence
  Antisense compound
acctgcagcctgtgcagttt

SEQ ID NO: 10555 - DNA, 20 bp, Artificial Sequence
  Antisense compound
tacctgcagcctgtgcagtt

SEQ ID NO: 10556 - DNA, 20 bp, Artificial Sequence
  Antisense compound
gtacctgcagcctgtgcagt

SEQ ID NO: 10557 - DNA, 20 bp, Artificial Sequence
  Antisense compound
tgtacctgcagcctgtgcag

SEQ ID NO: 10558 - DNA, 20 bp, Artificial Sequence
  Antisense compound
ctgtacctgcagcctgtgca

SEQ ID NO: 10559 - DNA, 20 bp, Artificial Sequence
  Antisense compound
tctgtacctgcagcctgtgc

SEQ ID NO: 10560 - DNA, 20 bp, Artificial Sequence
  Antisense compound
gtctgtacctgcagcctgtg

SEQ ID NO: 10561 - DNA, 20 bp, Artificial Sequence
  Antisense compound
tgtctgtacctgcagcctgt

SEQ ID NO: 10562 - DNA, 20 bp, Artificial Sequence
  Antisense compound
gtgtctgtacctgcagcctg

SEQ ID NO: 10563 - DNA, 20 bp, Artificial Sequence
  Antisense compound
tgtgtctgtacctgcagcct

SEQ ID NO: 10564 - DNA, 20 bp, Artificial Sequence
  Antisense compound
ttgtgtctgtacctgcagcc

SEQ ID NO: 10565 - DNA, 20 bp, Artificial Sequence
  Antisense compound
gttgtgtctgtacctgcagc

SEQ ID NO: 10566 - DNA, 20 bp, Artificial Sequence
  Antisense compound
ggttgtgtctgtacctgcag

SEQ ID NO: 10567 - DNA, 20 bp, Artificial Sequence
  Antisense compound
tggttgtgtctgtacctgca

SEQ ID NO: 10568 - DNA, 20 bp, Artificial Sequence
  Antisense compound
atggttgtgtctgtacctgc

SEQ ID NO: 10569 - DNA, 20 bp, Artificial Sequence
  Antisense compound
tatggttgtgtctgtacctg

SEQ ID NO: 10570 - DNA, 20 bp, Artificial Sequence
  Antisense compound
ttatggttgtgtctgtacct

SEQ ID NO: 10571 - DNA, 20 bp, Artificial Sequence
  Antisense compound
gttatggttgtgtctgtacc

SEQ ID NO: 10572 - DNA, 20 bp, Artificial Sequence
  Antisense compound
tgttatggttgtgtctgtac

SEQ ID NO: 10573 - DNA, 20 bp, Artificial Sequence
  Antisense compound
atgttatggttgtgtctgta

SEQ ID NO: 10574 - DNA, 20 bp, Artificial Sequence
  Antisense compound
aatgttatggttgtgtctgt

SEQ ID NO: 10575 - DNA, 20 bp, Artificial Sequence
  Antisense compound
taatgttatggttgtgtctg

SEQ ID NO: 10576 - DNA, 20 bp, Artificial Sequence
  Antisense compound
ttaatgttatggttgtgtct

SEQ ID NO: 10577 - DNA, 20 bp, Artificial Sequence
  Antisense compound
tttaatgttatggttgtgtc

SEQ ID NO: 10578 - DNA, 20 bp, Artificial Sequence
  Antisense compound
atttaatgttatggttgtgt

SEQ ID NO: 10579 - DNA, 20 bp, Artificial Sequence
  Antisense compound
catttaatgttatggttgtg

SEQ ID NO: 10580 - DNA, 20 bp, Artificial Sequence
  Antisense compound
acatttaatgttatggttgt

SEQ ID NO: 10581 - DNA, 20 bp, Artificial Sequence
  Antisense compound
aacatttaatgttatggttg

SEQ ID NO: 10582 - DNA, 20 bp, Artificial Sequence
  Antisense compound
aaacatttaatgttatggtt

SEQ ID NO: 10583 - DNA, 20 bp, Artificial Sequence
  Antisense compound
aaaacatttaatgttatggt

SEQ ID NO: 10584 - DNA, 20 bp, Artificial Sequence
  Antisense compound
caaaacatttaatgttatgg

SEQ ID NO: 10585 - DNA, 20 bp, Artificial Sequence
  Antisense compound
ccaaaacatttaatgttatg

SEQ ID NO: 10586 - DNA, 20 bp, Artificial Sequence
  Antisense compound
gccaaaacatttaatgttat

SEQ ID NO: 10587 - DNA, 20 bp, Artificial Sequence
  Antisense compound
tgccaaaacatttaatgtta

SEQ ID NO: 10588 - DNA, 20 bp, Artificial Sequence
  Antisense compound
atgccaaaacatttaatgtt

SEQ ID NO: 10589 - DNA, 20 bp, Artificial Sequence
  Antisense compound
catgccaaaacatttaatgt

SEQ ID NO: 10590 - DNA, 20 bp, Artificial Sequence
  Antisense compound
ccatgccaaaacatttaatg

SEQ ID NO: 10591 - DNA, 20 bp, Artificial Sequence
  Antisense compound
gccatgccaaaacatttaat

SEQ ID NO: 10592 - DNA, 20 bp, Artificial Sequence
  Antisense compound
agccatgccaaaacatttaa

SEQ ID NO: 10593 - DNA, 20 bp, Artificial Sequence
  Antisense compound
cagccatgccaaaacattta

SEQ ID NO: 10594 - DNA, 20 bp, Artificial Sequence
  Antisense compound
acagccatgccaaaacattt

SEQ ID NO: 10595 - DNA, 20 bp, Artificial Sequence
  Antisense compound
tacagccatgccaaaacatt

SEQ ID NO: 10596 - DNA, 20 bp, Artificial Sequence
  Antisense compound
atacagccatgccaaaacat

SEQ ID NO: 10597 - DNA, 20 bp, Artificial Sequence
  Antisense compound
catacagccatgccaaaaca

SEQ ID NO: 10598 - DNA, 20 bp, Artificial Sequence
  Antisense compound
gcatacagccatgccaaaac

SEQ ID NO: 10599 - DNA, 20 bp, Artificial Sequence
  Antisense compound
agcatacagccatgccaaaa

SEQ ID NO: 10600 - DNA, 20 bp, Artificial Sequence
  Antisense compound
cagcatacagccatgccaaa

SEQ ID NO: 10601 - DNA, 20 bp, Artificial Sequence
  Antisense compound
gcagcatacagccatgccaa

SEQ ID NO: 10602 - DNA, 20 bp, Artificial Sequence
  Antisense compound
agcagcatacagccatgcca

SEQ ID NO: 10603 - DNA, 20 bp, Artificial Sequence
  Antisense compound
cagcagcatacagccatgcc

SEQ ID NO: 10604 - DNA, 20 bp, Artificial Sequence
  Antisense compound
acagcagcatacagccatgc

SEQ ID NO: 10605 - DNA, 20 bp, Artificial Sequence
  Antisense compound
aacagcagcatacagccatg

SEQ ID NO: 10606 - DNA, 20 bp, Artificial Sequence
  Antisense compound
taacagcagcatacagccat

SEQ ID NO: 10607 - DNA, 20 bp, Artificial Sequence
  Antisense compound
ataacagcagcatacagcca

SEQ ID NO: 10608 - DNA, 20 bp, Artificial Sequence
  Antisense compound
gataacagcagcatacagcc

SEQ ID NO: 10609 - DNA, 20 bp, Artificial Sequence
  Antisense compound
tgataacagcagcatacagc

SEQ ID NO: 10610 - DNA, 20 bp, Artificial Sequence
  Antisense compound
ttgataacagcagcatacag

SEQ ID NO: 10611 - DNA, 20 bp, Artificial Sequence
  Antisense compound
attgataacagcagcataca

SEQ ID NO: 10612 - DNA, 20 bp, Artificial Sequence
  Antisense compound
cattgataacagcagcatac

SEQ ID NO: 10613 - DNA, 20 bp, Artificial Sequence
  Antisense compound
ccattgataacagcagcata

SEQ ID NO: 10614 - DNA, 20 bp, Artificial Sequence
  Antisense compound
accattgataacagcagcat

SEQ ID NO: 10615 - DNA, 20 bp, Artificial Sequence
  Antisense compound
caccattgataacagcagca

SEQ ID NO: 10616 - DNA, 20 bp, Artificial Sequence
  Antisense compound
tcaccattgataacagcagc

SEQ ID NO: 10617 - DNA, 20 bp, Artificial Sequence
  Antisense compound
atcaccattgataacagcag

SEQ ID NO: 10618 - DNA, 20 bp, Artificial Sequence
  Antisense compound
tatcaccattgataacagca

SEQ ID NO: 10619 - DNA, 20 bp, Artificial Sequence
  Antisense compound
ctatcaccattgataacagc

SEQ ID NO: 10620 - DNA, 20 bp, Artificial Sequence
  Antisense compound
cctatcaccattgataacag

SEQ ID NO: 10621 - DNA, 20 bp, Artificial Sequence
  Antisense compound
acctatcaccattgataaca

SEQ ID NO: 10622 - DNA, 20 bp, Artificial Sequence
  Antisense compound
cacctatcaccattgataac

SEQ ID NO: 10623 - DNA, 20 bp, Artificial Sequence
  Antisense compound
ccacctatcaccattgataa

SEQ ID NO: 10624 - DNA, 20 bp, Artificial Sequence
  Antisense compound
accacctatcaccattgata

SEQ ID NO: 10625 - DNA, 20 bp, Artificial Sequence
  Antisense compound
aaccacctatcaccattgat

SEQ ID NO: 10626 - DNA, 20 bp, Artificial Sequence
  Antisense compound
aaaccacctatcaccattga

SEQ ID NO: 10627 - DNA, 20 bp, Artificial Sequence
  Antisense compound
gaaaccacctatcaccattg

SEQ ID NO: 10628 - DNA, 20 bp, Artificial Sequence
  Antisense compound
agaaaccacctatcaccatt

SEQ ID NO: 10629 - DNA, 20 bp, Artificial Sequence
  Antisense compound
aagaaaccacctatcaccat

SEQ ID NO: 10630 - DNA, 20 bp, Artificial Sequence
  Antisense compound
taagaaaccacctatcacca

SEQ ID NO: 10631 - DNA, 20 bp, Artificial Sequence
  Antisense compound
ttaagaaaccacctatcacc

SEQ ID NO: 10632 - DNA, 20 bp, Artificial Sequence
  Antisense compound
attaagaaaccacctatcac

SEQ ID NO: 10633 - DNA, 20 bp, Artificial Sequence
  Antisense compound
tattaagaaaccacctatca

SEQ ID NO: 10634 - DNA, 20 bp, Artificial Sequence
  Antisense compound
ctattaagaaaccacctatc

SEQ ID NO: 10635 - DNA, 20 bp, Artificial Sequence
  Antisense compound
tctattaagaaaccacctat

SEQ ID NO: 10636 - DNA, 20 bp, Artificial Sequence
  Antisense compound
atctattaagaaaccaccta

SEQ ID NO: 10637 - DNA, 20 bp, Artificial Sequence
  Antisense compound
aatctattaagaaaccacct

SEQ ID NO: 10638 - DNA, 20 bp, Artificial Sequence
  Antisense compound
gaatctattaagaaaccacc

SEQ ID NO: 10639 - DNA, 20 bp, Artificial Sequence
  Antisense compound
tgaatctattaagaaaccac

SEQ ID NO: 10640 - DNA, 20 bp, Artificial Sequence
  Antisense compound
gtgaatctattaagaaacca

SEQ ID NO: 10641 - DNA, 20 bp, Artificial Sequence
  Antisense compound
ggtgaatctattaagaaacc

SEQ ID NO: 10642 - DNA, 20 bp, Artificial Sequence
  Antisense compound
tggtgaatctattaagaaac

SEQ ID NO: 10643 - DNA, 20 bp, Artificial Sequence
  Antisense compound
gtggtgaatctattaagaaa

SEQ ID NO: 10644 - DNA, 20 bp, Artificial Sequence
  Antisense compound
agtggtgaatctattaagaa

SEQ ID NO: 10645 - DNA, 20 bp, Artificial Sequence
  Antisense compound
tagtggtgaatctattaaga

SEQ ID NO: 10646 - DNA, 20 bp, Artificial Sequence
  Antisense compound
gtagtggtgaatctattaag

SEQ ID NO: 10647 - DNA, 20 bp, Artificial Sequence
  Antisense compound
agtagtggtgaatctattaa

SEQ ID NO: 10648 - DNA, 20 bp, Artificial Sequence
  Antisense compound
aagtagtggtgaatctatta

SEQ ID NO: 10649 - DNA, 20 bp, Artificial Sequence
  Antisense compound
aaagtagtggtgaatctatt

SEQ ID NO: 10650 - DNA, 20 bp, Artificial Sequence
  Antisense compound
caaagtagtggtgaatctat

SEQ ID NO: 10651 - DNA, 20 bp, Artificial Sequence
  Antisense compound
tcaaagtagtggtgaatcta

SEQ ID NO: 10652 - DNA, 20 bp, Artificial Sequence
  Antisense compound
ttcaaagtagtggtgaatct

SEQ ID NO: 10653 - DNA, 20 bp, Artificial Sequence
  Antisense compound
attcaaagtagtggtgaatc

SEQ ID NO: 10654 - DNA, 20 bp, Artificial Sequence
  Antisense compound
cattcaaagtagtggtgaat

SEQ ID NO: 10655 - DNA, 20 bp, Artificial Sequence
  Antisense compound
tcattcaaagtagtggtgaa

SEQ ID NO: 10656 - DNA, 20 bp, Artificial Sequence
  Antisense compound
gtcattcaaagtagtggtga

SEQ ID NO: 10657 - DNA, 20 bp, Artificial Sequence
  Antisense compound
agtcattcaaagtagtggtg

SEQ ID NO: 10658 - DNA, 20 bp, Artificial Sequence
  Antisense compound
aagtcattcaaagtagtggt

SEQ ID NO: 10659 - DNA, 20 bp, Artificial Sequence
  Antisense compound
aaagtcattcaaagtagtgg

SEQ ID NO: 10660 - DNA, 20 bp, Artificial Sequence
  Antisense compound
taaagtcattcaaagtagtg

SEQ ID NO: 10661 - DNA, 20 bp, Artificial Sequence
  Antisense compound
ttaaagtcattcaaagtagt

SEQ ID NO: 10662 - DNA, 20 bp, Artificial Sequence
  Antisense compound
gttaaagtcattcaaagtag

SEQ ID NO: 10663 - DNA, 20 bp, Artificial Sequence
  Antisense compound
ggttaaagtcattcaaagta

SEQ ID NO: 10664 - DNA, 20 bp, Artificial Sequence
  Antisense compound
aggttaaagtcattcaaagt

SEQ ID NO: 10665 - DNA, 20 bp, Artificial Sequence
  Antisense compound
aaggttaaagtcattcaaag

SEQ ID NO: 10666 - DNA, 20 bp, Artificial Sequence
  Antisense compound
caaggttaaagtcattcaaa

SEQ ID NO: 10667 - DNA, 20 bp, Artificial Sequence
  Antisense compound
acaaggttaaagtcattcaa

SEQ ID NO: 10668 - DNA, 20 bp, Artificial Sequence
  Antisense compound
cacaaggttaaagtcattca

SEQ ID NO: 10669 - DNA, 20 bp, Artificial Sequence
  Antisense compound
ccacaaggttaaagtcattc

SEQ ID NO: 10670 - DNA, 20 bp, Artificial Sequence
  Antisense compound
gccacaaggttaaagtcatt

SEQ ID NO: 10671 - DNA, 20 bp, Artificial Sequence
  Antisense compound
tgccacaaggttaaagtcat

SEQ ID NO: 10672 - DNA, 20 bp, Artificial Sequence
  Antisense compound
ttgccacaaggttaaagtca

SEQ ID NO: 10673 - DNA, 20 bp, Artificial Sequence
  Antisense compound
attgccacaaggttaaagtc

SEQ ID NO: 10674 - DNA, 20 bp, Artificial Sequence
  Antisense compound
cattgccacaaggttaaagt

SEQ ID NO: 10675 - DNA, 20 bp, Artificial Sequence
  Antisense compound
tcattgccacaaggttaaag

SEQ ID NO: 10676 - DNA, 20 bp, Artificial Sequence
  Antisense compound
ttcattgccacaaggttaaa

SEQ ID NO: 10677 - DNA, 20 bp, Artificial Sequence
  Antisense compound
cttcattgccacaaggttaa

SEQ ID NO: 10678 - DNA, 20 bp, Artificial Sequence
  Antisense compound
acttcattgccacaaggtta

SEQ ID NO: 10679 - DNA, 20 bp, Artificial Sequence
  Antisense compound
tacttcattgccacaaggtt

SEQ ID NO: 10680 - DNA, 20 bp, Artificial Sequence
  Antisense compound
gtacttcattgccacaaggt

SEQ ID NO: 10681 - DNA, 20 bp, Artificial Sequence
  Antisense compound
tgtacttcattgccacaagg

SEQ ID NO: 10682 - DNA, 20 bp, Artificial Sequence
  Antisense compound
ttgtacttcattgccacaag

SEQ ID NO: 10683 - DNA, 20 bp, Artificial Sequence
  Antisense compound
gttgtacttcattgccacaa

SEQ ID NO: 10684 - DNA, 20 bp, Artificial Sequence
  Antisense compound
agttgtacttcattgccaca

SEQ ID NO: 10685 - DNA, 20 bp, Artificial Sequence
  Antisense compound
tagttgtacttcattgccac

SEQ ID NO: 10686 - DNA, 20 bp, Artificial Sequence
  Antisense compound
atagttgtacttcattgcca

SEQ ID NO: 10687 - DNA, 20 bp, Artificial Sequence
  Antisense compound
catagttgtacttcattgcc

SEQ ID NO: 10688 - DNA, 20 bp, Artificial Sequence
  Antisense compound
tcatagttgtacttcattgc

SEQ ID NO: 10689 - DNA, 20 bp, Artificial Sequence
  Antisense compound
ttcatagttgtacttcattg

SEQ ID NO: 10690 - DNA, 20 bp, Artificial Sequence
  Antisense compound
gttcatagttgtacttcatt

SEQ ID NO: 10691 - DNA, 20 bp, Artificial Sequence
  Antisense compound
ggttcatagttgtacttcat

SEQ ID NO: 10692 - DNA, 20 bp, Artificial Sequence
  Antisense compound
aggttcatagttgtacttca

SEQ ID NO: 10693 - DNA, 20 bp, Artificial Sequence
  Antisense compound
aaggttcatagttgtacttc

SEQ ID NO: 10694 - DNA, 20 bp, Artificial Sequence
  Antisense compound
aaaggttcatagttgtactt

SEQ ID NO: 10695 - DNA, 20 bp, Artificial Sequence
  Antisense compound
caaaggttcatagttgtact

SEQ ID NO: 10696 - DNA, 20 bp, Artificial Sequence
  Antisense compound
tcaaaggttcatagttgtac

SEQ ID NO: 10697 - DNA, 20 bp, Artificial Sequence
  Antisense compound
gtcaaaggttcatagttgta

SEQ ID NO: 10698 - DNA, 20 bp, Artificial Sequence
  Antisense compound
tgtcaaaggttcatagttgt

SEQ ID NO: 10699 - DNA, 20 bp, Artificial Sequence
  Antisense compound
gtgtcaaaggttcatagttg

SEQ ID NO: 10700 - DNA, 20 bp, Artificial Sequence
  Antisense compound
tgtgtcaaaggttcatagtt

SEQ ID NO: 10701 - DNA, 20 bp, Artificial Sequence
  Antisense compound
ttgtgtcaaaggttcatagt

SEQ ID NO: 10702 - DNA, 20 bp, Artificial Sequence
  Antisense compound
cttgtgtcaaaggttcatag

SEQ ID NO: 10703 - DNA, 20 bp, Artificial Sequence
  Antisense compound
tcttgtgtcaaaggttcata

SEQ ID NO: 10704 - DNA, 20 bp, Artificial Sequence
  Antisense compound
atcttgtgtcaaaggttcat

SEQ ID NO: 10705 - DNA, 20 bp, Artificial Sequence
  Antisense compound
gatcttgtgtcaaaggttca

SEQ ID NO: 10706 - DNA, 20 bp, Artificial Sequence
  Antisense compound
tgatcttgtgtcaaaggttc

SEQ ID NO: 10707 - DNA, 20 bp, Artificial Sequence
  Antisense compound
atgatcttgtgtcaaaggtt

SEQ ID NO: 10708 - DNA, 20 bp, Artificial Sequence
  Antisense compound
catgatcttgtgtcaaaggt

SEQ ID NO: 10709 - DNA, 20 bp, Artificial Sequence
  Antisense compound
acatgatcttgtgtcaaagg

SEQ ID NO: 10710 - DNA, 20 bp, Artificial Sequence
  Antisense compound
aacatgatcttgtgtcaaag

SEQ ID NO: 10711 - DNA, 20 bp, Artificial Sequence
  Antisense compound
caacatgatcttgtgtcaaa

SEQ ID NO: 10712 - DNA, 20 bp, Artificial Sequence
  Antisense compound
tcaacatgatcttgtgtcaa

SEQ ID NO: 10713 - DNA, 20 bp, Artificial Sequence
  Antisense compound
gtcaacatgatcttgtgtca

SEQ ID NO: 10714 - DNA, 20 bp, Artificial Sequence
  Antisense compound
tgtcaacatgatcttgtgtc

SEQ ID NO: 10715 - DNA, 20 bp, Artificial Sequence
  Antisense compound
atgtcaacatgatcttgtgt

SEQ ID NO: 10716 - DNA, 20 bp, Artificial Sequence
  Antisense compound
tatgtcaacatgatcttgtg

SEQ ID NO: 10717 - DNA, 20 bp, Artificial Sequence
  Antisense compound
atatgtcaacatgatcttgt

SEQ ID NO: 10718 - DNA, 20 bp, Artificial Sequence
  Antisense compound
aatatgtcaacatgatcttg

SEQ ID NO: 10719 - DNA, 20 bp, Artificial Sequence
  Antisense compound
caatatgtcaacatgatctt

SEQ ID NO: 10720 - DNA, 20 bp, Artificial Sequence
  Antisense compound
ccaatatgtcaacatgatct

SEQ ID NO: 10721 - DNA, 20 bp, Artificial Sequence
  Antisense compound
cccaatatgtcaacatgatc

SEQ ID NO: 10722 - DNA, 20 bp, Artificial Sequence
  Antisense compound
tcccaatatgtcaacatgat

SEQ ID NO: 10723 - DNA, 20 bp, Artificial Sequence
  Antisense compound
gtcccaatatgtcaacatga

SEQ ID NO: 10724 - DNA, 20 bp, Artificial Sequence
  Antisense compound
ggtcccaatatgtcaacatg

SEQ ID NO: 10725 - DNA, 20 bp, Artificial Sequence
  Antisense compound
aggtcccaatatgtcaacat

SEQ ID NO: 10726 - DNA, 20 bp, Artificial Sequence
  Antisense compound
gaggtcccaatatgtcaaca

SEQ ID NO: 10727 - DNA, 20 bp, Artificial Sequence
  Antisense compound
agaggtcccaatatgtcaac

SEQ ID NO: 10728 - DNA, 20 bp, Artificial Sequence
  Antisense compound
aagaggtcccaatatgtcaa

SEQ ID NO: 10729 - DNA, 20 bp, Artificial Sequence
  Antisense compound
aaagaggtcccaatatgtca

SEQ ID NO: 10730 - DNA, 20 bp, Artificial Sequence
  Antisense compound
gaaagaggtcccaatatgtc

SEQ ID NO: 10731 - DNA, 20 bp, Artificial Sequence
  Antisense compound
agaaagaggtcccaatatgt

SEQ ID NO: 10732 - DNA, 20 bp, Artificial Sequence
  Antisense compound
cagaaagaggtcccaatatg

SEQ ID NO: 10733 - DNA, 20 bp, Artificial Sequence
  Antisense compound
gcagaaagaggtcccaatat

SEQ ID NO: 10734 - DNA, 20 bp, Artificial Sequence
  Antisense compound
agcagaaagaggtcccaata

SEQ ID NO: 10735 - DNA, 20 bp, Artificial Sequence
  Antisense compound
gagcagaaagaggtcccaat

SEQ ID NO: 10736 - DNA, 20 bp, Artificial Sequence
  Antisense compound
tgagcagaaagaggtcccaa

SEQ ID NO: 10737 - DNA, 20 bp, Artificial Sequence
  Antisense compound
ttgagcagaaagaggtccca

SEQ ID NO: 10738 - DNA, 20 bp, Artificial Sequence
  Antisense compound
tttgagcagaaagaggtccc

SEQ ID NO: 10739 - DNA, 20 bp, Artificial Sequence
  Antisense compound
gtttgagcagaaagaggtcc

SEQ ID NO: 10740 - DNA, 20 bp, Artificial Sequence
  Antisense compound
tgtttgagcagaaagaggtc

SEQ ID NO: 10741 - DNA, 20 bp, Artificial Sequence
  Antisense compound
ctgtttgagcagaaagaggt

SEQ ID NO: 10742 - DNA, 20 bp, Artificial Sequence
  Antisense compound
cctgtttgagcagaaagagg

SEQ ID NO: 10743 - DNA, 20 bp, Artificial Sequence
  Antisense compound
tcctgtttgagcagaaagag

SEQ ID NO: 10744 - DNA, 20 bp, Artificial Sequence
  Antisense compound
ttcctgtttgagcagaaaga

SEQ ID NO: 10745 - DNA, 20 bp, Artificial Sequence
  Antisense compound
attcctgtttgagcagaaag

SEQ ID NO: 10746 - DNA, 20 bp, Artificial Sequence
  Antisense compound
aattcctgtttgagcagaaa

SEQ ID NO: 10747 - DNA, 20 bp, Artificial Sequence
  Antisense compound
caattcctgtttgagcagaa

SEQ ID NO: 10748 - DNA, 20 bp, Artificial Sequence
  Antisense compound
gcaattcctgtttgagcaga

SEQ ID NO: 10749 - DNA, 20 bp, Artificial Sequence
  Antisense compound
ggcaattcctgtttgagcag

SEQ ID NO: 10750 - DNA, 20 bp, Artificial Sequence
  Antisense compound
cggcaattcctgtttgagca

SEQ ID NO: 10751 - DNA, 20 bp, Artificial Sequence
  Antisense compound
acggcaattcctgtttgagc

SEQ ID NO: 10752 - DNA, 20 bp, Artificial Sequence
  Antisense compound
gacggcaattcctgtttgag

SEQ ID NO: 10753 - DNA, 20 bp, Artificial Sequence
  Antisense compound
agacggcaattcctgtttga

SEQ ID NO: 10754 - DNA, 20 bp, Artificial Sequence
  Antisense compound
aagacggcaattcctgtttg

SEQ ID NO: 10755 - DNA, 20 bp, Artificial Sequence
  Antisense compound
taagacggcaattcctgttt

SEQ ID NO: 10756 - DNA, 20 bp, Artificial Sequence
  Antisense compound
ctaagacggcaattcctgtt

SEQ ID NO: 10757 - DNA, 20 bp, Artificial Sequence
  Antisense compound
tctaagacggcaattcctgt

SEQ ID NO: 10758 - DNA, 20 bp, Artificial Sequence
  Antisense compound
atctaagacggcaattcctg

SEQ ID NO: 10759 - DNA, 20 bp, Artificial Sequence
  Antisense compound
tatctaagacggcaattcct

SEQ ID NO: 10760 - DNA, 20 bp, Artificial Sequence
  Antisense compound
atatctaagacggcaattcc

SEQ ID NO: 10761 - DNA, 20 bp, Artificial Sequence
  Antisense compound
catatctaagacggcaattc

SEQ ID NO: 10762 - DNA, 20 bp, Artificial Sequence
  Antisense compound
acatatctaagacggcaatt

SEQ ID NO: 10763 - DNA, 20 bp, Artificial Sequence
  Antisense compound
cacatatctaagacggcaat

SEQ ID NO: 10764 - DNA, 20 bp, Artificial Sequence
  Antisense compound
acacatatctaagacggcaa

SEQ ID NO: 10765 - DNA, 20 bp, Artificial Sequence
  Antisense compound
cacacatatctaagacggca

SEQ ID NO: 10766 - DNA, 20 bp, Artificial Sequence
  Antisense compound
gcacacatatctaagacggc

SEQ ID NO: 10767 - DNA, 20 bp, Artificial Sequence
  Antisense compound
agcacacatatctaagacgg

SEQ ID NO: 10768 - DNA, 20 bp, Artificial Sequence
  Antisense compound
cagcacacatatctaagacg

SEQ ID NO: 10769 - DNA, 20 bp, Artificial Sequence
  Antisense compound
gcagcacacatatctaagac

SEQ ID NO: 10770 - DNA, 20 bp, Artificial Sequence
  Antisense compound
agcagcacacatatctaaga

SEQ ID NO: 10771 - DNA, 20 bp, Artificial Sequence
  Antisense compound
aagcagcacacatatctaag

SEQ ID NO: 10772 - DNA, 20 bp, Artificial Sequence
  Antisense compound
aaagcagcacacatatctaa

SEQ ID NO: 10773 - DNA, 20 bp, Artificial Sequence
  Antisense compound
caaagcagcacacatatcta

SEQ ID NO: 10774 - DNA, 20 bp, Artificial Sequence
  Antisense compound
tcaaagcagcacacatatct

SEQ ID NO: 10775 - DNA, 20 bp, Artificial Sequence
  Antisense compound
ttcaaagcagcacacatatc

SEQ ID NO: 10776 - DNA, 20 bp, Artificial Sequence
  Antisense compound
tttcaaagcagcacacatat

SEQ ID NO: 10777 - DNA, 20 bp, Artificial Sequence
  Antisense compound
ctttcaaagcagcacacata

SEQ ID NO: 10778 - DNA, 20 bp, Artificial Sequence
  Antisense compound
tctttcaaagcagcacacat

SEQ ID NO: 10779 - DNA, 20 bp, Artificial Sequence
  Antisense compound
ctctttcaaagcagcacaca

SEQ ID NO: 10780 - DNA, 20 bp, Artificial Sequence
  Antisense compound
gctctttcaaagcagcacac

SEQ ID NO: 10781 - DNA, 20 bp, Artificial Sequence
  Antisense compound
agctctttcaaagcagcaca

SEQ ID NO: 10782 - DNA, 20 bp, Artificial Sequence
  Antisense compound
cagctctttcaaagcagcac

SEQ ID NO: 10783 - DNA, 20 bp, Artificial Sequence
  Antisense compound
gcagctctttcaaagcagca

SEQ ID NO: 10784 - DNA, 20 bp, Artificial Sequence
  Antisense compound
agcagctctttcaaagcagc

SEQ ID NO: 10785 - DNA, 20 bp, Artificial Sequence
  Antisense compound
cagcagctctttcaaagcag

SEQ ID NO: 10786 - DNA, 20 bp, Artificial Sequence
  Antisense compound
gcagcagctctttcaaagca

SEQ ID NO: 10787 - DNA, 20 bp, Artificial Sequence
  Antisense compound
tgcagcagctctttcaaagc

SEQ ID NO: 10788 - DNA, 20 bp, Artificial Sequence
  Antisense compound
ctgcagcagctctttcaaag

SEQ ID NO: 10789 - DNA, 20 bp, Artificial Sequence
  Antisense compound
tctgcagcagctctttcaaa

SEQ ID NO: 10790 - DNA, 20 bp, Artificial Sequence
  Antisense compound
ttctgcagcagctctttcaa

SEQ ID NO: 10791 - DNA, 20 bp, Artificial Sequence
  Antisense compound
attctgcagcagctctttca

SEQ ID NO: 10792 - DNA, 20 bp, Artificial Sequence
  Antisense compound
cattctgcagcagctctttc

SEQ ID NO: 10793 - DNA, 20 bp, Artificial Sequence
  Antisense compound
ccattctgcagcagctcttt

SEQ ID NO: 10794 - DNA, 20 bp, Artificial Sequence
  Antisense compound
accattctgcagcagctctt

SEQ ID NO: 10795 - DNA, 20 bp, Artificial Sequence
  Antisense compound
taccattctgcagcagctct

SEQ ID NO: 10796 - DNA, 20 bp, Artificial Sequence
  Antisense compound
ataccattctgcagcagctc

SEQ ID NO: 10797 - DNA, 20 bp, Artificial Sequence
  Antisense compound
cataccattctgcagcagct

SEQ ID NO: 10798 - DNA, 20 bp, Artificial Sequence
  Antisense compound
tcataccattctgcagcagc

SEQ ID NO: 10799 - DNA, 20 bp, Artificial Sequence
  Antisense compound
ttcataccattctgcagcag

SEQ ID NO: 10800 - DNA, 20 bp, Artificial Sequence
  Antisense compound
attcataccattctgcagca

SEQ ID NO: 10801 - DNA, 20 bp, Artificial Sequence
  Antisense compound
cattcataccattctgcagc

SEQ ID NO: 10802 - DNA, 20 bp, Artificial Sequence
  Antisense compound
ccattcataccattctgcag

SEQ ID NO: 10803 - DNA, 20 bp, Artificial Sequence
  Antisense compound
accattcataccattctgca

SEQ ID NO: 10804 - DNA, 20 bp, Artificial Sequence
  Antisense compound
gaccattcataccattctgc

SEQ ID NO: 10805 - DNA, 20 bp, Artificial Sequence
  Antisense compound
cgaccattcataccattctg

SEQ ID NO: 10806 - DNA, 20 bp, Artificial Sequence
  Antisense compound
acgaccattcataccattct

SEQ ID NO: 10807 - DNA, 20 bp, Artificial Sequence
  Antisense compound
tacgaccattcataccattc

SEQ ID NO: 10808 - DNA, 20 bp, Artificial Sequence
  Antisense compound
gtacgaccattcataccatt

SEQ ID NO: 10809 - DNA, 20 bp, Artificial Sequence
  Antisense compound
agtacgaccattcataccat

SEQ ID NO: 10810 - DNA, 20 bp, Artificial Sequence
  Antisense compound
tagtacgaccattcatacca

SEQ ID NO: 10811 - DNA, 20 bp, Artificial Sequence
  Antisense compound
atagtacgaccattcatacc

SEQ ID NO: 10812 - DNA, 20 bp, Artificial Sequence
  Antisense compound
gatagtacgaccattcatac

SEQ ID NO: 10813 - DNA, 20 bp, Artificial Sequence
  Antisense compound
ggatagtacgaccattcata

SEQ ID NO: 10814 - DNA, 20 bp, Artificial Sequence
  Antisense compound
aggatagtacgaccattcat

SEQ ID NO: 10815 - DNA, 20 bp, Artificial Sequence
  Antisense compound
aaggatagtacgaccattca

SEQ ID NO: 10816 - DNA, 20 bp, Artificial Sequence
  Antisense compound
caaggatagtacgaccattc

SEQ ID NO: 10817 - DNA, 20 bp, Artificial Sequence
  Antisense compound
ccaaggatagtacgaccatt

SEQ ID NO: 10818 - DNA, 20 bp, Artificial Sequence
  Antisense compound
accaaggatagtacgaccat

SEQ ID NO: 10819 - DNA, 20 bp, Artificial Sequence
  Antisense compound
taccaaggatagtacgacca

SEQ ID NO: 10820 - DNA, 20 bp, Artificial Sequence
  Antisense compound
ctaccaaggatagtacgacc

SEQ ID NO: 10821 - DNA, 20 bp, Artificial Sequence
  Antisense compound
gctaccaaggatagtacgac

SEQ ID NO: 10822 - DNA, 20 bp, Artificial Sequence
  Antisense compound
tgctaccaaggatagtacga

SEQ ID NO: 10823 - DNA, 20 bp, Artificial Sequence
  Antisense compound
gtgctaccaaggatagtacg

SEQ ID NO: 10824 - DNA, 20 bp, Artificial Sequence
  Antisense compound
agtgctaccaaggatagtac

SEQ ID NO: 10825 - DNA, 20 bp, Artificial Sequence
  Antisense compound
tagtgctaccaaggatagta

SEQ ID NO: 10826 - DNA, 20 bp, Artificial Sequence
  Antisense compound
atagtgctaccaaggatagt

SEQ ID NO: 10827 - DNA, 20 bp, Artificial Sequence
  Antisense compound
aatagtgctaccaaggatag

SEQ ID NO: 10828 - DNA, 20 bp, Artificial Sequence
  Antisense compound
aaatagtgctaccaaggata

SEQ ID NO: 10829 - DNA, 20 bp, Artificial Sequence
  Antisense compound
aaaatagtgctaccaaggat

SEQ ID NO: 10830 - DNA, 20 bp, Artificial Sequence
  Antisense compound
taaaatagtgctaccaagga

SEQ ID NO: 10831 - DNA, 20 bp, Artificial Sequence
  Antisense compound
ctaaaatagtgctaccaagg

SEQ ID NO: 10832 - DNA, 20 bp, Artificial Sequence
  Antisense compound
tctaaaatagtgctaccaag

SEQ ID NO: 10833 - DNA, 20 bp, Artificial Sequence
  Antisense compound
ttctaaaatagtgctaccaa

SEQ ID NO: 10834 - DNA, 20 bp, Artificial Sequence
  Antisense compound
cttctaaaatagtgctacca

SEQ ID NO: 10835 - DNA, 20 bp, Artificial Sequence
  Antisense compound
tcttctaaaatagtgctacc

SEQ ID NO: 10836 - DNA, 20 bp, Artificial Sequence
  Antisense compound
atcttctaaaatagtgctac

SEQ ID NO: 10837 - DNA, 20 bp, Artificial Sequence
  Antisense compound
catcttctaaaatagtgcta

SEQ ID NO: 10838 - DNA, 20 bp, Artificial Sequence
  Antisense compound
tcatcttctaaaatagtgct

SEQ ID NO: 10839 - DNA, 20 bp, Artificial Sequence
  Antisense compound
ctcatcttctaaaatagtgc

SEQ ID NO: 10840 - DNA, 20 bp, Artificial Sequence
  Antisense compound
actcatcttctaaaatagtg

SEQ ID NO: 10841 - DNA, 20 bp, Artificial Sequence
  Antisense compound
aactcatcttctaaaatagt

SEQ ID NO: 10842 - DNA, 20 bp, Artificial Sequence
  Antisense compound
aaactcatcttctaaaatag

SEQ ID NO: 10843 - DNA, 20 bp, Artificial Sequence
  Antisense compound
taaactcatcttctaaaata

SEQ ID NO: 10844 - DNA, 20 bp, Artificial Sequence
  Antisense compound
gtaaactcatcttctaaaat

SEQ ID NO: 10845 - DNA, 20 bp, Artificial Sequence
  Antisense compound
tgtaaactcatcttctaaaa

SEQ ID NO: 10846 - DNA, 20 bp, Artificial Sequence
  Antisense compound
gtgtaaactcatcttctaaa

SEQ ID NO: 10847 - DNA, 20 bp, Artificial Sequence
  Antisense compound
ggtgtaaactcatcttctaa

SEQ ID NO: 10848 - DNA, 20 bp, Artificial Sequence
  Antisense compound
tggtgtaaactcatcttcta

SEQ ID NO: 10849 - DNA, 20 bp, Artificial Sequence
  Antisense compound
atggtgtaaactcatcttct

SEQ ID NO: 10850 - DNA, 20 bp, Artificial Sequence
  Antisense compound
aatggtgtaaactcatcttc

SEQ ID NO: 10851 - DNA, 20 bp, Artificial Sequence
  Antisense compound
aaatggtgtaaactcatctt

SEQ ID NO: 10852 - DNA, 20 bp, Artificial Sequence
  Antisense compound
caaatggtgtaaactcatct

SEQ ID NO: 10853 - DNA, 20 bp, Artificial Sequence
  Antisense compound
tcaaatggtgtaaactcatc

SEQ ID NO: 10854 - DNA, 20 bp, Artificial Sequence
  Antisense compound
atcaaatggtgtaaactcat

SEQ ID NO: 10855 - DNA, 20 bp, Artificial Sequence
  Antisense compound
catcaaatggtgtaaactca

SEQ ID NO: 10856 - DNA, 20 bp, Artificial Sequence
  Antisense compound
acatcaaatggtgtaaactc

SEQ ID NO: 10857 - DNA, 20 bp, Artificial Sequence
  Antisense compound
aacatcaaatggtgtaaact

SEQ ID NO: 10858 - DNA, 20 bp, Artificial Sequence
  Antisense compound
caacatcaaatggtgtaaac

SEQ ID NO: 10859 - DNA, 20 bp, Artificial Sequence
  Antisense compound
acaacatcaaatggtgtaaa

SEQ ID NO: 10860 - DNA, 20 bp, Artificial Sequence
  Antisense compound
aacaacatcaaatggtgtaa

SEQ ID NO: 10861 - DNA, 20 bp, Artificial Sequence
  Antisense compound
taacaacatcaaatggtgta

SEQ ID NO: 10862 - DNA, 20 bp, Artificial Sequence
  Antisense compound
ctaacaacatcaaatggtgt

SEQ ID NO: 10863 - DNA, 20 bp, Artificial Sequence
  Antisense compound
tctaacaacatcaaatggtg

SEQ ID NO: 10864 - DNA, 20 bp, Artificial Sequence
  Antisense compound
gtctaacaacatcaaatggt

SEQ ID NO: 10865 - DNA, 20 bp, Artificial Sequence
  Antisense compound
tgtctaacaacatcaaatgg

SEQ ID NO: 10866 - DNA, 20 bp, Artificial Sequence
  Antisense compound
ttgtctaacaacatcaaatg

SEQ ID NO: 10867 - DNA, 20 bp, Artificial Sequence
  Antisense compound
attgtctaacaacatcaaat

SEQ ID NO: 10868 - DNA, 20 bp, Artificial Sequence
  Antisense compound
cattgtctaacaacatcaaa

SEQ ID NO: 10869 - DNA, 20 bp, Artificial Sequence
  Antisense compound
gcattgtctaacaacatcaa

SEQ ID NO: 10870 - DNA, 20 bp, Artificial Sequence
  Antisense compound
agcattgtctaacaacatca

SEQ ID NO: 10871 - DNA, 20 bp, Artificial Sequence
  Antisense compound
gagcattgtctaacaacatc

SEQ ID NO: 10872 - DNA, 20 bp, Artificial Sequence
  Antisense compound
agagcattgtctaacaacat

SEQ ID NO: 10873 - DNA, 20 bp, Artificial Sequence
  Antisense compound
cagagcattgtctaacaaca

SEQ ID NO: 10874 - DNA, 20 bp, Artificial Sequence
  Antisense compound
ccagagcattgtctaacaac

SEQ ID NO: 10875 - DNA, 20 bp, Artificial Sequence
  Antisense compound
accagagcattgtctaacaa

SEQ ID NO: 10876 - DNA, 20 bp, Artificial Sequence
  Antisense compound
caccagagcattgtctaaca

SEQ ID NO: 10877 - DNA, 20 bp, Artificial Sequence
  Antisense compound
acaccagagcattgtctaac

SEQ ID NO: 10878 - DNA, 20 bp, Artificial Sequence
  Antisense compound
aacaccagagcattgtctaa

SEQ ID NO: 10879 - DNA, 20 bp, Artificial Sequence
  Antisense compound
taacaccagagcattgtcta

SEQ ID NO: 10880 - DNA, 20 bp, Artificial Sequence
  Antisense compound
gtaacaccagagcattgtct

SEQ ID NO: 10881 - DNA, 20 bp, Artificial Sequence
  Antisense compound
ggtaacaccagagcattgtc

SEQ ID NO: 10882 - DNA, 20 bp, Artificial Sequence
  Antisense compound
aggtaacaccagagcattgt

SEQ ID NO: 10883 - DNA, 20 bp, Artificial Sequence
  Antisense compound
aaggtaacaccagagcattg

SEQ ID NO: 10884 - DNA, 20 bp, Artificial Sequence
  Antisense compound
gaaggtaacaccagagcatt

SEQ ID NO: 10885 - DNA, 20 bp, Artificial Sequence
  Antisense compound
ggaaggtaacaccagagcat

SEQ ID NO: 10886 - DNA, 20 bp, Artificial Sequence
  Antisense compound
tggaaggtaacaccagagca

SEQ ID NO: 10887 - DNA, 20 bp, Artificial Sequence
  Antisense compound
ttggaaggtaacaccagagc

SEQ ID NO: 10888 - DNA, 20 bp, Artificial Sequence
  Antisense compound
cttggaaggtaacaccagag

SEQ ID NO: 10889 - DNA, 20 bp, Artificial Sequence
  Antisense compound
ccttggaaggtaacaccaga

SEQ ID NO: 10890 - DNA, 20 bp, Artificial Sequence
  Antisense compound
accttggaaggtaacaccag

SEQ ID NO: 10891 - DNA, 20 bp, Artificial Sequence
  Antisense compound
taccttggaaggtaacacca

SEQ ID NO: 10892 - DNA, 20 bp, Artificial Sequence
  Antisense compound
ttaccttggaaggtaacacc

SEQ ID NO: 10893 - DNA, 20 bp, Artificial Sequence
  Antisense compound
cttaccttggaaggtaacac

SEQ ID NO: 10894 - DNA, 20 bp, Artificial Sequence
  Antisense compound
acttaccttggaaggtaaca

SEQ ID NO: 10895 - DNA, 20 bp, Artificial Sequence
  Antisense compound
aacttaccttggaaggtaac

SEQ ID NO: 10896 - DNA, 20 bp, Artificial Sequence
  Antisense compound
gaacttaccttggaaggtaa

SEQ ID NO: 10897 - DNA, 20 bp, Artificial Sequence
  Antisense compound
tgaacttaccttggaaggta

SEQ ID NO: 10898 - DNA, 20 bp, Artificial Sequence
  Antisense compound
ttgaacttaccttggaaggt

SEQ ID NO: 10899 - DNA, 20 bp, Artificial Sequence
  Antisense compound
cttgaacttaccttggaagg

SEQ ID NO: 10900 - DNA, 20 bp, Artificial Sequence
  Antisense compound
tcttgaacttaccttggaag

SEQ ID NO: 10901 - DNA, 20 bp, Artificial Sequence
  Antisense compound
ttcttgaacttaccttggaa

SEQ ID NO: 10902 - DNA, 20 bp, Artificial Sequence
  Antisense compound
tttcttgaacttaccttgga

SEQ ID NO: 10903 - DNA, 20 bp, Artificial Sequence
  Antisense compound
ttttcttgaacttaccttgg

SEQ ID NO: 10904 - DNA, 20 bp, Artificial Sequence
  Antisense compound
attttcttgaacttaccttg

SEQ ID NO: 10905 - DNA, 20 bp, Artificial Sequence
  Antisense compound
aattttcttgaacttacctt

SEQ ID NO: 10906 - DNA, 20 bp, Artificial Sequence
  Antisense compound
caattttcttgaacttacct

SEQ ID NO: 10907 - DNA, 20 bp, Artificial Sequence
  Antisense compound
acaattttcttgaacttacc

SEQ ID NO: 10908 - DNA, 20 bp, Artificial Sequence
  Antisense compound
aacaattttcttgaacttac

SEQ ID NO: 10909 - DNA, 20 bp, Artificial Sequence
  Antisense compound
taacaattttcttgaactta

SEQ ID NO: 10910 - DNA, 20 bp, Artificial Sequence
  Antisense compound
ttaacaattttcttgaactt

SEQ ID NO: 10911 - DNA, 20 bp, Artificial Sequence
  Antisense compound
cttaacaattttcttgaact

SEQ ID NO: 10912 - DNA, 20 bp, Artificial Sequence
  Antisense compound
ccttaacaattttcttgaac

SEQ ID NO: 10913 - DNA, 20 bp, Artificial Sequence
  Antisense compound
cccttaacaattttcttgaa

SEQ ID NO: 10914 - DNA, 20 bp, Artificial Sequence
  Antisense compound
gcccttaacaattttcttga

SEQ ID NO: 10915 - DNA, 20 bp, Artificial Sequence
  Antisense compound
tgcccttaacaattttcttg

SEQ ID NO: 10916 - DNA, 20 bp, Artificial Sequence
  Antisense compound
gtgcccttaacaattttctt

SEQ ID NO: 10917 - DNA, 20 bp, Artificial Sequence
  Antisense compound
agtgcccttaacaattttct

SEQ ID NO: 10918 - DNA, 20 bp, Artificial Sequence
  Antisense compound
gagtgcccttaacaattttc

SEQ ID NO: 10919 - DNA, 20 bp, Artificial Sequence
  Antisense compound
tgagtgcccttaacaatttt

SEQ ID NO: 10920 - DNA, 20 bp, Artificial Sequence
  Antisense compound
atgagtgcccttaacaattt

SEQ ID NO: 10921 - DNA, 20 bp, Artificial Sequence
  Antisense compound
gatgagtgcccttaacaatt

SEQ ID NO: 10922 - DNA, 20 bp, Artificial Sequence
  Antisense compound
tgatgagtgcccttaacaat

SEQ ID NO: 10923 - DNA, 20 bp, Artificial Sequence
  Antisense compound
atgatgagtgcccttaacaa

SEQ ID NO: 10924 - DNA, 20 bp, Artificial Sequence
  Antisense compound
aatgatgagtgcccttaaca

SEQ ID NO: 10925 - DNA, 20 bp, Artificial Sequence
  Antisense compound
caatgatgagtgcccttaac

SEQ ID NO: 10926 - DNA, 20 bp, Artificial Sequence
  Antisense compound
ccaatgatgagtgcccttaa

SEQ ID NO: 10927 - DNA, 20 bp, Artificial Sequence
  Antisense compound
tccaatgatgagtgccctta

SEQ ID NO: 10928 - DNA, 20 bp, Artificial Sequence
  Antisense compound
atccaatgatgagtgccctt

SEQ ID NO: 10929 - DNA, 20 bp, Artificial Sequence
  Antisense compound
catccaatgatgagtgccct

SEQ ID NO: 10930 - DNA, 20 bp, Artificial Sequence
  Antisense compound
gcatccaatgatgagtgccc

SEQ ID NO: 10931 - DNA, 20 bp, Artificial Sequence
  Antisense compound
agcatccaatgatgagtgcc

SEQ ID NO: 10932 - DNA, 20 bp, Artificial Sequence
  Antisense compound
aagcatccaatgatgagtgc

SEQ ID NO: 10933 - DNA, 20 bp, Artificial Sequence
  Antisense compound
aaagcatccaatgatgagtg

SEQ ID NO: 10934 - DNA, 20 bp, Artificial Sequence
  Antisense compound
aaaagcatccaatgatgagt

SEQ ID NO: 10935 - DNA, 20 bp, Artificial Sequence
  Antisense compound
taaaagcatccaatgatgag

SEQ ID NO: 10936 - DNA, 20 bp, Artificial Sequence
  Antisense compound
ttaaaagcatccaatgatga

SEQ ID NO: 10937 - DNA, 20 bp, Artificial Sequence
  Antisense compound
gttaaaagcatccaatgatg

SEQ ID NO: 10938 - DNA, 20 bp, Artificial Sequence
  Antisense compound
agttaaaagcatccaatgat

SEQ ID NO: 10939 - DNA, 20 bp, Artificial Sequence
  Antisense compound
aagttaaaagcatccaatga

SEQ ID NO: 10940 - DNA, 20 bp, Artificial Sequence
  Antisense compound
aaagttaaaagcatccaatg

SEQ ID NO: 10941 - DNA, 20 bp, Artificial Sequence
  Antisense compound
gaaagttaaaagcatccaat

SEQ ID NO: 10942 - DNA, 20 bp, Artificial Sequence
  Antisense compound
agaaagttaaaagcatccaa

SEQ ID NO: 10943 - DNA, 20 bp, Artificial Sequence
  Antisense compound
aagaaagttaaaagcatcca

SEQ ID NO: 10944 - DNA, 20 bp, Artificial Sequence
  Antisense compound
caagaaagttaaaagcatcc

SEQ ID NO: 10945 - DNA, 20 bp, Artificial Sequence
  Antisense compound
tcaagaaagttaaaagcatc

SEQ ID NO: 10946 - DNA, 20 bp, Artificial Sequence
  Antisense compound
gtcaagaaagttaaaagcat

SEQ ID NO: 10947 - DNA, 20 bp, Artificial Sequence
  Antisense compound
tgtcaagaaagttaaaagca

SEQ ID NO: 10948 - DNA, 20 bp, Artificial Sequence
  Antisense compound
atgtcaagaaagttaaaagc

SEQ ID NO: 10949 - DNA, 20 bp, Artificial Sequence
  Antisense compound
gatgtcaagaaagttaaaag

SEQ ID NO: 10950 - DNA, 20 bp, Artificial Sequence
  Antisense compound
tgatgtcaagaaagttaaaa

SEQ ID NO: 10951 - DNA, 20 bp, Artificial Sequence
  Antisense compound
gtgatgtcaagaaagttaaa

SEQ ID NO: 10952 - DNA, 20 bp, Artificial Sequence
  Antisense compound
agtgatgtcaagaaagttaa

SEQ ID NO: 10953 - DNA, 20 bp, Artificial Sequence
  Antisense compound
tagtgatgtcaagaaagtta

SEQ ID NO: 10954 - DNA, 20 bp, Artificial Sequence
  Antisense compound
atagtgatgtcaagaaagtt

SEQ ID NO: 10955 - DNA, 20 bp, Artificial Sequence
  Antisense compound
aatagtgatgtcaagaaagt

SEQ ID NO: 10956 - DNA, 20 bp, Artificial Sequence
  Antisense compound
caatagtgatgtcaagaaag

SEQ ID NO: 10957 - DNA, 20 bp, Artificial Sequence
  Antisense compound
tcaatagtgatgtcaagaaa

SEQ ID NO: 10958 - DNA, 20 bp, Artificial Sequence
  Antisense compound
atcaatagtgatgtcaagaa

SEQ ID NO: 10959 - DNA, 20 bp, Artificial Sequence
  Antisense compound
aatcaatagtgatgtcaaga

SEQ ID NO: 10960 - DNA, 20 bp, Artificial Sequence
  Antisense compound
gaatcaatagtgatgtcaag

SEQ ID NO: 10961 - DNA, 20 bp, Artificial Sequence
  Antisense compound
agaatcaatagtgatgtcaa

SEQ ID NO: 10962 - DNA, 20 bp, Artificial Sequence
  Antisense compound
aagaatcaatagtgatgtca

SEQ ID NO: 10963 - DNA, 20 bp, Artificial Sequence
  Antisense compound
caagaatcaatagtgatgtc

SEQ ID NO: 10964 - DNA, 20 bp, Artificial Sequence
  Antisense compound
acaagaatcaatagtgatgt

SEQ ID NO: 10965 - DNA, 20 bp, Artificial Sequence
  Antisense compound
aacaagaatcaatagtgatg

SEQ ID NO: 10966 - DNA, 20 bp, Artificial Sequence
  Antisense compound
gaacaagaatcaatagtgat

SEQ ID NO: 10967 - DNA, 20 bp, Artificial Sequence
  Antisense compound
tgaacaagaatcaatagtga

SEQ ID NO: 10968 - DNA, 20 bp, Artificial Sequence
  Antisense compound
ttgaacaagaatcaatagtg

SEQ ID NO: 10969 - DNA, 20 bp, Artificial Sequence
  Antisense compound
tttgaacaagaatcaatagt

SEQ ID NO: 10970 - DNA, 20 bp, Artificial Sequence
  Antisense compound
ctttgaacaagaatcaatag

SEQ ID NO: 10971 - DNA, 20 bp, Artificial Sequence
  Antisense compound
actttgaacaagaatcaata

SEQ ID NO: 10972 - DNA, 20 bp, Artificial Sequence
  Antisense compound
tactttgaacaagaatcaat

SEQ ID NO: 10973 - DNA, 20 bp, Artificial Sequence
  Antisense compound
gtactttgaacaagaatcaa

SEQ ID NO: 10974 - DNA, 20 bp, Artificial Sequence
  Antisense compound
tgtactttgaacaagaatca

SEQ ID NO: 10975 - DNA, 20 bp, Artificial Sequence
  Antisense compound
gtgtactttgaacaagaatc

SEQ ID NO: 10976 - DNA, 20 bp, Artificial Sequence
  Antisense compound
tgtgtactttgaacaagaat

SEQ ID NO: 10977 - DNA, 20 bp, Artificial Sequence
  Antisense compound
ctgtgtactttgaacaagaa

SEQ ID NO: 10978 - DNA, 20 bp, Artificial Sequence
  Antisense compound
actgtgtactttgaacaaga

SEQ ID NO: 10979 - DNA, 20 bp, Artificial Sequence
  Antisense compound
cactgtgtactttgaacaag

SEQ ID NO: 10980 - DNA, 20 bp, Artificial Sequence
  Antisense compound
ccactgtgtactttgaacaa

SEQ ID NO: 10981 - DNA, 20 bp, Artificial Sequence
  Antisense compound
accactgtgtactttgaaca

SEQ ID NO: 10982 - DNA, 20 bp, Artificial Sequence
  Antisense compound
gaccactgtgtactttgaac

SEQ ID NO: 10983 - DNA, 20 bp, Artificial Sequence
  Antisense compound
tgaccactgtgtactttgaa

SEQ ID NO: 10984 - DNA, 20 bp, Artificial Sequence
  Antisense compound
gtgaccactgtgtactttga

SEQ ID NO: 10985 - DNA, 20 bp, Artificial Sequence
  Antisense compound
agtgaccactgtgtactttg

SEQ ID NO: 10986 - DNA, 20 bp, Artificial Sequence
  Antisense compound
cagtgaccactgtgtacttt

SEQ ID NO: 10987 - DNA, 20 bp, Artificial Sequence
  Antisense compound
acagtgaccactgtgtactt

SEQ ID NO: 10988 - DNA, 20 bp, Artificial Sequence
  Antisense compound
aacagtgaccactgtgtact

SEQ ID NO: 10989 - DNA, 20 bp, Artificial Sequence
  Antisense compound
aaacagtgaccactgtgtac

SEQ ID NO: 10990 - DNA, 20 bp, Artificial Sequence
  Antisense compound
aaaacagtgaccactgtgta

SEQ ID NO: 10991 - DNA, 20 bp, Artificial Sequence
  Antisense compound
aaaaacagtgaccactgtgt

SEQ ID NO: 10992 - DNA, 20 bp, Artificial Sequence
  Antisense compound
gaaaaacagtgaccactgtg

SEQ ID NO: 10993 - DNA, 20 bp, Artificial Sequence
  Antisense compound
agaaaaacagtgaccactgt

SEQ ID NO: 10994 - DNA, 20 bp, Artificial Sequence
  Antisense compound
aagaaaaacagtgaccactg

SEQ ID NO: 10995 - DNA, 20 bp, Artificial Sequence
  Antisense compound
aaagaaaaacagtgaccact

SEQ ID NO: 10996 - DNA, 20 bp, Artificial Sequence
  Antisense compound
caaagaaaaacagtgaccac

SEQ ID NO: 10997 - DNA, 20 bp, Artificial Sequence
  Antisense compound
acaaagaaaaacagtgacca

SEQ ID NO: 10998 - DNA, 20 bp, Artificial Sequence
  Antisense compound
aacaaagaaaaacagtgacc

SEQ ID NO: 10999 - DNA, 20 bp, Artificial Sequence
  Antisense compound
aaacaaagaaaaacagtgac

SEQ ID NO: 11000 - DNA, 20 bp, Artificial Sequence
  Antisense compound
taaacaaagaaaaacagtga

SEQ ID NO: 11001 - DNA, 20 bp, Artificial Sequence
  Antisense compound
gtaaacaaagaaaaacagtg

SEQ ID NO: 11002 - DNA, 20 bp, Artificial Sequence
  Antisense compound
cgtaaacaaagaaaaacagt

SEQ ID NO: 11003 - DNA, 20 bp, Artificial Sequence
  Antisense compound
tcgtaaacaaagaaaaacag

SEQ ID NO: 11004 - DNA, 20 bp, Artificial Sequence
  Antisense compound
ctcgtaaacaaagaaaaaca

SEQ ID NO: 11005 - DNA, 20 bp, Artificial Sequence
  Antisense compound
tctcgtaaacaaagaaaaac

SEQ ID NO: 11006 - DNA, 20 bp, Artificial Sequence
  Antisense compound
ttctcgtaaacaaagaaaaa

SEQ ID NO: 11007 - DNA, 20 bp, Artificial Sequence
  Antisense compound
attctcgtaaacaaagaaaa

SEQ ID NO: 11008 - DNA, 20 bp, Artificial Sequence
  Antisense compound
cattctcgtaaacaaagaaa

SEQ ID NO: 11009 - DNA, 20 bp, Artificial Sequence
  Antisense compound
gcattctcgtaaacaaagaa

SEQ ID NO: 11010 - DNA, 20 bp, Artificial Sequence
  Antisense compound
agcattctcgtaaacaaaga

SEQ ID NO: 11011 - DNA, 20 bp, Artificial Sequence
  Antisense compound
aagcattctcgtaaacaaag

SEQ ID NO: 11012 - DNA, 20 bp, Artificial Sequence
  Antisense compound
aaagcattctcgtaaacaaa

SEQ ID NO: 11013 - DNA, 20 bp, Artificial Sequence
  Antisense compound
gaaagcattctcgtaaacaa

SEQ ID NO: 11014 - DNA, 20 bp, Artificial Sequence
  Antisense compound
agaaagcattctcgtaaaca

SEQ ID NO: 11015 - DNA, 20 bp, Artificial Sequence
  Antisense compound
aagaaagcattctcgtaaac

SEQ ID NO: 11016 - DNA, 20 bp, Artificial Sequence
  Antisense compound
caagaaagcattctcgtaaa

SEQ ID NO: 11017 - DNA, 20 bp, Artificial Sequence
  Antisense compound
gcaagaaagcattctcgtaa

SEQ ID NO: 11018 - DNA, 20 bp, Artificial Sequence
  Antisense compound
ggcaagaaagcattctcgta

SEQ ID NO: 11019 - DNA, 20 bp, Artificial Sequence
  Antisense compound
tggcaagaaagcattctcgt

SEQ ID NO: 11020 - DNA, 20 bp, Artificial Sequence
  Antisense compound
atggcaagaaagcattctcg

SEQ ID NO: 11021 - DNA, 20 bp, Artificial Sequence
  Antisense compound
aatggcaagaaagcattctc

SEQ ID NO: 11022 - DNA, 20 bp, Artificial Sequence
  Antisense compound
aaatggcaagaaagcattct

SEQ ID NO: 11023 - DNA, 20 bp, Artificial Sequence
  Antisense compound
taaatggcaagaaagcattc

SEQ ID NO: 11024 - DNA, 20 bp, Artificial Sequence
  Antisense compound
gtaaatggcaagaaagcatt

SEQ ID NO: 11025 - DNA, 20 bp, Artificial Sequence
  Antisense compound
agtaaatggcaagaaagcat

SEQ ID NO: 11026 - DNA, 20 bp, Artificial Sequence
  Antisense compound
gagtaaatggcaagaaagca

SEQ ID NO: 11027 - DNA, 20 bp, Artificial Sequence
  Antisense compound
agagtaaatggcaagaaagc

SEQ ID NO: 11028 - DNA, 20 bp, Artificial Sequence
  Antisense compound
aagagtaaatggcaagaaag

SEQ ID NO: 11029 - DNA, 20 bp, Artificial Sequence
  Antisense compound
caagagtaaatggcaagaaa

SEQ ID NO: 11030 - DNA, 20 bp, Artificial Sequence
  Antisense compound
ccaagagtaaatggcaagaa

SEQ ID NO: 11031 - DNA, 20 bp, Artificial Sequence
  Antisense compound
accaagagtaaatggcaaga

SEQ ID NO: 11032 - DNA, 20 bp, Artificial Sequence
  Antisense compound
taccaagagtaaatggcaag

SEQ ID NO: 11033 - DNA, 20 bp, Artificial Sequence
  Antisense compound
ataccaagagtaaatggcaa

SEQ ID NO: 11034 - DNA, 20 bp, Artificial Sequence
  Antisense compound
aataccaagagtaaatggca

SEQ ID NO: 11035 - DNA, 20 bp, Artificial Sequence
  Antisense compound
taataccaagagtaaatggc

SEQ ID NO: 11036 - DNA, 20 bp, Artificial Sequence
  Antisense compound
ataataccaagagtaaatgg

SEQ ID NO: 11037 - DNA, 20 bp, Artificial Sequence
  Antisense compound
cataataccaagagtaaatg

SEQ ID NO: 11038 - DNA, 20 bp, Artificial Sequence
  Antisense compound
ccataataccaagagtaaat

SEQ ID NO: 11039 - DNA, 20 bp, Artificial Sequence
  Antisense compound
gccataataccaagagtaaa

SEQ ID NO: 11040 - DNA, 20 bp, Artificial Sequence
  Antisense compound
tgccataataccaagagtaa

SEQ ID NO: 11041 - DNA, 20 bp, Artificial Sequence
  Antisense compound
ttgccataataccaagagta

SEQ ID NO: 11042 - DNA, 20 bp, Artificial Sequence
  Antisense compound
attgccataataccaagagt

SEQ ID NO: 11043 - DNA, 20 bp, Artificial Sequence
  Antisense compound
aattgccataataccaagag

SEQ ID NO: 11044 - DNA, 20 bp, Artificial Sequence
  Antisense compound
caattgccataataccaaga

SEQ ID NO: 11045 - DNA, 20 bp, Artificial Sequence
  Antisense compound
gcaattgccataataccaag

SEQ ID NO: 11046 - DNA, 20 bp, Artificial Sequence
  Antisense compound
agcaattgccataataccaa

SEQ ID NO: 11047 - DNA, 20 bp, Artificial Sequence
  Antisense compound
cagcaattgccataatacca

SEQ ID NO: 11048 - DNA, 20 bp, Artificial Sequence
  Antisense compound
gcagcaattgccataatacc

SEQ ID NO: 11049 - DNA, 20 bp, Artificial Sequence
  Antisense compound
tgcagcaattgccataatac

SEQ ID NO: 11050 - DNA, 20 bp, Artificial Sequence
  Antisense compound
atgcagcaattgccataata

SEQ ID NO: 11051 - DNA, 20 bp, Artificial Sequence
  Antisense compound
catgcagcaattgccataat

SEQ ID NO: 11052 - DNA, 20 bp, Artificial Sequence
  Antisense compound
acatgcagcaattgccataa

SEQ ID NO: 11053 - DNA, 20 bp, Artificial Sequence
  Antisense compound
cacatgcagcaattgccata

SEQ ID NO: 11054 - DNA, 20 bp, Artificial Sequence
  Antisense compound
gcacatgcagcaattgccat

SEQ ID NO: 11055 - DNA, 20 bp, Artificial Sequence
  Antisense compound
agcacatgcagcaattgcca

SEQ ID NO: 11056 - DNA, 20 bp, Artificial Sequence
  Antisense compound
tagcacatgcagcaattgcc

SEQ ID NO: 11057 - DNA, 20 bp, Artificial Sequence
  Antisense compound
atagcacatgcagcaattgc

SEQ ID NO: 11058 - DNA, 20 bp, Artificial Sequence
  Antisense compound
catagcacatgcagcaattg

SEQ ID NO: 11059 - DNA, 20 bp, Artificial Sequence
  Antisense compound
gcatagcacatgcagcaatt

SEQ ID NO: 11060 - DNA, 20 bp, Artificial Sequence
  Antisense compound
agcatagcacatgcagcaat

SEQ ID NO: 11061 - DNA, 20 bp, Artificial Sequence
  Antisense compound
cagcatagcacatgcagcaa

SEQ ID NO: 11062 - DNA, 20 bp, Artificial Sequence
  Antisense compound
gcagcatagcacatgcagca

SEQ ID NO: 11063 - DNA, 20 bp, Artificial Sequence
  Antisense compound
agcagcatagcacatgcagc

SEQ ID NO: 11064 - DNA, 20 bp, Artificial Sequence
  Antisense compound
aagcagcatagcacatgcag

SEQ ID NO: 11065 - DNA, 20 bp, Artificial Sequence
  Antisense compound
caagcagcatagcacatgca

SEQ ID NO: 11066 - DNA, 20 bp, Artificial Sequence
  Antisense compound
acaagcagcatagcacatgc

SEQ ID NO: 11067 - DNA, 20 bp, Artificial Sequence
  Antisense compound
aacaagcagcatagcacatg

SEQ ID NO: 11068 - DNA, 20 bp, Artificial Sequence
  Antisense compound
taacaagcagcatagcacat

SEQ ID NO: 11069 - DNA, 20 bp, Artificial Sequence
  Antisense compound
ttaacaagcagcatagcaca

SEQ ID NO: 11070 - DNA, 20 bp, Artificial Sequence
  Antisense compound
cttaacaagcagcatagcac

SEQ ID NO: 11071 - DNA, 20 bp, Artificial Sequence
  Antisense compound
gcttaacaagcagcatagca

SEQ ID NO: 11072 - DNA, 20 bp, Artificial Sequence
  Antisense compound
tgcttaacaagcagcatagc

SEQ ID NO: 11073 - DNA, 20 bp, Artificial Sequence
  Antisense compound
atgcttaacaagcagcatag

SEQ ID NO: 11074 - DNA, 20 bp, Artificial Sequence
  Antisense compound
tatgcttaacaagcagcata

SEQ ID NO: 11075 - DNA, 20 bp, Artificial Sequence
  Antisense compound
ttatgcttaacaagcagcat

SEQ ID NO: 11076 - DNA, 20 bp, Artificial Sequence
  Antisense compound
cttatgcttaacaagcagca

SEQ ID NO: 11077 - DNA, 20 bp, Artificial Sequence
  Antisense compound
gcttatgcttaacaagcagc

SEQ ID NO: 11078 - DNA, 20 bp, Artificial Sequence
  Antisense compound
tgcttatgcttaacaagcag

SEQ ID NO: 11079 - DNA, 20 bp, Artificial Sequence
  Antisense compound
gtgcttatgcttaacaagca

SEQ ID NO: 11080 - DNA, 20 bp, Artificial Sequence
  Antisense compound
cgtgcttatgcttaacaagc

SEQ ID NO: 11081 - DNA, 20 bp, Artificial Sequence
  Antisense compound
gcgtgcttatgcttaacaag

SEQ ID NO: 11082 - DNA, 20 bp, Artificial Sequence
  Antisense compound
tgcgtgcttatgcttaacaa

SEQ ID NO: 11083 - DNA, 20 bp, Artificial Sequence
  Antisense compound
atgcgtgcttatgcttaaca

SEQ ID NO: 11084 - DNA, 20 bp, Artificial Sequence
  Antisense compound
aatgcgtgcttatgcttaac

SEQ ID NO: 11085 - DNA, 20 bp, Artificial Sequence
  Antisense compound
gaatgcgtgcttatgcttaa

SEQ ID NO: 11086 - DNA, 20 bp, Artificial Sequence
  Antisense compound
agaatgcgtgcttatgctta

SEQ ID NO: 11087 - DNA, 20 bp, Artificial Sequence
  Antisense compound
aagaatgcgtgcttatgctt

SEQ ID NO: 11088 - DNA, 20 bp, Artificial Sequence
  Antisense compound
caagaatgcgtgcttatgct

SEQ ID NO: 11089 - DNA, 20 bp, Artificial Sequence
  Antisense compound
acaagaatgcgtgcttatgc

SEQ ID NO: 11090 - DNA, 20 bp, Artificial Sequence
  Antisense compound
cacaagaatgcgtgcttatg

SEQ ID NO: 11091 - DNA, 20 bp, Artificial Sequence
  Antisense compound
gcacaagaatgcgtgcttat

SEQ ID NO: 11092 - DNA, 20 bp, Artificial Sequence
  Antisense compound
agcacaagaatgcgtgctta

SEQ ID NO: 11093 - DNA, 20 bp, Artificial Sequence
  Antisense compound
aagcacaagaatgcgtgctt

SEQ ID NO: 11094 - DNA, 20 bp, Artificial Sequence
  Antisense compound
caagcacaagaatgcgtgct

SEQ ID NO: 11095 - DNA, 20 bp, Artificial Sequence
  Antisense compound
acaagcacaagaatgcgtgc

SEQ ID NO: 11096 - DNA, 20 bp, Artificial Sequence
  Antisense compound
aacaagcacaagaatgcgtg

SEQ ID NO: 11097 - DNA, 20 bp, Artificial Sequence
  Antisense compound
aaacaagcacaagaatgcgt

SEQ ID NO: 11098 - DNA, 20 bp, Artificial Sequence
  Antisense compound
gaaacaagcacaagaatgcg

SEQ ID NO: 11099 - DNA, 20 bp, Artificial Sequence
  Antisense compound
agaaacaagcacaagaatgc

SEQ ID NO: 11100 - DNA, 20 bp, Artificial Sequence
  Antisense compound
cagaaacaagcacaagaatg

SEQ ID NO: 11101 - DNA, 20 bp, Artificial Sequence
  Antisense compound
acagaaacaagcacaagaat

SEQ ID NO: 11102 - DNA, 20 bp, Artificial Sequence
  Antisense compound
aacagaaacaagcacaagaa

SEQ ID NO: 11103 - DNA, 20 bp, Artificial Sequence
  Antisense compound
taacagaaacaagcacaaga

SEQ ID NO: 11104 - DNA, 20 bp, Artificial Sequence
  Antisense compound
gtaacagaaacaagcacaag

SEQ ID NO: 11105 - DNA, 20 bp, Artificial Sequence
  Antisense compound
ggtaacagaaacaagcacaa

SEQ ID NO: 11106 - DNA, 20 bp, Artificial Sequence
  Antisense compound
aggtaacagaaacaagcaca

SEQ ID NO: 11107 - DNA, 20 bp, Artificial Sequence
  Antisense compound
aaggtaacagaaacaagcac

SEQ ID NO: 11108 - DNA, 20 bp, Artificial Sequence
  Antisense compound
gaaggtaacagaaacaagca

SEQ ID NO: 11109 - DNA, 20 bp, Artificial Sequence
  Antisense compound
agaaggtaacagaaacaagc

SEQ ID NO: 11110 - DNA, 20 bp, Artificial Sequence
  Antisense compound
gagaaggtaacagaaacaag

SEQ ID NO: 11111 - DNA, 20 bp, Artificial Sequence
  Antisense compound
agagaaggtaacagaaacaa

SEQ ID NO: 11112 - DNA, 20 bp, Artificial Sequence
  Antisense compound
aagagaaggtaacagaaaca

SEQ ID NO: 11113 - DNA, 20 bp, Artificial Sequence
  Antisense compound
caagagaaggtaacagaaac

SEQ ID NO: 11114 - DNA, 20 bp, Artificial Sequence
  Antisense compound
gcaagagaaggtaacagaaa

SEQ ID NO: 11115 - DNA, 20 bp, Artificial Sequence
  Antisense compound
tgcaagagaaggtaacagaa

SEQ ID NO: 11116 - DNA, 20 bp, Artificial Sequence
  Antisense compound
ttgcaagagaaggtaacaga

SEQ ID NO: 11117 - DNA, 20 bp, Artificial Sequence
  Antisense compound
gttgcaagagaaggtaacag

SEQ ID NO: 11118 - DNA, 20 bp, Artificial Sequence
  Antisense compound
tgttgcaagagaaggtaaca

SEQ ID NO: 11119 - DNA, 20 bp, Artificial Sequence
  Antisense compound
ctgttgcaagagaaggtaac

SEQ ID NO: 11120 - DNA, 20 bp, Artificial Sequence
  Antisense compound
actgttgcaagagaaggtaa

SEQ ID NO: 11121 - DNA, 20 bp, Artificial Sequence
  Antisense compound
aactgttgcaagagaaggta

SEQ ID NO: 11122 - DNA, 20 bp, Artificial Sequence
  Antisense compound
caactgttgcaagagaaggt

SEQ ID NO: 11123 - DNA, 20 bp, Artificial Sequence
  Antisense compound
gcaactgttgcaagagaagg

SEQ ID NO: 11124 - DNA, 20 bp, Artificial Sequence
  Antisense compound
agcaactgttgcaagagaag

SEQ ID NO: 11125 - DNA, 20 bp, Artificial Sequence
  Antisense compound
aagcaactgttgcaagagaa

SEQ ID NO: 11126 - DNA, 20 bp, Artificial Sequence
  Antisense compound
taagcaactgttgcaagaga

SEQ ID NO: 11127 - DNA, 20 bp, Artificial Sequence
  Antisense compound
gtaagcaactgttgcaagag

SEQ ID NO: 11128 - DNA, 20 bp, Artificial Sequence
  Antisense compound
agtaagcaactgttgcaaga

SEQ ID NO: 11129 - DNA, 20 bp, Artificial Sequence
  Antisense compound
aagtaagcaactgttgcaag

SEQ ID NO: 11130 - DNA, 20 bp, Artificial Sequence
  Antisense compound
aaagtaagcaactgttgcaa

SEQ ID NO: 11131 - DNA, 20 bp, Artificial Sequence
  Antisense compound
taaagtaagcaactgttgca

SEQ ID NO: 11132 - DNA, 20 bp, Artificial Sequence
  Antisense compound
ttaaagtaagcaactgttgc

SEQ ID NO: 11133 - DNA, 20 bp, Artificial Sequence
  Antisense compound
attaaagtaagcaactgttg

SEQ ID NO: 11134 - DNA, 20 bp, Artificial Sequence
  Antisense compound
tattaaagtaagcaactgtt

SEQ ID NO: 11135 - DNA, 20 bp, Artificial Sequence
  Antisense compound
atattaaagtaagcaactgt

SEQ ID NO: 11136 - DNA, 20 bp, Artificial Sequence
  Antisense compound
catattaaagtaagcaactg

SEQ ID NO: 11137 - DNA, 20 bp, Artificial Sequence
  Antisense compound
ccatattaaagtaagcaact

SEQ ID NO: 11138 - DNA, 20 bp, Artificial Sequence
  Antisense compound
accatattaaagtaagcaac

SEQ ID NO: 11139 - DNA, 20 bp, Artificial Sequence
  Antisense compound
gaccatattaaagtaagcaa

SEQ ID NO: 11140 - DNA, 20 bp, Artificial Sequence
  Antisense compound
agaccatattaaagtaagca

SEQ ID NO: 11141 - DNA, 20 bp, Artificial Sequence
  Antisense compound
tagaccatattaaagtaagc

SEQ ID NO: 11142 - DNA, 20 bp, Artificial Sequence
  Antisense compound
gtagaccatattaaagtaag

SEQ ID NO: 11143 - DNA, 20 bp, Artificial Sequence
  Antisense compound
tgtagaccatattaaagtaa

SEQ ID NO: 11144 - DNA, 20 bp, Artificial Sequence
  Antisense compound
atgtagaccatattaaagta

SEQ ID NO: 11145 - DNA, 20 bp, Artificial Sequence
  Antisense compound
catgtagaccatattaaagt

SEQ ID NO: 11146 - DNA, 20 bp, Artificial Sequence
  Antisense compound
gcatgtagaccatattaaag

SEQ ID NO: 11147 - DNA, 20 bp, Artificial Sequence
  Antisense compound
ggcatgtagaccatattaaa

SEQ ID NO: 11148 - DNA, 20 bp, Artificial Sequence
  Antisense compound
aggcatgtagaccatattaa

SEQ ID NO: 11149 - DNA, 20 bp, Artificial Sequence
  Antisense compound
caggcatgtagaccatatta

SEQ ID NO: 11150 - DNA, 20 bp, Artificial Sequence
  Antisense compound
gcaggcatgtagaccatatt

SEQ ID NO: 11151 - DNA, 20 bp, Artificial Sequence
  Antisense compound
agcaggcatgtagaccatat

SEQ ID NO: 11152 - DNA, 20 bp, Artificial Sequence
  Antisense compound
tagcaggcatgtagaccata

SEQ ID NO: 11153 - DNA, 20 bp, Artificial Sequence
  Antisense compound
ctagcaggcatgtagaccat

SEQ ID NO: 11154 - DNA, 20 bp, Artificial Sequence
  Antisense compound
gctagcaggcatgtagacca

SEQ ID NO: 11155 - DNA, 20 bp, Artificial Sequence
  Antisense compound
agctagcaggcatgtagacc

SEQ ID NO: 11156 - DNA, 20 bp, Artificial Sequence
  Antisense compound
cagctagcaggcatgtagac

SEQ ID NO: 11157 - DNA, 20 bp, Artificial Sequence
  Antisense compound
ccagctagcaggcatgtaga

SEQ ID NO: 11158 - DNA, 20 bp, Artificial Sequence
  Antisense compound
cccagctagcaggcatgtag

SEQ ID NO: 11159 - DNA, 20 bp, Artificial Sequence
  Antisense compound
acccagctagcaggcatgta

SEQ ID NO: 11160 - DNA, 20 bp, Artificial Sequence
  Antisense compound
cacccagctagcaggcatgt

SEQ ID NO: 11161 - DNA, 20 bp, Artificial Sequence
  Antisense compound
tcacccagctagcaggcatg

SEQ ID NO: 11162 - DNA, 20 bp, Artificial Sequence
  Antisense compound
atcacccagctagcaggcat

SEQ ID NO: 11163 - DNA, 20 bp, Artificial Sequence
  Antisense compound
catcacccagctagcaggca

SEQ ID NO: 11164 - DNA, 20 bp, Artificial Sequence
  Antisense compound
gcatcacccagctagcaggc

SEQ ID NO: 11165 - DNA, 20 bp, Artificial Sequence
  Antisense compound
cgcatcacccagctagcagg

SEQ ID NO: 11166 - DNA, 20 bp, Artificial Sequence
  Antisense compound
acgcatcacccagctagcag

SEQ ID NO: 11167 - DNA, 20 bp, Artificial Sequence
  Antisense compound
tacgcatcacccagctagca

SEQ ID NO: 11168 - DNA, 20 bp, Artificial Sequence
  Antisense compound
atacgcatcacccagctagc

SEQ ID NO: 11169 - DNA, 20 bp, Artificial Sequence
  Antisense compound
gatacgcatcacccagctag

SEQ ID NO: 11170 - DNA, 20 bp, Artificial Sequence
  Antisense compound
tgatacgcatcacccagcta

SEQ ID NO: 11171 - DNA, 20 bp, Artificial Sequence
  Antisense compound
atgatacgcatcacccagct

SEQ ID NO: 11172 - DNA, 20 bp, Artificial Sequence
  Antisense compound
catgatacgcatcacccagc

SEQ ID NO: 11173 - DNA, 20 bp, Artificial Sequence
  Antisense compound
tcatgatacgcatcacccag

SEQ ID NO: 11174 - DNA, 20 bp, Artificial Sequence
  Antisense compound
gtcatgatacgcatcaccca

SEQ ID NO: 11175 - DNA, 20 bp, Artificial Sequence
  Antisense compound
tgtcatgatacgcatcaccc

SEQ ID NO: 11176 - DNA, 20 bp, Artificial Sequence
  Antisense compound
atgtcatgatacgcatcacc

SEQ ID NO: 11177 - DNA, 20 bp, Artificial Sequence
  Antisense compound
catgtcatgatacgcatcac

SEQ ID NO: 11178 - DNA, 20 bp, Artificial Sequence
  Antisense compound
ccatgtcatgatacgcatca

SEQ ID NO: 11179 - DNA, 20 bp, Artificial Sequence
  Antisense compound
gccatgtcatgatacgcatc

SEQ ID NO: 11180 - DNA, 20 bp, Artificial Sequence
  Antisense compound
agccatgtcatgatacgcat

SEQ ID NO: 11181 - DNA, 20 bp, Artificial Sequence
  Antisense compound
aagccatgtcatgatacgca

SEQ ID NO: 11182 - DNA, 20 bp, Artificial Sequence
  Antisense compound
caagccatgtcatgatacgc

SEQ ID NO: 11183 - DNA, 20 bp, Artificial Sequence
  Antisense compound
tcaagccatgtcatgatacg

SEQ ID NO: 11184 - DNA, 20 bp, Artificial Sequence
  Antisense compound
ttcaagccatgtcatgatac

SEQ ID NO: 11185 - DNA, 20 bp, Artificial Sequence
  Antisense compound
attcaagccatgtcatgata

SEQ ID NO: 11186 - DNA, 20 bp, Artificial Sequence
  Antisense compound
aattcaagccatgtcatgat

SEQ ID NO: 11187 - DNA, 20 bp, Artificial Sequence
  Antisense compound
caattcaagccatgtcatga

SEQ ID NO: 11188 - DNA, 20 bp, Artificial Sequence
  Antisense compound
ccaattcaagccatgtcatg

SEQ ID NO: 11189 - DNA, 20 bp, Artificial Sequence
  Antisense compound
gccaattcaagccatgtcat

SEQ ID NO: 11190 - DNA, 20 bp, Artificial Sequence
  Antisense compound
agccaattcaagccatgtca

SEQ ID NO: 11191 - DNA, 20 bp, Artificial Sequence
  Antisense compound
cagccaattcaagccatgtc

SEQ ID NO: 11192 - DNA, 20 bp, Artificial Sequence
  Antisense compound
tcagccaattcaagccatgt

SEQ ID NO: 11193 - DNA, 20 bp, Artificial Sequence
  Antisense compound
gtcagccaattcaagccatg

SEQ ID NO: 11194 - DNA, 20 bp, Artificial Sequence
  Antisense compound
tgtcagccaattcaagccat

SEQ ID NO: 11195 - DNA, 20 bp, Artificial Sequence
  Antisense compound
gtgtcagccaattcaagcca

SEQ ID NO: 11196 - DNA, 20 bp, Artificial Sequence
  Antisense compound
agtgtcagccaattcaagcc

SEQ ID NO: 11197 - DNA, 20 bp, Artificial Sequence
  Antisense compound
tagtgtcagccaattcaagc

SEQ ID NO: 11198 - DNA, 20 bp, Artificial Sequence
  Antisense compound
ctagtgtcagccaattcaag

SEQ ID NO: 11199 - DNA, 20 bp, Artificial Sequence
  Antisense compound
gctagtgtcagccaattcaa

SEQ ID NO: 11200 - DNA, 20 bp, Artificial Sequence
  Antisense compound
agctagtgtcagccaattca

SEQ ID NO: 11201 - DNA, 20 bp, Artificial Sequence
  Antisense compound
aagctagtgtcagccaattc

SEQ ID NO: 11202 - DNA, 20 bp, Artificial Sequence
  Antisense compound
caagctagtgtcagccaatt

SEQ ID NO: 11203 - DNA, 20 bp, Artificial Sequence
  Antisense compound
acaagctagtgtcagccaat

SEQ ID NO: 11204 - DNA, 20 bp, Artificial Sequence
  Antisense compound
gacaagctagtgtcagccaa

SEQ ID NO: 11205 - DNA, 20 bp, Artificial Sequence
  Antisense compound
agacaagctagtgtcagcca

SEQ ID NO: 11206 - DNA, 20 bp, Artificial Sequence
  Antisense compound
cagacaagctagtgtcagcc

SEQ ID NO: 11207 - DNA, 20 bp, Artificial Sequence
  Antisense compound
ccagacaagctagtgtcagc

SEQ ID NO: 11208 - DNA, 20 bp, Artificial Sequence
  Antisense compound
accagacaagctagtgtcag

SEQ ID NO: 11209 - DNA, 20 bp, Artificial Sequence
  Antisense compound
aaccagacaagctagtgtca

SEQ ID NO: 11210 - DNA, 20 bp, Artificial Sequence
  Antisense compound
taaccagacaagctagtgtc

SEQ ID NO: 11211 - DNA, 20 bp, Artificial Sequence
  Antisense compound
ataaccagacaagctagtgt

SEQ ID NO: 11212 - DNA, 20 bp, Artificial Sequence
  Antisense compound
tataaccagacaagctagtg

SEQ ID NO: 11213 - DNA, 20 bp, Artificial Sequence
  Antisense compound
ctataaccagacaagctagt

SEQ ID NO: 11214 - DNA, 20 bp, Artificial Sequence
  Antisense compound
cctataaccagacaagctag

SEQ ID NO: 11215 - DNA, 20 bp, Artificial Sequence
  Antisense compound
gcctataaccagacaagcta

SEQ ID NO: 11216 - DNA, 20 bp, Artificial Sequence
  Antisense compound
agcctataaccagacaagct

SEQ ID NO: 11217 - DNA, 20 bp, Artificial Sequence
  Antisense compound
aagcctataaccagacaagc

SEQ ID NO: 11218 - DNA, 20 bp, Artificial Sequence
  Antisense compound
taagcctataaccagacaag

SEQ ID NO: 11219 - DNA, 20 bp, Artificial Sequence
  Antisense compound
ttaagcctataaccagacaa

SEQ ID NO: 11220 - DNA, 20 bp, Artificial Sequence
  Antisense compound
cttaagcctataaccagaca

SEQ ID NO: 11221 - DNA, 20 bp, Artificial Sequence
  Antisense compound
ccttaagcctataaccagac

SEQ ID NO: 11222 - DNA, 20 bp, Artificial Sequence
  Antisense compound
tccttaagcctataaccaga

SEQ ID NO: 11223 - DNA, 20 bp, Artificial Sequence
  Antisense compound
atccttaagcctataaccag

SEQ ID NO: 11224 - DNA, 20 bp, Artificial Sequence
  Antisense compound
aatccttaagcctataacca

SEQ ID NO: 11225 - DNA, 20 bp, Artificial Sequence
  Antisense compound
caatccttaagcctataacc

SEQ ID NO: 11226 - DNA, 20 bp, Artificial Sequence
  Antisense compound
acaatccttaagcctataac

SEQ ID NO: 11227 - DNA, 20 bp, Artificial Sequence
  Antisense compound
cacaatccttaagcctataa

SEQ ID NO: 11228 - DNA, 20 bp, Artificial Sequence
  Antisense compound
acacaatccttaagcctata

SEQ ID NO: 11229 - DNA, 20 bp, Artificial Sequence
  Antisense compound
aacacaatccttaagcctat

SEQ ID NO: 11230 - DNA, 20 bp, Artificial Sequence
  Antisense compound
taacacaatccttaagccta

SEQ ID NO: 11231 - DNA, 20 bp, Artificial Sequence
  Antisense compound
ataacacaatccttaagcct

SEQ ID NO: 11232 - DNA, 20 bp, Artificial Sequence
  Antisense compound
cataacacaatccttaagcc

SEQ ID NO: 11233 - DNA, 20 bp, Artificial Sequence
  Antisense compound
acataacacaatccttaagc

SEQ ID NO: 11234 - DNA, 20 bp, Artificial Sequence
  Antisense compound
tacataacacaatccttaag

SEQ ID NO: 11235 - DNA, 20 bp, Artificial Sequence
  Antisense compound
atacataacacaatccttaa

SEQ ID NO: 11236 - DNA, 20 bp, Artificial Sequence
  Antisense compound
catacataacacaatcctta

SEQ ID NO: 11237 - DNA, 20 bp, Artificial Sequence
  Antisense compound
gcatacataacacaatcctt

SEQ ID NO: 11238 - DNA, 20 bp, Artificial Sequence
  Antisense compound
agcatacataacacaatcct

SEQ ID NO: 11239 - DNA, 20 bp, Artificial Sequence
  Antisense compound
aagcatacataacacaatcc

SEQ ID NO: 11240 - DNA, 20 bp, Artificial Sequence
  Antisense compound
gaagcatacataacacaatc

SEQ ID NO: 11241 - DNA, 20 bp, Artificial Sequence
  Antisense compound
tgaagcatacataacacaat

SEQ ID NO: 11242 - DNA, 20 bp, Artificial Sequence
  Antisense compound
ctgaagcatacataacacaa

SEQ ID NO: 11243 - DNA, 20 bp, Artificial Sequence
  Antisense compound
gctgaagcatacataacaca

SEQ ID NO: 11244 - DNA, 20 bp, Artificial Sequence
  Antisense compound
agctgaagcatacataacac

SEQ ID NO: 11245 - DNA, 20 bp, Artificial Sequence
  Antisense compound
aagctgaagcatacataaca

SEQ ID NO: 11246 - DNA, 20 bp, Artificial Sequence
  Antisense compound
aaagctgaagcatacataac

SEQ ID NO: 11247 - DNA, 20 bp, Artificial Sequence
  Antisense compound
taaagctgaagcatacataa

SEQ ID NO: 11248 - DNA, 20 bp, Artificial Sequence
  Antisense compound
ctaaagctgaagcatacata

SEQ ID NO: 11249 - DNA, 20 bp, Artificial Sequence
  Antisense compound
actaaagctgaagcatacat

SEQ ID NO: 11250 - DNA, 20 bp, Artificial Sequence
  Antisense compound
aactaaagctgaagcataca

SEQ ID NO: 11251 - DNA, 20 bp, Artificial Sequence
  Antisense compound
aaactaaagctgaagcatac

SEQ ID NO: 11252 - DNA, 20 bp, Artificial Sequence
  Antisense compound
aaaactaaagctgaagcata

SEQ ID NO: 11253 - DNA, 20 bp, Artificial Sequence
  Antisense compound
caaaactaaagctgaagcat

SEQ ID NO: 11254 - DNA, 20 bp, Artificial Sequence
  Antisense compound
gcaaaactaaagctgaagca

SEQ ID NO: 11255 - DNA, 20 bp, Artificial Sequence
  Antisense compound
agcaaaactaaagctgaagc

SEQ ID NO: 11256 - DNA, 20 bp, Artificial Sequence
  Antisense compound
aagcaaaactaaagctgaag

SEQ ID NO: 11257 - DNA, 20 bp, Artificial Sequence
  Antisense compound
taagcaaaactaaagctgaa

SEQ ID NO: 11258 - DNA, 20 bp, Artificial Sequence
  Antisense compound
ataagcaaaactaaagctga

SEQ ID NO: 11259 - DNA, 20 bp, Artificial Sequence
  Antisense compound
aataagcaaaactaaagctg

SEQ ID NO: 11260 - DNA, 20 bp, Artificial Sequence
  Antisense compound
gaataagcaaaactaaagct

SEQ ID NO: 11261 - DNA, 20 bp, Artificial Sequence
  Antisense compound
agaataagcaaaactaaagc

SEQ ID NO: 11262 - DNA, 20 bp, Artificial Sequence
  Antisense compound
gagaataagcaaaactaaag

SEQ ID NO: 11263 - DNA, 20 bp, Artificial Sequence
  Antisense compound
tgagaataagcaaaactaaa

SEQ ID NO: 11264 - DNA, 20 bp, Artificial Sequence
  Antisense compound
atgagaataagcaaaactaa

SEQ ID NO: 11265 - DNA, 20 bp, Artificial Sequence
  Antisense compound
catgagaataagcaaaacta

SEQ ID NO: 11266 - DNA, 20 bp, Artificial Sequence
  Antisense compound
tcatgagaataagcaaaact

SEQ ID NO: 11267 - DNA, 20 bp, Artificial Sequence
  Antisense compound
gtcatgagaataagcaaaac

SEQ ID NO: 11268 - DNA, 20 bp, Artificial Sequence
  Antisense compound
tgtcatgagaataagcaaaa

SEQ ID NO: 11269 - DNA, 20 bp, Artificial Sequence
  Antisense compound
ctgtcatgagaataagcaaa

SEQ ID NO: 11270 - DNA, 20 bp, Artificial Sequence
  Antisense compound
gctgtcatgagaataagcaa

SEQ ID NO: 11271 - DNA, 20 bp, Artificial Sequence
  Antisense compound
agctgtcatgagaataagca

SEQ ID NO: 11272 - DNA, 20 bp, Artificial Sequence
  Antisense compound
gagctgtcatgagaataagc

SEQ ID NO: 11273 - DNA, 20 bp, Artificial Sequence
  Antisense compound
cgagctgtcatgagaataag

SEQ ID NO: 11274 - DNA, 20 bp, Artificial Sequence
  Antisense compound
gcgagctgtcatgagaataa

SEQ ID NO: 11275 - DNA, 20 bp, Artificial Sequence
  Antisense compound
tgcgagctgtcatgagaata

SEQ ID NO: 11276 - DNA, 20 bp, Artificial Sequence
  Antisense compound
gtgcgagctgtcatgagaat

SEQ ID NO: 11277 - DNA, 20 bp, Artificial Sequence
  Antisense compound
agtgcgagctgtcatgagaa

SEQ ID NO: 11278 - DNA, 20 bp, Artificial Sequence
  Antisense compound
cagtgcgagctgtcatgaga

SEQ ID NO: 11279 - DNA, 20 bp, Artificial Sequence
  Antisense compound
acagtgcgagctgtcatgag

SEQ ID NO: 11280 - DNA, 20 bp, Artificial Sequence
  Antisense compound
aacagtgcgagctgtcatga

SEQ ID NO: 11281 - DNA, 20 bp, Artificial Sequence
  Antisense compound
aaacagtgcgagctgtcatg

SEQ ID NO: 11282 - DNA, 20 bp, Artificial Sequence
  Antisense compound
taaacagtgcgagctgtcat

SEQ ID NO: 11283 - DNA, 20 bp, Artificial Sequence
  Antisense compound
ataaacagtgcgagctgtca

SEQ ID NO: 11284 - DNA, 20 bp, Artificial Sequence
  Antisense compound
cataaacagtgcgagctgtc

SEQ ID NO: 11285 - DNA, 20 bp, Artificial Sequence
  Antisense compound
tcataaacagtgcgagctgt

SEQ ID NO: 11286 - DNA, 20 bp, Artificial Sequence
  Antisense compound
atcataaacagtgcgagctg

SEQ ID NO: 11287 - DNA, 20 bp, Artificial Sequence
  Antisense compound
catcataaacagtgcgagct

SEQ ID NO: 11288 - DNA, 20 bp, Artificial Sequence
  Antisense compound
tcatcataaacagtgcgagc

SEQ ID NO: 11289 - DNA, 20 bp, Artificial Sequence
  Antisense compound
atcatcataaacagtgcgag

SEQ ID NO: 11290 - DNA, 20 bp, Artificial Sequence
  Antisense compound
catcatcataaacagtgcga

SEQ ID NO: 11291 - DNA, 20 bp, Artificial Sequence
  Antisense compound
gcatcatcataaacagtgcg

SEQ ID NO: 11292 - DNA, 20 bp, Artificial Sequence
  Antisense compound
agcatcatcataaacagtgc

SEQ ID NO: 11293 - DNA, 20 bp, Artificial Sequence
  Antisense compound
cagcatcatcataaacagtg

SEQ ID NO: 11294 - DNA, 20 bp, Artificial Sequence
  Antisense compound
gcagcatcatcataaacagt

SEQ ID NO: 11295 - DNA, 20 bp, Artificial Sequence
  Antisense compound
agcagcatcatcataaacag

SEQ ID NO: 11296 - DNA, 20 bp, Artificial Sequence
  Antisense compound
tagcagcatcatcataaaca

SEQ ID NO: 11297 - DNA, 20 bp, Artificial Sequence
  Antisense compound
ctagcagcatcatcataaac

SEQ ID NO: 11298 - DNA, 20 bp, Artificial Sequence
  Antisense compound
tctagcagcatcatcataaa

SEQ ID NO: 11299 - DNA, 20 bp, Artificial Sequence
  Antisense compound
gtctagcagcatcatcataa

SEQ ID NO: 11300 - DNA, 20 bp, Artificial Sequence
  Antisense compound
cgtctagcagcatcatcata

SEQ ID NO: 11301 - DNA, 20 bp, Artificial Sequence
  Antisense compound
acgtctagcagcatcatcat

SEQ ID NO: 11302 - DNA, 20 bp, Artificial Sequence
  Antisense compound
cacgtctagcagcatcatca

SEQ ID NO: 11303 - DNA, 20 bp, Artificial Sequence
  Antisense compound
acacgtctagcagcatcatc

SEQ ID NO: 11304 - DNA, 20 bp, Artificial Sequence
  Antisense compound
aacacgtctagcagcatcat

SEQ ID NO: 11305 - DNA, 20 bp, Artificial Sequence
  Antisense compound
aaacacgtctagcagcatca

SEQ ID NO: 11306 - DNA, 20 bp, Artificial Sequence
  Antisense compound
caaacacgtctagcagcatc

SEQ ID NO: 11307 - DNA, 20 bp, Artificial Sequence
  Antisense compound
ccaaacacgtctagcagcat

SEQ ID NO: 11308 - DNA, 20 bp, Artificial Sequence
  Antisense compound
tccaaacacgtctagcagca

SEQ ID NO: 11309 - DNA, 20 bp, Artificial Sequence
  Antisense compound
gtccaaacacgtctagcagc

SEQ ID NO: 11310 - DNA, 20 bp, Artificial Sequence
  Antisense compound
tgtccaaacacgtctagcag

SEQ ID NO: 11311 - DNA, 20 bp, Artificial Sequence
  Antisense compound
gtgtccaaacacgtctagca

SEQ ID NO: 11312 - DNA, 20 bp, Artificial Sequence
  Antisense compound
agtgtccaaacacgtctagc

SEQ ID NO: 11313 - DNA, 20 bp, Artificial Sequence
  Antisense compound
cagtgtccaaacacgtctag

SEQ ID NO: 11314 - DNA, 20 bp, Artificial Sequence
  Antisense compound
tcagtgtccaaacacgtcta

SEQ ID NO: 11315 - DNA, 20 bp, Artificial Sequence
  Antisense compound
atcagtgtccaaacacgtct

SEQ ID NO: 11316 - DNA, 20 bp, Artificial Sequence
  Antisense compound
catcagtgtccaaacacgtc

SEQ ID NO: 11317 - DNA, 20 bp, Artificial Sequence
  Antisense compound
tcatcagtgtccaaacacgt

SEQ ID NO: 11318 - DNA, 20 bp, Artificial Sequence
  Antisense compound
ttcatcagtgtccaaacacg

SEQ ID NO: 11319 - DNA, 20 bp, Artificial Sequence
  Antisense compound
attcatcagtgtccaaacac

SEQ ID NO: 11320 - DNA, 20 bp, Artificial Sequence
  Antisense compound
cattcatcagtgtccaaaca

SEQ ID NO: 11321 - DNA, 20 bp, Artificial Sequence
  Antisense compound
acattcatcagtgtccaaac

SEQ ID NO: 11322 - DNA, 20 bp, Artificial Sequence
  Antisense compound
gacattcatcagtgtccaaa

SEQ ID NO: 11323 - DNA, 20 bp, Artificial Sequence
  Antisense compound
tgacattcatcagtgtccaa

SEQ ID NO: 11324 - DNA, 20 bp, Artificial Sequence
  Antisense compound
atgacattcatcagtgtcca

SEQ ID NO: 11325 - DNA, 20 bp, Artificial Sequence
  Antisense compound
aatgacattcatcagtgtcc

SEQ ID NO: 11326 - DNA, 20 bp, Artificial Sequence
  Antisense compound
taatgacattcatcagtgtc

SEQ ID NO: 11327 - DNA, 20 bp, Artificial Sequence
  Antisense compound
gtaatgacattcatcagtgt

SEQ ID NO: 11328 - DNA, 20 bp, Artificial Sequence
  Antisense compound
tgtaatgacattcatcagtg

SEQ ID NO: 11329 - DNA, 20 bp, Artificial Sequence
  Antisense compound
gtgtaatgacattcatcagt

SEQ ID NO: 11330 - DNA, 20 bp, Artificial Sequence
  Antisense compound
agtgtaatgacattcatcag

SEQ ID NO: 11331 - DNA, 20 bp, Artificial Sequence
  Antisense compound
aagtgtaatgacattcatca

SEQ ID NO: 11332 - DNA, 20 bp, Artificial Sequence
  Antisense compound
caagtgtaatgacattcatc

SEQ ID NO: 11333 - DNA, 20 bp, Artificial Sequence
  Antisense compound
acaagtgtaatgacattcat

SEQ ID NO: 11334 - DNA, 20 bp, Artificial Sequence
  Antisense compound
aacaagtgtaatgacattca

SEQ ID NO: 11335 - DNA, 20 bp, Artificial Sequence
  Antisense compound
aaacaagtgtaatgacattc

SEQ ID NO: 11336 - DNA, 20 bp, Artificial Sequence
  Antisense compound
taaacaagtgtaatgacatt

SEQ ID NO: 11337 - DNA, 20 bp, Artificial Sequence
  Antisense compound
gtaaacaagtgtaatgacat

SEQ ID NO: 11338 - DNA, 20 bp, Artificial Sequence
  Antisense compound
tgtaaacaagtgtaatgaca

SEQ ID NO: 11339 - DNA, 20 bp, Artificial Sequence
  Antisense compound
ttgtaaacaagtgtaatgac

SEQ ID NO: 11340 - DNA, 20 bp, Artificial Sequence
  Antisense compound
tttgtaaacaagtgtaatga

SEQ ID NO: 11341 - DNA, 20 bp, Artificial Sequence
  Antisense compound
ctttgtaaacaagtgtaatg

SEQ ID NO: 11342 - DNA, 20 bp, Artificial Sequence
  Antisense compound
actttgtaaacaagtgtaat

SEQ ID NO: 11343 - DNA, 20 bp, Artificial Sequence
  Antisense compound
gactttgtaaacaagtgtaa

SEQ ID NO: 11344 - DNA, 20 bp, Artificial Sequence
  Antisense compound
agactttgtaaacaagtgta

SEQ ID NO: 11345 - DNA, 20 bp, Artificial Sequence
  Antisense compound
tagactttgtaaacaagtgt

SEQ ID NO: 11346 - DNA, 20 bp, Artificial Sequence
  Antisense compound
gtagactttgtaaacaagtg

SEQ ID NO: 11347 - DNA, 20 bp, Artificial Sequence
  Antisense compound
agtagactttgtaaacaagt

SEQ ID NO: 11348 - DNA, 20 bp, Artificial Sequence
  Antisense compound
tagtagactttgtaaacaag

SEQ ID NO: 11349 - DNA, 20 bp, Artificial Sequence
  Antisense compound
atagtagactttgtaaacaa

SEQ ID NO: 11350 - DNA, 20 bp, Artificial Sequence
  Antisense compound
catagtagactttgtaaaca

SEQ ID NO: 11351 - DNA, 20 bp, Artificial Sequence
  Antisense compound
ccatagtagactttgtaaac

SEQ ID NO: 11352 - DNA, 20 bp, Artificial Sequence
  Antisense compound
accatagtagactttgtaaa

SEQ ID NO: 11353 - DNA, 20 bp, Artificial Sequence
  Antisense compound
taccatagtagactttgtaa

SEQ ID NO: 11354 - DNA, 20 bp, Artificial Sequence
  Antisense compound
ttaccatagtagactttgta

SEQ ID NO: 11355 - DNA, 20 bp, Artificial Sequence
  Antisense compound
attaccatagtagactttgt

SEQ ID NO: 11356 - DNA, 20 bp, Artificial Sequence
  Antisense compound
cattaccatagtagactttg

SEQ ID NO: 11357 - DNA, 20 bp, Artificial Sequence
  Antisense compound
gcattaccatagtagacttt

SEQ ID NO: 11358 - DNA, 20 bp, Artificial Sequence
  Antisense compound
agcattaccatagtagactt

SEQ ID NO: 11359 - DNA, 20 bp, Artificial Sequence
  Antisense compound
aagcattaccatagtagact

SEQ ID NO: 11360 - DNA, 20 bp, Artificial Sequence
  Antisense compound
aaagcattaccatagtagac

SEQ ID NO: 11361 - DNA, 20 bp, Artificial Sequence
  Antisense compound
taaagcattaccatagtaga

SEQ ID NO: 11362 - DNA, 20 bp, Artificial Sequence
  Antisense compound
ctaaagcattaccatagtag

SEQ ID NO: 11363 - DNA, 20 bp, Artificial Sequence
  Antisense compound
tctaaagcattaccatagta

SEQ ID NO: 11364 - DNA, 20 bp, Artificial Sequence
  Antisense compound
atctaaagcattaccatagt

SEQ ID NO: 11365 - DNA, 20 bp, Artificial Sequence
  Antisense compound
gatctaaagcattaccatag

SEQ ID NO: 11366 - DNA, 20 bp, Artificial Sequence
  Antisense compound
tgatctaaagcattaccata

SEQ ID NO: 11367 - DNA, 20 bp, Artificial Sequence
  Antisense compound
ttgatctaaagcattaccat

SEQ ID NO: 11368 - DNA, 20 bp, Artificial Sequence
  Antisense compound
cttgatctaaagcattacca

SEQ ID NO: 11369 - DNA, 20 bp, Artificial Sequence
  Antisense compound
gcttgatctaaagcattacc

SEQ ID NO: 11370 - DNA, 20 bp, Artificial Sequence
  Antisense compound
agcttgatctaaagcattac

SEQ ID NO: 11371 - DNA, 20 bp, Artificial Sequence
  Antisense compound
tagcttgatctaaagcatta

SEQ ID NO: 11372 - DNA, 20 bp, Artificial Sequence
  Antisense compound
atagcttgatctaaagcatt

SEQ ID NO: 11373 - DNA, 20 bp, Artificial Sequence
  Antisense compound
aatagcttgatctaaagcat

SEQ ID NO: 11374 - DNA, 20 bp, Artificial Sequence
  Antisense compound
aaatagcttgatctaaagca

SEQ ID NO: 11375 - DNA, 20 bp, Artificial Sequence
  Antisense compound
gaaatagcttgatctaaagc

SEQ ID NO: 11376 - DNA, 20 bp, Artificial Sequence
  Antisense compound
ggaaatagcttgatctaaag

SEQ ID NO: 11377 - DNA, 20 bp, Artificial Sequence
  Antisense compound
tggaaatagcttgatctaaa

SEQ ID NO: 11378 - DNA, 20 bp, Artificial Sequence
  Antisense compound
atggaaatagcttgatctaa

SEQ ID NO: 11379 - DNA, 20 bp, Artificial Sequence
  Antisense compound
catggaaatagcttgatcta

SEQ ID NO: 11380 - DNA, 20 bp, Artificial Sequence
  Antisense compound
acatggaaatagcttgatct

SEQ ID NO: 11381 - DNA, 20 bp, Artificial Sequence
  Antisense compound
cacatggaaatagcttgatc

SEQ ID NO: 11382 - DNA, 20 bp, Artificial Sequence
  Antisense compound
ccacatggaaatagcttgat

SEQ ID NO: 11383 - DNA, 20 bp, Artificial Sequence
  Antisense compound
cccacatggaaatagcttga

SEQ ID NO: 11384 - DNA, 20 bp, Artificial Sequence
  Antisense compound
gcccacatggaaatagcttg

SEQ ID NO: 11385 - DNA, 20 bp, Artificial Sequence
  Antisense compound
ggcccacatggaaatagctt

SEQ ID NO: 11386 - DNA, 20 bp, Artificial Sequence
  Antisense compound
aggcccacatggaaatagct

SEQ ID NO: 11387 - DNA, 20 bp, Artificial Sequence
  Antisense compound
aaggcccacatggaaatagc

SEQ ID NO: 11388 - DNA, 20 bp, Artificial Sequence
  Antisense compound
taaggcccacatggaaatag

SEQ ID NO: 11389 - DNA, 20 bp, Artificial Sequence
  Antisense compound
ctaaggcccacatggaaata

SEQ ID NO: 11390 - DNA, 20 bp, Artificial Sequence
  Antisense compound
actaaggcccacatggaaat

SEQ ID NO: 11391 - DNA, 20 bp, Artificial Sequence
  Antisense compound
aactaaggcccacatggaaa

SEQ ID NO: 11392 - DNA, 20 bp, Artificial Sequence
  Antisense compound
taactaaggcccacatggaa

SEQ ID NO: 11393 - DNA, 20 bp, Artificial Sequence
  Antisense compound
ataactaaggcccacatgga

SEQ ID NO: 11394 - DNA, 20 bp, Artificial Sequence
  Antisense compound
aataactaaggcccacatgg

SEQ ID NO: 11395 - DNA, 20 bp, Artificial Sequence
  Antisense compound
aaataactaaggcccacatg

SEQ ID NO: 11396 - DNA, 20 bp, Artificial Sequence
  Antisense compound
gaaataactaaggcccacat

SEQ ID NO: 11397 - DNA, 20 bp, Artificial Sequence
  Antisense compound
agaaataactaaggcccaca

SEQ ID NO: 11398 - DNA, 20 bp, Artificial Sequence
  Antisense compound
cagaaataactaaggcccac

SEQ ID NO: 11399 - DNA, 20 bp, Artificial Sequence
  Antisense compound
acagaaataactaaggccca

SEQ ID NO: 11400 - DNA, 20 bp, Artificial Sequence
  Antisense compound
tacagaaataactaaggccc

SEQ ID NO: 11401 - DNA, 20 bp, Artificial Sequence
  Antisense compound
ttacagaaataactaaggcc

SEQ ID NO: 11402 - DNA, 20 bp, Artificial Sequence
  Antisense compound
gttacagaaataactaaggc

SEQ ID NO: 11403 - DNA, 20 bp, Artificial Sequence
  Antisense compound
ggttacagaaataactaagg

SEQ ID NO: 11404 - DNA, 20 bp, Artificial Sequence
  Antisense compound
aggttacagaaataactaag

SEQ ID NO: 11405 - DNA, 20 bp, Artificial Sequence
  Antisense compound
gaggttacagaaataactaa

SEQ ID NO: 11406 - DNA, 20 bp, Artificial Sequence
  Antisense compound
agaggttacagaaataacta

SEQ ID NO: 11407 - DNA, 20 bp, Artificial Sequence
  Antisense compound
tagaggttacagaaataact

SEQ ID NO: 11408 - DNA, 20 bp, Artificial Sequence
  Antisense compound
ttagaggttacagaaataac

SEQ ID NO: 11409 - DNA, 20 bp, Artificial Sequence
  Antisense compound
gttagaggttacagaaataa

SEQ ID NO: 11410 - DNA, 20 bp, Artificial Sequence
  Antisense compound
agttagaggttacagaaata

SEQ ID NO: 11411 - DNA, 20 bp, Artificial Sequence
  Antisense compound
tagttagaggttacagaaat

SEQ ID NO: 11412 - DNA, 20 bp, Artificial Sequence
  Antisense compound
atagttagaggttacagaaa

SEQ ID NO: 11413 - DNA, 20 bp, Artificial Sequence
  Antisense compound
aatagttagaggttacagaa

SEQ ID NO: 11414 - DNA, 20 bp, Artificial Sequence
  Antisense compound
gaatagttagaggttacaga

SEQ ID NO: 11415 - DNA, 20 bp, Artificial Sequence
  Antisense compound
agaatagttagaggttacag

SEQ ID NO: 11416 - DNA, 20 bp, Artificial Sequence
  Antisense compound
cagaatagttagaggttaca

SEQ ID NO: 11417 - DNA, 20 bp, Artificial Sequence
  Antisense compound
ccagaatagttagaggttac

SEQ ID NO: 11418 - DNA, 20 bp, Artificial Sequence
  Antisense compound
accagaatagttagaggtta

SEQ ID NO: 11419 - DNA, 20 bp, Artificial Sequence
  Antisense compound
caccagaatagttagaggtt

SEQ ID NO: 11420 - DNA, 20 bp, Artificial Sequence
  Antisense compound
acaccagaatagttagaggt

SEQ ID NO: 11421 - DNA, 20 bp, Artificial Sequence
  Antisense compound
gacaccagaatagttagagg

SEQ ID NO: 11422 - DNA, 20 bp, Artificial Sequence
  Antisense compound
cgacaccagaatagttagag

SEQ ID NO: 11423 - DNA, 20 bp, Artificial Sequence
  Antisense compound
acgacaccagaatagttaga

SEQ ID NO: 11424 - DNA, 20 bp, Artificial Sequence
  Antisense compound
aacgacaccagaatagttag

SEQ ID NO: 11425 - DNA, 20 bp, Artificial Sequence
  Antisense compound
taacgacaccagaatagtta

SEQ ID NO: 11426 - DNA, 20 bp, Artificial Sequence
  Antisense compound
gtaacgacaccagaatagtt

SEQ ID NO: 11427 - DNA, 20 bp, Artificial Sequence
  Antisense compound
cgtaacgacaccagaatagt

SEQ ID NO: 11428 - DNA, 20 bp, Artificial Sequence
  Antisense compound
tcgtaacgacaccagaatag

SEQ ID NO: 11429 - DNA, 20 bp, Artificial Sequence
  Antisense compound
gtcgtaacgacaccagaata

SEQ ID NO: 11430 - DNA, 20 bp, Artificial Sequence
  Antisense compound
agtcgtaacgacaccagaat

SEQ ID NO: 11431 - DNA, 20 bp, Artificial Sequence
  Antisense compound
tagtcgtaacgacaccagaa

SEQ ID NO: 11432 - DNA, 20 bp, Artificial Sequence
  Antisense compound
atagtcgtaacgacaccaga

SEQ ID NO: 11433 - DNA, 20 bp, Artificial Sequence
  Antisense compound
gatagtcgtaacgacaccag

SEQ ID NO: 11434 - DNA, 20 bp, Artificial Sequence
  Antisense compound
tgatagtcgtaacgacacca

SEQ ID NO: 11435 - DNA, 20 bp, Artificial Sequence
  Antisense compound
atgatagtcgtaacgacacc

SEQ ID NO: 11436 - DNA, 20 bp, Artificial Sequence
  Antisense compound
catgatagtcgtaacgacac

SEQ ID NO: 11437 - DNA, 20 bp, Artificial Sequence
  Antisense compound
acatgatagtcgtaacgaca

SEQ ID NO: 11438 - DNA, 20 bp, Artificial Sequence
  Antisense compound
aacatgatagtcgtaacgac

SEQ ID NO: 11439 - DNA, 20 bp, Artificial Sequence
  Antisense compound
aaacatgatagtcgtaacga

SEQ ID NO: 11440 - DNA, 20 bp, Artificial Sequence
  Antisense compound
aaaacatgatagtcgtaacg

SEQ ID NO: 11441 - DNA, 20 bp, Artificial Sequence
  Antisense compound
aaaaacatgatagtcgtaac

SEQ ID NO: 11442 - DNA, 20 bp, Artificial Sequence
  Antisense compound
taaaaacatgatagtcgtaa

SEQ ID NO: 11443 - DNA, 20 bp, Artificial Sequence
  Antisense compound
ctaaaaacatgatagtcgta

SEQ ID NO: 11444 - DNA, 20 bp, Artificial Sequence
  Antisense compound
gctaaaaacatgatagtcgt

SEQ ID NO: 11445 - DNA, 20 bp, Artificial Sequence
  Antisense compound
agctaaaaacatgatagtcg

SEQ ID NO: 11446 - DNA, 20 bp, Artificial Sequence
  Antisense compound
tagctaaaaacatgatagtc

SEQ ID NO: 11447 - DNA, 20 bp, Artificial Sequence
  Antisense compound
ctagctaaaaacatgatagt

SEQ ID NO: 11448 - DNA, 20 bp, Artificial Sequence
  Antisense compound
tctagctaaaaacatgatag

SEQ ID NO: 11449 - DNA, 20 bp, Artificial Sequence
  Antisense compound
ctctagctaaaaacatgata

SEQ ID NO: 11450 - DNA, 20 bp, Artificial Sequence
  Antisense compound
gctctagctaaaaacatgat

SEQ ID NO: 11451 - DNA, 20 bp, Artificial Sequence
  Antisense compound
agctctagctaaaaacatga

SEQ ID NO: 11452 - DNA, 20 bp, Artificial Sequence
  Antisense compound
tagctctagctaaaaacatg

SEQ ID NO: 11453 - DNA, 20 bp, Artificial Sequence
  Antisense compound
atagctctagctaaaaacat

SEQ ID NO: 11454 - DNA, 20 bp, Artificial Sequence
  Antisense compound
tatagctctagctaaaaaca

SEQ ID NO: 11455 - DNA, 20 bp, Artificial Sequence
  Antisense compound
ctatagctctagctaaaaac

SEQ ID NO: 11456 - DNA, 20 bp, Artificial Sequence
  Antisense compound
actatagctctagctaaaaa

SEQ ID NO: 11457 - DNA, 20 bp, Artificial Sequence
  Antisense compound
cactatagctctagctaaaa

SEQ ID NO: 11458 - DNA, 20 bp, Artificial Sequence
  Antisense compound
acactatagctctagctaaa

SEQ ID NO: 11459 - DNA, 20 bp, Artificial Sequence
  Antisense compound
aacactatagctctagctaa

SEQ ID NO: 11460 - DNA, 20 bp, Artificial Sequence
  Antisense compound
aaacactatagctctagcta

SEQ ID NO: 11461 - DNA, 20 bp, Artificial Sequence
  Antisense compound
caaacactatagctctagct

SEQ ID NO: 11462 - DNA, 20 bp, Artificial Sequence
  Antisense compound
acaaacactatagctctagc

SEQ ID NO: 11463 - DNA, 20 bp, Artificial Sequence
  Antisense compound
cacaaacactatagctctag

SEQ ID NO: 11464 - DNA, 20 bp, Artificial Sequence
  Antisense compound
acacaaacactatagctcta

SEQ ID NO: 11465 - DNA, 20 bp, Artificial Sequence
  Antisense compound
cacacaaacactatagctct

SEQ ID NO: 11466 - DNA, 20 bp, Artificial Sequence
  Antisense compound
acacacaaacactatagctc

SEQ ID NO: 11467 - DNA, 20 bp, Artificial Sequence
  Antisense compound
cacacacaaacactatagct

SEQ ID NO: 11468 - DNA, 20 bp, Artificial Sequence
  Antisense compound
acacacacaaacactatagc

SEQ ID NO: 11469 - DNA, 20 bp, Artificial Sequence
  Antisense compound
aacacacacaaacactatag

SEQ ID NO: 11470 - DNA, 20 bp, Artificial Sequence
  Antisense compound
caacacacacaaacactata

SEQ ID NO: 11471 - DNA, 20 bp, Artificial Sequence
  Antisense compound
tcaacacacacaaacactat

SEQ ID NO: 11472 - DNA, 20 bp, Artificial Sequence
  Antisense compound
ctcaacacacacaaacacta

SEQ ID NO: 11473 - DNA, 20 bp, Artificial Sequence
  Antisense compound
actcaacacacacaaacact

SEQ ID NO: 11474 - DNA, 20 bp, Artificial Sequence
  Antisense compound
tactcaacacacacaaacac

SEQ ID NO: 11475 - DNA, 20 bp, Artificial Sequence
  Antisense compound
atactcaacacacacaaaca

SEQ ID NO: 11476 - DNA, 20 bp, Artificial Sequence
  Antisense compound
aatactcaacacacacaaac

SEQ ID NO: 11477 - DNA, 20 bp, Artificial Sequence
  Antisense compound
taatactcaacacacacaaa

SEQ ID NO: 11478 - DNA, 20 bp, Artificial Sequence
  Antisense compound
gtaatactcaacacacacaa

SEQ ID NO: 11479 - DNA, 20 bp, Artificial Sequence
  Antisense compound
ggtaatactcaacacacaca

SEQ ID NO: 11480 - DNA, 20 bp, Artificial Sequence
  Antisense compound
gggtaatactcaacacacac

SEQ ID NO: 11481 - DNA, 20 bp, Artificial Sequence
  Antisense compound
tgggtaatactcaacacaca

SEQ ID NO: 11482 - DNA, 20 bp, Artificial Sequence
  Antisense compound
atgggtaatactcaacacac

SEQ ID NO: 11483 - DNA, 20 bp, Artificial Sequence
  Antisense compound
aatgggtaatactcaacaca

SEQ ID NO: 11484 - DNA, 20 bp, Artificial Sequence
  Antisense compound
caatgggtaatactcaacac

SEQ ID NO: 11485 - DNA, 20 bp, Artificial Sequence
  Antisense compound
acaatgggtaatactcaaca

SEQ ID NO: 11486 - DNA, 20 bp, Artificial Sequence
  Antisense compound
aacaatgggtaatactcaac

SEQ ID NO: 11487 - DNA, 20 bp, Artificial Sequence
  Antisense compound
taacaatgggtaatactcaa

SEQ ID NO: 11488 - DNA, 20 bp, Artificial Sequence
  Antisense compound
ataacaatgggtaatactca

SEQ ID NO: 11489 - DNA, 20 bp, Artificial Sequence
  Antisense compound
aataacaatgggtaatactc

SEQ ID NO: 11490 - DNA, 20 bp, Artificial Sequence
  Antisense compound
aaataacaatgggtaatact

SEQ ID NO: 11491 - DNA, 20 bp, Artificial Sequence
  Antisense compound
taaataacaatgggtaatac

SEQ ID NO: 11492 - DNA, 20 bp, Artificial Sequence
  Antisense compound
ataaataacaatgggtaata

SEQ ID NO: 11493 - DNA, 20 bp, Artificial Sequence
  Antisense compound
aataaataacaatgggtaat

SEQ ID NO: 11494 - DNA, 20 bp, Artificial Sequence
  Antisense compound
taataaataacaatgggtaa

SEQ ID NO: 11495 - DNA, 20 bp, Artificial Sequence
  Antisense compound
gtaataaataacaatgggta

SEQ ID NO: 11496 - DNA, 20 bp, Artificial Sequence
  Antisense compound
agtaataaataacaatgggt

SEQ ID NO: 11497 - DNA, 20 bp, Artificial Sequence
  Antisense compound
cagtaataaataacaatggg

SEQ ID NO: 11498 - DNA, 20 bp, Artificial Sequence
  Antisense compound
ccagtaataaataacaatgg

SEQ ID NO: 11499 - DNA, 20 bp, Artificial Sequence
  Antisense compound
gccagtaataaataacaatg

SEQ ID NO: 11500 - DNA, 20 bp, Artificial Sequence
  Antisense compound
tgccagtaataaataacaat

SEQ ID NO: 11501 - DNA, 20 bp, Artificial Sequence
  Antisense compound
ttgccagtaataaataacaa

SEQ ID NO: 11502 - DNA, 20 bp, Artificial Sequence
  Antisense compound
gttgccagtaataaataaca

SEQ ID NO: 11503 - DNA, 20 bp, Artificial Sequence
  Antisense compound
tgttgccagtaataaataac

SEQ ID NO: 11504 - DNA, 20 bp, Artificial Sequence
  Antisense compound
gtgttgccagtaataaataa

SEQ ID NO: 11505 - DNA, 20 bp, Artificial Sequence
  Antisense compound
ggtgttgccagtaataaata

SEQ ID NO: 11506 - DNA, 20 bp, Artificial Sequence
  Antisense compound
aggtgttgccagtaataaat

SEQ ID NO: 11507 - DNA, 20 bp, Artificial Sequence
  Antisense compound
aaggtgttgccagtaataaa

SEQ ID NO: 11508 - DNA, 20 bp, Artificial Sequence
  Antisense compound
taaggtgttgccagtaataa

SEQ ID NO: 11509 - DNA, 20 bp, Artificial Sequence
  Antisense compound
gtaaggtgttgccagtaata

SEQ ID NO: 11510 - DNA, 20 bp, Artificial Sequence
  Antisense compound
tgtaaggtgttgccagtaat

SEQ ID NO: 11511 - DNA, 20 bp, Artificial Sequence
  Antisense compound
ctgtaaggtgttgccagtaa

SEQ ID NO: 11512 - DNA, 20 bp, Artificial Sequence
  Antisense compound
actgtaaggtgttgccagta

SEQ ID NO: 11513 - DNA, 20 bp, Artificial Sequence
  Antisense compound
cactgtaaggtgttgccagt

SEQ ID NO: 11514 - DNA, 20 bp, Artificial Sequence
  Antisense compound
acactgtaaggtgttgccag

SEQ ID NO: 11515 - DNA, 20 bp, Artificial Sequence
  Antisense compound
tacactgtaaggtgttgcca

SEQ ID NO: 11516 - DNA, 20 bp, Artificial Sequence
  Antisense compound
atacactgtaaggtgttgcc

SEQ ID NO: 11517 - DNA, 20 bp, Artificial Sequence
  Antisense compound
gatacactgtaaggtgttgc

SEQ ID NO: 11518 - DNA, 20 bp, Artificial Sequence
  Antisense compound
tgatacactgtaaggtgttg

SEQ ID NO: 11519 - DNA, 20 bp, Artificial Sequence
  Antisense compound
atgatacactgtaaggtgtt

SEQ ID NO: 11520 - DNA, 20 bp, Artificial Sequence
  Antisense compound
catgatacactgtaaggtgt

SEQ ID NO: 11521 - DNA, 20 bp, Artificial Sequence
  Antisense compound
gcatgatacactgtaaggtg

SEQ ID NO: 11522 - DNA, 20 bp, Artificial Sequence
  Antisense compound
agcatgatacactgtaaggt

SEQ ID NO: 11523 - DNA, 20 bp, Artificial Sequence
  Antisense compound
aagcatgatacactgtaagg

SEQ ID NO: 11524 - DNA, 20 bp, Artificial Sequence
  Antisense compound
caagcatgatacactgtaag

SEQ ID NO: 11525 - DNA, 20 bp, Artificial Sequence
  Antisense compound
acaagcatgatacactgtaa

SEQ ID NO: 11526 - DNA, 20 bp, Artificial Sequence
  Antisense compound
aacaagcatgatacactgta

SEQ ID NO: 11527 - DNA, 20 bp, Artificial Sequence
  Antisense compound
aaacaagcatgatacactgt

SEQ ID NO: 11528 - DNA, 20 bp, Artificial Sequence
  Antisense compound
taaacaagcatgatacactg

SEQ ID NO: 11529 - DNA, 20 bp, Artificial Sequence
  Antisense compound
ataaacaagcatgatacact

SEQ ID NO: 11530 - DNA, 20 bp, Artificial Sequence
  Antisense compound
aataaacaagcatgatacac

SEQ ID NO: 11531 - DNA, 20 bp, Artificial Sequence
  Antisense compound
caataaacaagcatgataca

SEQ ID NO: 11532 - DNA, 20 bp, Artificial Sequence
  Antisense compound
acaataaacaagcatgatac

SEQ ID NO: 11533 - DNA, 20 bp, Artificial Sequence
  Antisense compound
aacaataaacaagcatgata

SEQ ID NO: 11534 - DNA, 20 bp, Artificial Sequence
  Antisense compound
aaacaataaacaagcatgat

SEQ ID NO: 11535 - DNA, 20 bp, Artificial Sequence
  Antisense compound
gaaacaataaacaagcatga

SEQ ID NO: 11536 - DNA, 20 bp, Artificial Sequence
  Antisense compound
agaaacaataaacaagcatg

SEQ ID NO: 11537 - DNA, 20 bp, Artificial Sequence
  Antisense compound
aagaaacaataaacaagcat

SEQ ID NO: 11538 - DNA, 20 bp, Artificial Sequence
  Antisense compound
taagaaacaataaacaagca

SEQ ID NO: 11539 - DNA, 20 bp, Artificial Sequence
  Antisense compound
ctaagaaacaataaacaagc

SEQ ID NO: 11540 - DNA, 20 bp, Artificial Sequence
  Antisense compound
cctaagaaacaataaacaag

SEQ ID NO: 11541 - DNA, 20 bp, Artificial Sequence
  Antisense compound
gcctaagaaacaataaacaa

SEQ ID NO: 11542 - DNA, 20 bp, Artificial Sequence
  Antisense compound
agcctaagaaacaataaaca

SEQ ID NO: 11543 - DNA, 20 bp, Artificial Sequence
  Antisense compound
tagcctaagaaacaataaac

SEQ ID NO: 11544 - DNA, 20 bp, Artificial Sequence
  Antisense compound
atagcctaagaaacaataaa

SEQ ID NO: 11545 - DNA, 20 bp, Artificial Sequence
  Antisense compound
aatagcctaagaaacaataa

SEQ ID NO: 11546 - DNA, 20 bp, Artificial Sequence
  Antisense compound
caatagcctaagaaacaata

SEQ ID NO: 11547 - DNA, 20 bp, Artificial Sequence
  Antisense compound
acaatagcctaagaaacaat

SEQ ID NO: 11548 - DNA, 20 bp, Artificial Sequence
  Antisense compound
aacaatagcctaagaaacaa

SEQ ID NO: 11549 - DNA, 20 bp, Artificial Sequence
  Antisense compound
caacaatagcctaagaaaca

SEQ ID NO: 11550 - DNA, 20 bp, Artificial Sequence
  Antisense compound
gcaacaatagcctaagaaac

SEQ ID NO: 11551 - DNA, 20 bp, Artificial Sequence
  Antisense compound
agcaacaatagcctaagaaa

SEQ ID NO: 11552 - DNA, 20 bp, Artificial Sequence
  Antisense compound
cagcaacaatagcctaagaa

SEQ ID NO: 11553 - DNA, 20 bp, Artificial Sequence
  Antisense compound
gcagcaacaatagcctaaga

SEQ ID NO: 11554 - DNA, 20 bp, Artificial Sequence
  Antisense compound
agcagcaacaatagcctaag

SEQ ID NO: 11555 - DNA, 20 bp, Artificial Sequence
  Antisense compound
cagcagcaacaatagcctaa

SEQ ID NO: 11556 - DNA, 20 bp, Artificial Sequence
  Antisense compound
gcagcagcaacaatagccta

SEQ ID NO: 11557 - DNA, 20 bp, Artificial Sequence
  Antisense compound
agcagcagcaacaatagcct

SEQ ID NO: 11558 - DNA, 20 bp, Artificial Sequence
  Antisense compound
tagcagcagcaacaatagcc

SEQ ID NO: 11559 - DNA, 20 bp, Artificial Sequence
  Antisense compound
gtagcagcagcaacaatagc

SEQ ID NO: 11560 - DNA, 20 bp, Artificial Sequence
  Antisense compound
agtagcagcagcaacaatag

SEQ ID NO: 11561 - DNA, 20 bp, Artificial Sequence
  Antisense compound
aagtagcagcagcaacaata

SEQ ID NO: 11562 - DNA, 20 bp, Artificial Sequence
  Antisense compound
aaagtagcagcagcaacaat

SEQ ID NO: 11563 - DNA, 20 bp, Artificial Sequence
  Antisense compound
caaagtagcagcagcaacaa

SEQ ID NO: 11564 - DNA, 20 bp, Artificial Sequence
  Antisense compound
ccaaagtagcagcagcaaca

SEQ ID NO: 11565 - DNA, 20 bp, Artificial Sequence
  Antisense compound
gccaaagtagcagcagcaac

SEQ ID NO: 11566 - DNA, 20 bp, Artificial Sequence
  Antisense compound
ggccaaagtagcagcagcaa

SEQ ID NO: 11567 - DNA, 20 bp, Artificial Sequence
  Antisense compound
aggccaaagtagcagcagca

SEQ ID NO: 11568 - DNA, 20 bp, Artificial Sequence
  Antisense compound
aaggccaaagtagcagcagc

SEQ ID NO: 11569 - DNA, 20 bp, Artificial Sequence
  Antisense compound
aaaggccaaagtagcagcag

SEQ ID NO: 11570 - DNA, 20 bp, Artificial Sequence
  Antisense compound
aaaaggccaaagtagcagca

SEQ ID NO: 11571 - DNA, 20 bp, Artificial Sequence
  Antisense compound
gaaaaggccaaagtagcagc

SEQ ID NO: 11572 - DNA, 20 bp, Artificial Sequence
  Antisense compound
agaaaaggccaaagtagcag

SEQ ID NO: 11573 - DNA, 20 bp, Artificial Sequence
  Antisense compound
cagaaaaggccaaagtagca

SEQ ID NO: 11574 - DNA, 20 bp, Artificial Sequence
  Antisense compound
acagaaaaggccaaagtagc

SEQ ID NO: 11575 - DNA, 20 bp, Artificial Sequence
  Antisense compound
aacagaaaaggccaaagtag

SEQ ID NO: 11576 - DNA, 20 bp, Artificial Sequence
  Antisense compound
aaacagaaaaggccaaagta

SEQ ID NO: 11577 - DNA, 20 bp, Artificial Sequence
  Antisense compound
taaacagaaaaggccaaagt

SEQ ID NO: 11578 - DNA, 20 bp, Artificial Sequence
  Antisense compound
gtaaacagaaaaggccaaag

SEQ ID NO: 11579 - DNA, 20 bp, Artificial Sequence
  Antisense compound
agtaaacagaaaaggccaaa

SEQ ID NO: 11580 - DNA, 20 bp, Artificial Sequence
  Antisense compound
gagtaaacagaaaaggccaa

SEQ ID NO: 11581 - DNA, 20 bp, Artificial Sequence
  Antisense compound
tgagtaaacagaaaaggcca

SEQ ID NO: 11582 - DNA, 20 bp, Artificial Sequence
  Antisense compound
ttgagtaaacagaaaaggcc

SEQ ID NO: 11583 - DNA, 20 bp, Artificial Sequence
  Antisense compound
gttgagtaaacagaaaaggc

SEQ ID NO: 11584 - DNA, 20 bp, Artificial Sequence
  Antisense compound
ggttgagtaaacagaaaagg

SEQ ID NO: 11585 - DNA, 20 bp, Artificial Sequence
  Antisense compound
cggttgagtaaacagaaaag

SEQ ID NO: 11586 - DNA, 20 bp, Artificial Sequence
  Antisense compound
acggttgagtaaacagaaaa

SEQ ID NO: 11587 - DNA, 20 bp, Artificial Sequence
  Antisense compound
aacggttgagtaaacagaaa

SEQ ID NO: 11588 - DNA, 20 bp, Artificial Sequence
  Antisense compound
taacggttgagtaaacagaa

SEQ ID NO: 11589 - DNA, 20 bp, Artificial Sequence
  Antisense compound
gtaacggttgagtaaacaga

SEQ ID NO: 11590 - DNA, 20 bp, Artificial Sequence
  Antisense compound
agtaacggttgagtaaacag

SEQ ID NO: 11591 - DNA, 20 bp, Artificial Sequence
  Antisense compound
aagtaacggttgagtaaaca

SEQ ID NO: 11592 - DNA, 20 bp, Artificial Sequence
  Antisense compound
gaagtaacggttgagtaaac

SEQ ID NO: 11593 - DNA, 20 bp, Artificial Sequence
  Antisense compound
tgaagtaacggttgagtaaa

SEQ ID NO: 11594 - DNA, 20 bp, Artificial Sequence
  Antisense compound
ctgaagtaacggttgagtaa

SEQ ID NO: 11595 - DNA, 20 bp, Artificial Sequence
  Antisense compound
cctgaagtaacggttgagta

SEQ ID NO: 11596 - DNA, 20 bp, Artificial Sequence
  Antisense compound
gcctgaagtaacggttgagt

SEQ ID NO: 11597 - DNA, 20 bp, Artificial Sequence
  Antisense compound
agcctgaagtaacggttgag

SEQ ID NO: 11598 - DNA, 20 bp, Artificial Sequence
  Antisense compound
aagcctgaagtaacggttga

SEQ ID NO: 11599 - DNA, 20 bp, Artificial Sequence
  Antisense compound
taagcctgaagtaacggttg

SEQ ID NO: 11600 - DNA, 20 bp, Artificial Sequence
  Antisense compound
gtaagcctgaagtaacggtt

SEQ ID NO: 11601 - DNA, 20 bp, Artificial Sequence
  Antisense compound
agtaagcctgaagtaacggt

SEQ ID NO: 11602 - DNA, 20 bp, Artificial Sequence
  Antisense compound
gagtaagcctgaagtaacgg

SEQ ID NO: 11603 - DNA, 20 bp, Artificial Sequence
  Antisense compound
agagtaagcctgaagtaacg

SEQ ID NO: 11604 - DNA, 20 bp, Artificial Sequence
  Antisense compound
aagagtaagcctgaagtaac

SEQ ID NO: 11605 - DNA, 20 bp, Artificial Sequence
  Antisense compound
caagagtaagcctgaagtaa

SEQ ID NO: 11606 - DNA, 20 bp, Artificial Sequence
  Antisense compound
ccaagagtaagcctgaagta

SEQ ID NO: 11607 - DNA, 20 bp, Artificial Sequence
  Antisense compound
accaagagtaagcctgaagt

SEQ ID NO: 11608 - DNA, 20 bp, Artificial Sequence
  Antisense compound
caccaagagtaagcctgaag

SEQ ID NO: 11609 - DNA, 20 bp, Artificial Sequence
  Antisense compound
acaccaagagtaagcctgaa

SEQ ID NO: 11610 - DNA, 20 bp, Artificial Sequence
  Antisense compound
aacaccaagagtaagcctga

SEQ ID NO: 11611 - DNA, 20 bp, Artificial Sequence
  Antisense compound
aaacaccaagagtaagcctg

SEQ ID NO: 11612 - DNA, 20 bp, Artificial Sequence
  Antisense compound
taaacaccaagagtaagcct

SEQ ID NO: 11613 - DNA, 20 bp, Artificial Sequence
  Antisense compound
ataaacaccaagagtaagcc

SEQ ID NO: 11614 - DNA, 20 bp, Artificial Sequence
  Antisense compound
cataaacaccaagagtaagc

SEQ ID NO: 11615 - DNA, 20 bp, Artificial Sequence
  Antisense compound
tcataaacaccaagagtaag

SEQ ID NO: 11616 - DNA, 20 bp, Artificial Sequence
  Antisense compound
gtcataaacaccaagagtaa

SEQ ID NO: 11617 - DNA, 20 bp, Artificial Sequence
  Antisense compound
agtcataaacaccaagagta

SEQ ID NO: 11618 - DNA, 20 bp, Artificial Sequence
  Antisense compound
tagtcataaacaccaagagt

SEQ ID NO: 11619 - DNA, 20 bp, Artificial Sequence
  Antisense compound
gtagtcataaacaccaagag

SEQ ID NO: 11620 - DNA, 20 bp, Artificial Sequence
  Antisense compound
agtagtcataaacaccaaga

SEQ ID NO: 11621 - DNA, 20 bp, Artificial Sequence
  Antisense compound
aagtagtcataaacaccaag

SEQ ID NO: 11622 - DNA, 20 bp, Artificial Sequence
  Antisense compound
caagtagtcataaacaccaa

SEQ ID NO: 11623 - DNA, 20 bp, Artificial Sequence
  Antisense compound
ccaagtagtcataaacacca

SEQ ID NO: 11624 - DNA, 20 bp, Artificial Sequence
  Antisense compound
accaagtagtcataaacacc

SEQ ID NO: 11625 - DNA, 20 bp, Artificial Sequence
  Antisense compound
gaccaagtagtcataaacac

SEQ ID NO: 11626 - DNA, 20 bp, Artificial Sequence
  Antisense compound
agaccaagtagtcataaaca

SEQ ID NO: 11627 - DNA, 20 bp, Artificial Sequence
  Antisense compound
gagaccaagtagtcataaac

SEQ ID NO: 11628 - DNA, 20 bp, Artificial Sequence
  Antisense compound
agagaccaagtagtcataaa

SEQ ID NO: 11629 - DNA, 20 bp, Artificial Sequence
  Antisense compound
tagagaccaagtagtcataa

SEQ ID NO: 11630 - DNA, 20 bp, Artificial Sequence
  Antisense compound
gtagagaccaagtagtcata

SEQ ID NO: 11631 - DNA, 20 bp, Artificial Sequence
  Antisense compound
tgtagagaccaagtagtcat

SEQ ID NO: 11632 - DNA, 20 bp, Artificial Sequence
  Antisense compound
gtgtagagaccaagtagtca

SEQ ID NO: 11633 - DNA, 20 bp, Artificial Sequence
  Antisense compound
tgtgtagagaccaagtagtc

SEQ ID NO: 11634 - DNA, 20 bp, Artificial Sequence
  Antisense compound
ttgtgtagagaccaagtagt

SEQ ID NO: 11635 - DNA, 20 bp, Artificial Sequence
  Antisense compound
cttgtgtagagaccaagtag

SEQ ID NO: 11636 - DNA, 20 bp, Artificial Sequence
  Antisense compound
tcttgtgtagagaccaagta

SEQ ID NO: 11637 - DNA, 20 bp, Artificial Sequence
  Antisense compound
ttcttgtgtagagaccaagt

SEQ ID NO: 11638 - DNA, 20 bp, Artificial Sequence
  Antisense compound
attcttgtgtagagaccaag

SEQ ID NO: 11639 - DNA, 20 bp, Artificial Sequence
  Antisense compound
aattcttgtgtagagaccaa

SEQ ID NO: 11640 - DNA, 20 bp, Artificial Sequence
  Antisense compound
aaattcttgtgtagagacca

SEQ ID NO: 11641 - DNA, 20 bp, Artificial Sequence
  Antisense compound
taaattcttgtgtagagacc

SEQ ID NO: 11642 - DNA, 20 bp, Artificial Sequence
  Antisense compound
ctaaattcttgtgtagagac

SEQ ID NO: 11643 - DNA, 20 bp, Artificial Sequence
  Antisense compound
cctaaattcttgtgtagaga

SEQ ID NO: 11644 - DNA, 20 bp, Artificial Sequence
  Antisense compound
acctaaattcttgtgtagag

SEQ ID NO: 11645 - DNA, 20 bp, Artificial Sequence
  Antisense compound
tacctaaattcttgtgtaga

SEQ ID NO: 11646 - DNA, 20 bp, Artificial Sequence
  Antisense compound
atacctaaattcttgtgtag

SEQ ID NO: 11647 - DNA, 20 bp, Artificial Sequence
  Antisense compound
tatacctaaattcttgtgta

SEQ ID NO: 11648 - DNA, 20 bp, Artificial Sequence
  Antisense compound
atatacctaaattcttgtgt

SEQ ID NO: 11649 - DNA, 20 bp, Artificial Sequence
  Antisense compound
catatacctaaattcttgtg

SEQ ID NO: 11650 - DNA, 20 bp, Artificial Sequence
  Antisense compound
tcatatacctaaattcttgt

SEQ ID NO: 11651 - DNA, 20 bp, Artificial Sequence
  Antisense compound
ttcatatacctaaattcttg

SEQ ID NO: 11652 - DNA, 20 bp, Artificial Sequence
  Antisense compound
gttcatatacctaaattctt

SEQ ID NO: 11653 - DNA, 20 bp, Artificial Sequence
  Antisense compound
agttcatatacctaaattct

SEQ ID NO: 11654 - DNA, 20 bp, Artificial Sequence
  Antisense compound
gagttcatatacctaaattc

SEQ ID NO: 11655 - DNA, 20 bp, Artificial Sequence
  Antisense compound
ggagttcatatacctaaatt

SEQ ID NO: 11656 - DNA, 20 bp, Artificial Sequence
  Antisense compound
gggagttcatatacctaaat

SEQ ID NO: 11657 - DNA, 20 bp, Artificial Sequence
  Antisense compound
tgggagttcatatacctaaa

SEQ ID NO: 11658 - DNA, 20 bp, Artificial Sequence
  Antisense compound
ctgggagttcatatacctaa

SEQ ID NO: 11659 - DNA, 20 bp, Artificial Sequence
  Antisense compound
cctgggagttcatataccta

SEQ ID NO: 11660 - DNA, 20 bp, Artificial Sequence
  Antisense compound
ccctgggagttcatatacct

SEQ ID NO: 11661 - DNA, 20 bp, Artificial Sequence
  Antisense compound
cccctgggagttcatatacc

SEQ ID NO: 11662 - DNA, 20 bp, Artificial Sequence
  Antisense compound
gcccctgggagttcatatac

SEQ ID NO: 11663 - DNA, 20 bp, Artificial Sequence
  Antisense compound
agcccctgggagttcatata

SEQ ID NO: 11664 - DNA, 20 bp, Artificial Sequence
  Antisense compound
aagcccctgggagttcatat

SEQ ID NO: 11665 - DNA, 20 bp, Artificial Sequence
  Antisense compound
aaagcccctgggagttcata

SEQ ID NO: 11666 - DNA, 20 bp, Artificial Sequence
  Antisense compound
aaaagcccctgggagttcat

SEQ ID NO: 11667 - DNA, 20 bp, Artificial Sequence
  Antisense compound
caaaagcccctgggagttca

SEQ ID NO: 11668 - DNA, 20 bp, Artificial Sequence
  Antisense compound
gcaaaagcccctgggagttc

SEQ ID NO: 11669 - DNA, 20 bp, Artificial Sequence
  Antisense compound
ggcaaaagcccctgggagtt

SEQ ID NO: 11670 - DNA, 20 bp, Artificial Sequence
  Antisense compound
aggcaaaagcccctgggagt

SEQ ID NO: 11671 - DNA, 20 bp, Artificial Sequence
  Antisense compound
gaggcaaaagcccctgggag

SEQ ID NO: 11672 - DNA, 20 bp, Artificial Sequence
  Antisense compound
ggaggcaaaagcccctggga

SEQ ID NO: 11673 - DNA, 20 bp, Artificial Sequence
  Antisense compound
aggaggcaaaagcccctggg

SEQ ID NO: 11674 - DNA, 20 bp, Artificial Sequence
  Antisense compound
taggaggcaaaagcccctgg

SEQ ID NO: 11675 - DNA, 20 bp, Artificial Sequence
  Antisense compound
ttaggaggcaaaagcccctg

SEQ ID NO: 11676 - DNA, 20 bp, Artificial Sequence
  Antisense compound
cttaggaggcaaaagcccct

SEQ ID NO: 11677 - DNA, 20 bp, Artificial Sequence
  Antisense compound
tcttaggaggcaaaagcccc

SEQ ID NO: 11678 - DNA, 20 bp, Artificial Sequence
  Antisense compound
ctcttaggaggcaaaagccc

SEQ ID NO: 11679 - DNA, 20 bp, Artificial Sequence
  Antisense compound
actcttaggaggcaaaagcc

SEQ ID NO: 11680 - DNA, 20 bp, Artificial Sequence
  Antisense compound
tactcttaggaggcaaaagc

SEQ ID NO: 11681 - DNA, 20 bp, Artificial Sequence
  Antisense compound
ctactcttaggaggcaaaag

SEQ ID NO: 11682 - DNA, 20 bp, Artificial Sequence
  Antisense compound
actactcttaggaggcaaaa

SEQ ID NO: 11683 - DNA, 20 bp, Artificial Sequence
  Antisense compound
tactactcttaggaggcaaa

SEQ ID NO: 11684 - DNA, 20 bp, Artificial Sequence
  Antisense compound
atactactcttaggaggcaa

SEQ ID NO: 11685 - DNA, 20 bp, Artificial Sequence
  Antisense compound
aatactactcttaggaggca

SEQ ID NO: 11686 - DNA, 20 bp, Artificial Sequence
  Antisense compound
caatactactcttaggaggc

SEQ ID NO: 11687 - DNA, 20 bp, Artificial Sequence
  Antisense compound
tcaatactactcttaggagg

SEQ ID NO: 11688 - DNA, 20 bp, Artificial Sequence
  Antisense compound
atcaatactactcttaggag

SEQ ID NO: 11689 - DNA, 20 bp, Artificial Sequence
  Antisense compound
catcaatactactcttagga

SEQ ID NO: 11690 - DNA, 20 bp, Artificial Sequence
  Antisense compound
gcatcaatactactcttagg

SEQ ID NO: 11691 - DNA, 20 bp, Artificial Sequence
  Antisense compound
agcatcaatactactcttag

SEQ ID NO: 11692 - DNA, 20 bp, Artificial Sequence
  Antisense compound
aagcatcaatactactctta

SEQ ID NO: 11693 - DNA, 20 bp, Artificial Sequence
  Antisense compound
aaagcatcaatactactctt

SEQ ID NO: 11694 - DNA, 20 bp, Artificial Sequence
  Antisense compound
gaaagcatcaatactactct

SEQ ID NO: 11695 - DNA, 20 bp, Artificial Sequence
  Antisense compound
tgaaagcatcaatactactc

SEQ ID NO: 11696 - DNA, 20 bp, Artificial Sequence
  Antisense compound
ttgaaagcatcaatactact

SEQ ID NO: 11697 - DNA, 20 bp, Artificial Sequence
  Antisense compound
cttgaaagcatcaatactac

SEQ ID NO: 11698 - DNA, 20 bp, Artificial Sequence
  Antisense compound
gcttgaaagcatcaatacta

SEQ ID NO: 11699 - DNA, 20 bp, Artificial Sequence
  Antisense compound
agcttgaaagcatcaatact

SEQ ID NO: 11700 - DNA, 20 bp, Artificial Sequence
  Antisense compound
aagcttgaaagcatcaatac

SEQ ID NO: 11701 - DNA, 20 bp, Artificial Sequence
  Antisense compound
taagcttgaaagcatcaata

SEQ ID NO: 11702 - DNA, 20 bp, Artificial Sequence
  Antisense compound
ttaagcttgaaagcatcaat

SEQ ID NO: 11703 - DNA, 20 bp, Artificial Sequence
  Antisense compound
gttaagcttgaaagcatcaa

SEQ ID NO: 11704 - DNA, 20 bp, Artificial Sequence
  Antisense compound
tgttaagcttgaaagcatca

SEQ ID NO: 11705 - DNA, 20 bp, Artificial Sequence
  Antisense compound
atgttaagcttgaaagcatc

SEQ ID NO: 11706 - DNA, 20 bp, Artificial Sequence
  Antisense compound
aatgttaagcttgaaagcat

SEQ ID NO: 11707 - DNA, 20 bp, Artificial Sequence
  Antisense compound
taatgttaagcttgaaagca

SEQ ID NO: 11708 - DNA, 20 bp, Artificial Sequence
  Antisense compound
ttaatgttaagcttgaaagc

SEQ ID NO: 11709 - DNA, 20 bp, Artificial Sequence
  Antisense compound
cttaatgttaagcttgaaag

SEQ ID NO: 11710 - DNA, 20 bp, Artificial Sequence
  Antisense compound
acttaatgttaagcttgaaa

SEQ ID NO: 11711 - DNA, 20 bp, Artificial Sequence
  Antisense compound
aacttaatgttaagcttgaa

SEQ ID NO: 11712 - DNA, 20 bp, Artificial Sequence
  Antisense compound
caacttaatgttaagcttga

SEQ ID NO: 11713 - DNA, 20 bp, Artificial Sequence
  Antisense compound
acaacttaatgttaagcttg

SEQ ID NO: 11714 - DNA, 20 bp, Artificial Sequence
  Antisense compound
aacaacttaatgttaagctt

SEQ ID NO: 11715 - DNA, 20 bp, Artificial Sequence
  Antisense compound
caacaacttaatgttaagct

SEQ ID NO: 11716 - DNA, 20 bp, Artificial Sequence
  Antisense compound
ccaacaacttaatgttaagc

SEQ ID NO: 11717 - DNA, 20 bp, Artificial Sequence
  Antisense compound
cccaacaacttaatgttaag

SEQ ID NO: 11718 - DNA, 20 bp, Artificial Sequence
  Antisense compound
acccaacaacttaatgttaa

SEQ ID NO: 11719 - DNA, 20 bp, Artificial Sequence
  Antisense compound
tacccaacaacttaatgtta

SEQ ID NO: 11720 - DNA, 20 bp, Artificial Sequence
  Antisense compound
atacccaacaacttaatgtt

SEQ ID NO: 11721 - DNA, 20 bp, Artificial Sequence
  Antisense compound
aatacccaacaacttaatgt

SEQ ID NO: 11722 - DNA, 20 bp, Artificial Sequence
  Antisense compound
caatacccaacaacttaatg

SEQ ID NO: 11723 - DNA, 20 bp, Artificial Sequence
  Antisense compound
ccaatacccaacaacttaat

SEQ ID NO: 11724 - DNA, 20 bp, Artificial Sequence
  Antisense compound
tccaatacccaacaacttaa

SEQ ID NO: 11725 - DNA, 20 bp, Artificial Sequence
  Antisense compound
ctccaatacccaacaactta

SEQ ID NO: 11726 - DNA, 20 bp, Artificial Sequence
  Antisense compound
cctccaatacccaacaactt

SEQ ID NO: 11727 - DNA, 20 bp, Artificial Sequence
  Antisense compound
acctccaatacccaacaact

SEQ ID NO: 11728 - DNA, 20 bp, Artificial Sequence
  Antisense compound
tacctccaatacccaacaac

SEQ ID NO: 11729 - DNA, 20 bp, Artificial Sequence
  Antisense compound
ttacctccaatacccaacaa

SEQ ID NO: 11730 - DNA, 20 bp, Artificial Sequence
  Antisense compound
tttacctccaatacccaaca

SEQ ID NO: 11731 - DNA, 20 bp, Artificial Sequence
  Antisense compound
gtttacctccaatacccaac

SEQ ID NO: 11732 - DNA, 20 bp, Artificial Sequence
  Antisense compound
ggtttacctccaatacccaa

SEQ ID NO: 11733 - DNA, 20 bp, Artificial Sequence
  Antisense compound
tggtttacctccaataccca

SEQ ID NO: 11734 - DNA, 20 bp, Artificial Sequence
  Antisense compound
atggtttacctccaataccc

SEQ ID NO: 11735 - DNA, 20 bp, Artificial Sequence
  Antisense compound
catggtttacctccaatacc

SEQ ID NO: 11736 - DNA, 20 bp, Artificial Sequence
  Antisense compound
acatggtttacctccaatac

SEQ ID NO: 11737 - DNA, 20 bp, Artificial Sequence
  Antisense compound
tacatggtttacctccaata

SEQ ID NO: 11738 - DNA, 20 bp, Artificial Sequence
  Antisense compound
atacatggtttacctccaat

SEQ ID NO: 11739 - DNA, 20 bp, Artificial Sequence
  Antisense compound
gatacatggtttacctccaa

SEQ ID NO: 11740 - DNA, 20 bp, Artificial Sequence
  Antisense compound
tgatacatggtttacctcca

SEQ ID NO: 11741 - DNA, 20 bp, Artificial Sequence
  Antisense compound
ttgatacatggtttacctcc

SEQ ID NO: 11742 - DNA, 20 bp, Artificial Sequence
  Antisense compound
cttgatacatggtttacctc

SEQ ID NO: 11743 - DNA, 20 bp, Artificial Sequence
  Antisense compound
ccttgatacatggtttacct

SEQ ID NO: 11744 - DNA, 20 bp, Artificial Sequence
  Antisense compound
accttgatacatggtttacc

SEQ ID NO: 11745 - DNA, 20 bp, Artificial Sequence
  Antisense compound
aaccttgatacatggtttac

SEQ ID NO: 11746 - DNA, 20 bp, Artificial Sequence
  Antisense compound
caaccttgatacatggttta

SEQ ID NO: 11747 - DNA, 20 bp, Artificial Sequence
  Antisense compound
gcaaccttgatacatggttt

SEQ ID NO: 11748 - DNA, 20 bp, Artificial Sequence
  Antisense compound
agcaaccttgatacatggtt

SEQ ID NO: 11749 - DNA, 20 bp, Artificial Sequence
  Antisense compound
tagcaaccttgatacatggt

SEQ ID NO: 11750 - DNA, 20 bp, Artificial Sequence
  Antisense compound
gtagcaaccttgatacatgg

SEQ ID NO: 11751 - DNA, 20 bp, Artificial Sequence
  Antisense compound
agtagcaaccttgatacatg

SEQ ID NO: 11752 - DNA, 20 bp, Artificial Sequence
  Antisense compound
cagtagcaaccttgatacat

SEQ ID NO: 11753 - DNA, 20 bp, Artificial Sequence
  Antisense compound
acagtagcaaccttgataca

SEQ ID NO: 11754 - DNA, 20 bp, Artificial Sequence
  Antisense compound
tacagtagcaaccttgatac

SEQ ID NO: 11755 - DNA, 20 bp, Artificial Sequence
  Antisense compound
gtacagtagcaaccttgata

SEQ ID NO: 11756 - DNA, 20 bp, Artificial Sequence
  Antisense compound
tgtacagtagcaaccttgat

SEQ ID NO: 11757 - DNA, 20 bp, Artificial Sequence
  Antisense compound
ctgtacagtagcaaccttga

SEQ ID NO: 11758 - DNA, 20 bp, Artificial Sequence
  Antisense compound
actgtacagtagcaaccttg

SEQ ID NO: 11759 - DNA, 20 bp, Artificial Sequence
  Antisense compound
gactgtacagtagcaacctt

SEQ ID NO: 11760 - DNA, 20 bp, Artificial Sequence
  Antisense compound
agactgtacagtagcaacct

SEQ ID NO: 11761 - DNA, 20 bp, Artificial Sequence
  Antisense compound
tagactgtacagtagcaacc

SEQ ID NO: 11762 - DNA, 20 bp, Artificial Sequence
  Antisense compound
ttagactgtacagtagcaac

SEQ ID NO: 11763 - DNA, 20 bp, Artificial Sequence
  Antisense compound
tttagactgtacagtagcaa

SEQ ID NO: 11764 - DNA, 20 bp, Artificial Sequence
  Antisense compound
ttttagactgtacagtagca

SEQ ID NO: 11765 - DNA, 20 bp, Artificial Sequence
  Antisense compound
attttagactgtacagtagc

SEQ ID NO: 11766 - DNA, 20 bp, Artificial Sequence
  Antisense compound
cattttagactgtacagtag

SEQ ID NO: 11767 - DNA, 20 bp, Artificial Sequence
  Antisense compound
acattttagactgtacagta

SEQ ID NO: 11768 - DNA, 20 bp, Artificial Sequence
  Antisense compound
gacattttagactgtacagt

SEQ ID NO: 11769 - DNA, 20 bp, Artificial Sequence
  Antisense compound
agacattttagactgtacag

SEQ ID NO: 11770 - DNA, 20 bp, Artificial Sequence
  Antisense compound
cagacattttagactgtaca

SEQ ID NO: 11771 - DNA, 20 bp, Artificial Sequence
  Antisense compound
tcagacattttagactgtac

SEQ ID NO: 11772 - DNA, 20 bp, Artificial Sequence
  Antisense compound
gtcagacattttagactgta

SEQ ID NO: 11773 - DNA, 20 bp, Artificial Sequence
  Antisense compound
cgtcagacattttagactgt

SEQ ID NO: 11774 - DNA, 20 bp, Artificial Sequence
  Antisense compound
acgtcagacattttagactg

SEQ ID NO: 11775 - DNA, 20 bp, Artificial Sequence
  Antisense compound
tacgtcagacattttagact

SEQ ID NO: 11776 - DNA, 20 bp, Artificial Sequence
  Antisense compound
ttacgtcagacattttagac

SEQ ID NO: 11777 - DNA, 20 bp, Artificial Sequence
  Antisense compound
tttacgtcagacattttaga

SEQ ID NO: 11778 - DNA, 20 bp, Artificial Sequence
  Antisense compound
ctttacgtcagacattttag

SEQ ID NO: 11779 - DNA, 20 bp, Artificial Sequence
  Antisense compound
actttacgtcagacatttta

SEQ ID NO: 11780 - DNA, 20 bp, Artificial Sequence
  Antisense compound
cactttacgtcagacatttt

SEQ ID NO: 11781 - DNA, 20 bp, Artificial Sequence
  Antisense compound
gcactttacgtcagacattt

SEQ ID NO: 11782 - DNA, 20 bp, Artificial Sequence
  Antisense compound
tgcactttacgtcagacatt

SEQ ID NO: 11783 - DNA, 20 bp, Artificial Sequence
  Antisense compound
gtgcactttacgtcagacat

SEQ ID NO: 11784 - DNA, 20 bp, Artificial Sequence
  Antisense compound
tgtgcactttacgtcagaca

SEQ ID NO: 11785 - DNA, 20 bp, Artificial Sequence
  Antisense compound
atgtgcactttacgtcagac

SEQ ID NO: 11786 - DNA, 20 bp, Artificial Sequence
  Antisense compound
gatgtgcactttacgtcaga

SEQ ID NO: 11787 - DNA, 20 bp, Artificial Sequence
  Antisense compound
agatgtgcactttacgtcag

SEQ ID NO: 11788 - DNA, 20 bp, Artificial Sequence
  Antisense compound
cagatgtgcactttacgtca

SEQ ID NO: 11789 - DNA, 20 bp, Artificial Sequence
  Antisense compound
acagatgtgcactttacgtc

SEQ ID NO: 11790 - DNA, 20 bp, Artificial Sequence
  Antisense compound
cacagatgtgcactttacgt

SEQ ID NO: 11791 - DNA, 20 bp, Artificial Sequence
  Antisense compound
ccacagatgtgcactttacg

SEQ ID NO: 11792 - DNA, 20 bp, Artificial Sequence
  Antisense compound
accacagatgtgcactttac

SEQ ID NO: 11793 - DNA, 20 bp, Artificial Sequence
  Antisense compound
taccacagatgtgcacttta

SEQ ID NO: 11794 - DNA, 20 bp, Artificial Sequence
  Antisense compound
gtaccacagatgtgcacttt

SEQ ID NO: 11795 - DNA, 20 bp, Artificial Sequence
  Antisense compound
agtaccacagatgtgcactt

SEQ ID NO: 11796 - DNA, 20 bp, Artificial Sequence
  Antisense compound
cagtaccacagatgtgcact

SEQ ID NO: 11797 - DNA, 20 bp, Artificial Sequence
  Antisense compound
gcagtaccacagatgtgcac

SEQ ID NO: 11798 - DNA, 20 bp, Artificial Sequence
  Antisense compound
agcagtaccacagatgtgca

SEQ ID NO: 11799 - DNA, 20 bp, Artificial Sequence
  Antisense compound
gagcagtaccacagatgtgc

SEQ ID NO: 11800 - DNA, 20 bp, Artificial Sequence
  Antisense compound
agagcagtaccacagatgtg

SEQ ID NO: 11801 - DNA, 20 bp, Artificial Sequence
  Antisense compound
gagagcagtaccacagatgt

SEQ ID NO: 11802 - DNA, 20 bp, Artificial Sequence
  Antisense compound
cgagagcagtaccacagatg

SEQ ID NO: 11803 - DNA, 20 bp, Artificial Sequence
  Antisense compound
ccgagagcagtaccacagat

SEQ ID NO: 11804 - DNA, 20 bp, Artificial Sequence
  Antisense compound
accgagagcagtaccacaga

SEQ ID NO: 11805 - DNA, 20 bp, Artificial Sequence
  Antisense compound
aaccgagagcagtaccacag

SEQ ID NO: 11806 - DNA, 20 bp, Artificial Sequence
  Antisense compound
gaaccgagagcagtaccaca

SEQ ID NO: 11807 - DNA, 20 bp, Artificial Sequence
  Antisense compound
agaaccgagagcagtaccac

SEQ ID NO: 11808 - DNA, 20 bp, Artificial Sequence
  Antisense compound
aagaaccgagagcagtacca

SEQ ID NO: 11809 - DNA, 20 bp, Artificial Sequence
  Antisense compound
gaagaaccgagagcagtacc

SEQ ID NO: 11810 - DNA, 20 bp, Artificial Sequence
  Antisense compound
tgaagaaccgagagcagtac

SEQ ID NO: 11811 - DNA, 20 bp, Artificial Sequence
  Antisense compound
ttgaagaaccgagagcagta

SEQ ID NO: 11812 - DNA, 20 bp, Artificial Sequence
  Antisense compound
gttgaagaaccgagagcagt

SEQ ID NO: 11813 - DNA, 20 bp, Artificial Sequence
  Antisense compound
tgttgaagaaccgagagcag

SEQ ID NO: 11814 - DNA, 20 bp, Artificial Sequence
  Antisense compound
ttgttgaagaaccgagagca

SEQ ID NO: 11815 - DNA, 20 bp, Artificial Sequence
  Antisense compound
gttgttgaagaaccgagagc

SEQ ID NO: 11816 - DNA, 20 bp, Artificial Sequence
  Antisense compound
agttgttgaagaaccgagag

SEQ ID NO: 11817 - DNA, 20 bp, Artificial Sequence
  Antisense compound
aagttgttgaagaaccgaga

SEQ ID NO: 11818 - DNA, 20 bp, Artificial Sequence
  Antisense compound
taagttgttgaagaaccgag

SEQ ID NO: 11819 - DNA, 20 bp, Artificial Sequence
  Antisense compound
ctaagttgttgaagaaccga

SEQ ID NO: 11820 - DNA, 20 bp, Artificial Sequence
  Antisense compound
tctaagttgttgaagaaccg

SEQ ID NO: 11821 - DNA, 20 bp, Artificial Sequence
  Antisense compound
ctctaagttgttgaagaacc

SEQ ID NO: 11822 - DNA, 20 bp, Artificial Sequence
  Antisense compound
actctaagttgttgaagaac

SEQ ID NO: 11823 - DNA, 20 bp, Artificial Sequence
  Antisense compound
tactctaagttgttgaagaa

SEQ ID NO: 11824 - DNA, 20 bp, Artificial Sequence
  Antisense compound
ctactctaagttgttgaaga

SEQ ID NO: 11825 - DNA, 20 bp, Artificial Sequence
  Antisense compound
tctactctaagttgttgaag

SEQ ID NO: 11826 - DNA, 20 bp, Artificial Sequence
  Antisense compound
ctctactctaagttgttgaa

SEQ ID NO: 11827 - DNA, 20 bp, Artificial Sequence
  Antisense compound
actctactctaagttgttga

SEQ ID NO: 11828 - DNA, 20 bp, Artificial Sequence
  Antisense compound
gactctactctaagttgttg

SEQ ID NO: 11829 - DNA, 20 bp, Artificial Sequence
  Antisense compound
tgactctactctaagttgtt

SEQ ID NO: 11830 - DNA, 20 bp, Artificial Sequence
  Antisense compound
atgactctactctaagttgt

SEQ ID NO: 11831 - DNA, 20 bp, Artificial Sequence
  Antisense compound
gatgactctactctaagttg

SEQ ID NO: 11832 - DNA, 20 bp, Artificial Sequence
  Antisense compound
agatgactctactctaagtt

SEQ ID NO: 11833 - DNA, 20 bp, Artificial Sequence
  Antisense compound
aagatgactctactctaagt

SEQ ID NO: 11834 - DNA, 20 bp, Artificial Sequence
  Antisense compound
gaagatgactctactctaag

SEQ ID NO: 11835 - DNA, 20 bp, Artificial Sequence
  Antisense compound
agaagatgactctactctaa

SEQ ID NO: 11836 - DNA, 20 bp, Artificial Sequence
  Antisense compound
tagaagatgactctactcta

SEQ ID NO: 11837 - DNA, 20 bp, Artificial Sequence
  Antisense compound
ttagaagatgactctactct

SEQ ID NO: 11838 - DNA, 20 bp, Artificial Sequence
  Antisense compound
tttagaagatgactctactc

SEQ ID NO: 11839 - DNA, 20 bp, Artificial Sequence
  Antisense compound
atttagaagatgactctact

SEQ ID NO: 11840 - DNA, 20 bp, Artificial Sequence
  Antisense compound
aatttagaagatgactctac

SEQ ID NO: 11841 - DNA, 20 bp, Artificial Sequence
  Antisense compound
caatttagaagatgactcta

SEQ ID NO: 11842 - DNA, 20 bp, Artificial Sequence
  Antisense compound
acaatttagaagatgactct

SEQ ID NO: 11843 - DNA, 20 bp, Artificial Sequence
  Antisense compound
cacaatttagaagatgactc

SEQ ID NO: 11844 - DNA, 20 bp, Artificial Sequence
  Antisense compound
ccacaatttagaagatgact

SEQ ID NO: 11845 - DNA, 20 bp, Artificial Sequence
  Antisense compound
cccacaatttagaagatgac

SEQ ID NO: 11846 - DNA, 20 bp, Artificial Sequence
  Antisense compound
gcccacaatttagaagatga

SEQ ID NO: 11847 - DNA, 20 bp, Artificial Sequence
  Antisense compound
tgcccacaatttagaagatg

SEQ ID NO: 11848 - DNA, 20 bp, Artificial Sequence
  Antisense compound
gtgcccacaatttagaagat

SEQ ID NO: 11849 - DNA, 20 bp, Artificial Sequence
  Antisense compound
tgtgcccacaatttagaaga

SEQ ID NO: 11850 - DNA, 20 bp, Artificial Sequence
  Antisense compound
ttgtgcccacaatttagaag

SEQ ID NO: 11851 - DNA, 20 bp, Artificial Sequence
  Antisense compound
attgtgcccacaatttagaa

SEQ ID NO: 11852 - DNA, 20 bp, Artificial Sequence
  Antisense compound
cattgtgcccacaatttaga

SEQ ID NO: 11853 - DNA, 20 bp, Artificial Sequence
  Antisense compound
acattgtgcccacaatttag

SEQ ID NO: 11854 - DNA, 20 bp, Artificial Sequence
  Antisense compound
cacattgtgcccacaattta

SEQ ID NO: 11855 - DNA, 20 bp, Artificial Sequence
  Antisense compound
acacattgtgcccacaattt

SEQ ID NO: 11856 - DNA, 20 bp, Artificial Sequence
  Antisense compound
tacacattgtgcccacaatt

SEQ ID NO: 11857 - DNA, 20 bp, Artificial Sequence
  Antisense compound
gtacacattgtgcccacaat

SEQ ID NO: 11858 - DNA, 20 bp, Artificial Sequence
  Antisense compound
tgtacacattgtgcccacaa

SEQ ID NO: 11859 - DNA, 20 bp, Artificial Sequence
  Antisense compound
ttgtacacattgtgcccaca

SEQ ID NO: 11860 - DNA, 20 bp, Artificial Sequence
  Antisense compound
gttgtacacattgtgcccac

SEQ ID NO: 11861 - DNA, 20 bp, Artificial Sequence
  Antisense compound
agttgtacacattgtgccca

SEQ ID NO: 11862 - DNA, 20 bp, Artificial Sequence
  Antisense compound
gagttgtacacattgtgccc

SEQ ID NO: 11863 - DNA, 20 bp, Artificial Sequence
  Antisense compound
ggagttgtacacattgtgcc

SEQ ID NO: 11864 - DNA, 20 bp, Artificial Sequence
  Antisense compound
tggagttgtacacattgtgc

SEQ ID NO: 11865 - DNA, 20 bp, Artificial Sequence
  Antisense compound
gtggagttgtacacattgtg

SEQ ID NO: 11866 - DNA, 20 bp, Artificial Sequence
  Antisense compound
tgtggagttgtacacattgt

SEQ ID NO: 11867 - DNA, 20 bp, Artificial Sequence
  Antisense compound
ttgtggagttgtacacattg

SEQ ID NO: 11868 - DNA, 20 bp, Artificial Sequence
  Antisense compound
attgtggagttgtacacatt

SEQ ID NO: 11869 - DNA, 20 bp, Artificial Sequence
  Antisense compound
cattgtggagttgtacacat

SEQ ID NO: 11870 - DNA, 20 bp, Artificial Sequence
  Antisense compound
tcattgtggagttgtacaca

SEQ ID NO: 11871 - DNA, 20 bp, Artificial Sequence
  Antisense compound
atcattgtggagttgtacac

SEQ ID NO: 11872 - DNA, 20 bp, Artificial Sequence
  Antisense compound
tatcattgtggagttgtaca

SEQ ID NO: 11873 - DNA, 20 bp, Artificial Sequence
  Antisense compound
atatcattgtggagttgtac

SEQ ID NO: 11874 - DNA, 20 bp, Artificial Sequence
  Antisense compound
aatatcattgtggagttgta

SEQ ID NO: 11875 - DNA, 20 bp, Artificial Sequence
  Antisense compound
gaatatcattgtggagttgt

SEQ ID NO: 11876 - DNA, 20 bp, Artificial Sequence
  Antisense compound
agaatatcattgtggagttg

SEQ ID NO: 11877 - DNA, 20 bp, Artificial Sequence
  Antisense compound
aagaatatcattgtggagtt

SEQ ID NO: 11878 - DNA, 20 bp, Artificial Sequence
  Antisense compound
gaagaatatcattgtggagt

SEQ ID NO: 11879 - DNA, 20 bp, Artificial Sequence
  Antisense compound
agaagaatatcattgtggag

SEQ ID NO: 11880 - DNA, 20 bp, Artificial Sequence
  Antisense compound
aagaagaatatcattgtgga

SEQ ID NO: 11881 - DNA, 20 bp, Artificial Sequence
  Antisense compound
caagaagaatatcattgtgg

SEQ ID NO: 11882 - DNA, 20 bp, Artificial Sequence
  Antisense compound
gcaagaagaatatcattgtg

SEQ ID NO: 11883 - DNA, 20 bp, Artificial Sequence
  Antisense compound
tgcaagaagaatatcattgt

SEQ ID NO: 11884 - DNA, 20 bp, Artificial Sequence
  Antisense compound
ttgcaagaagaatatcattg

SEQ ID NO: 11885 - DNA, 20 bp, Artificial Sequence
  Antisense compound
tttgcaagaagaatatcatt

SEQ ID NO: 11886 - DNA, 20 bp, Artificial Sequence
  Antisense compound
ttttgcaagaagaatatcat

SEQ ID NO: 11887 - DNA, 20 bp, Artificial Sequence
  Antisense compound
cttttgcaagaagaatatca

SEQ ID NO: 11888 - DNA, 20 bp, Artificial Sequence
  Antisense compound
tcttttgcaagaagaatatc

SEQ ID NO: 11889 - DNA, 20 bp, Artificial Sequence
  Antisense compound
gtcttttgcaagaagaatat

SEQ ID NO: 11890 - DNA, 20 bp, Artificial Sequence
  Antisense compound
tgtcttttgcaagaagaata

SEQ ID NO: 11891 - DNA, 20 bp, Artificial Sequence
  Antisense compound
gtgtcttttgcaagaagaat

SEQ ID NO: 11892 - DNA, 20 bp, Artificial Sequence
  Antisense compound
tgtgtcttttgcaagaagaa

SEQ ID NO: 11893 - DNA, 20 bp, Artificial Sequence
  Antisense compound
ttgtgtcttttgcaagaaga

SEQ ID NO: 11894 - DNA, 20 bp, Artificial Sequence
  Antisense compound
gttgtgtcttttgcaagaag

SEQ ID NO: 11895 - DNA, 20 bp, Artificial Sequence
  Antisense compound
agttgtgtcttttgcaagaa

SEQ ID NO: 11896 - DNA, 20 bp, Artificial Sequence
  Antisense compound
cagttgtgtcttttgcaaga

SEQ ID NO: 11897 - DNA, 20 bp, Artificial Sequence
  Antisense compound
tcagttgtgtcttttgcaag

SEQ ID NO: 11898 - DNA, 20 bp, Artificial Sequence
  Antisense compound
ttcagttgtgtcttttgcaa

SEQ ID NO: 11899 - DNA, 20 bp, Artificial Sequence
  Antisense compound
cttcagttgtgtcttttgca

SEQ ID NO: 11900 - DNA, 20 bp, Artificial Sequence
  Antisense compound
gcttcagttgtgtcttttgc

SEQ ID NO: 11901 - DNA, 20 bp, Artificial Sequence
  Antisense compound
agcttcagttgtgtcttttg

SEQ ID NO: 11902 - DNA, 20 bp, Artificial Sequence
  Antisense compound
aagcttcagttgtgtctttt

SEQ ID NO: 11903 - DNA, 20 bp, Artificial Sequence
  Antisense compound
aaagcttcagttgtgtcttt

SEQ ID NO: 11904 - DNA, 20 bp, Artificial Sequence
  Antisense compound
gaaagcttcagttgtgtctt

SEQ ID NO: 11905 - DNA, 20 bp, Artificial Sequence
  Antisense compound
cgaaagcttcagttgtgtct

SEQ ID NO: 11906 - DNA, 20 bp, Artificial Sequence
  Antisense compound
tcgaaagcttcagttgtgtc

SEQ ID NO: 11907 - DNA, 20 bp, Artificial Sequence
  Antisense compound
ctcgaaagcttcagttgtgt

SEQ ID NO: 11908 - DNA, 20 bp, Artificial Sequence
  Antisense compound
tctcgaaagcttcagttgtg

SEQ ID NO: 11909 - DNA, 20 bp, Artificial Sequence
  Antisense compound
ttctcgaaagcttcagttgt

SEQ ID NO: 11910 - DNA, 20 bp, Artificial Sequence
  Antisense compound
cttctcgaaagcttcagttg

SEQ ID NO: 11911 - DNA, 20 bp, Artificial Sequence
  Antisense compound
tcttctcgaaagcttcagtt

SEQ ID NO: 11912 - DNA, 20 bp, Artificial Sequence
  Antisense compound
atcttctcgaaagcttcagt

SEQ ID NO: 11913 - DNA, 20 bp, Artificial Sequence
  Antisense compound
catcttctcgaaagcttcag

SEQ ID NO: 11914 - DNA, 20 bp, Artificial Sequence
  Antisense compound
ccatcttctcgaaagcttca

SEQ ID NO: 11915 - DNA, 20 bp, Artificial Sequence
  Antisense compound
accatcttctcgaaagcttc

SEQ ID NO: 11916 - DNA, 20 bp, Artificial Sequence
  Antisense compound
aaccatcttctcgaaagctt

SEQ ID NO: 11917 - DNA, 20 bp, Artificial Sequence
  Antisense compound
aaaccatcttctcgaaagct

SEQ ID NO: 11918 - DNA, 20 bp, Artificial Sequence
  Antisense compound
gaaaccatcttctcgaaagc

SEQ ID NO: 11919 - DNA, 20 bp, Artificial Sequence
  Antisense compound
agaaaccatcttctcgaaag

SEQ ID NO: 11920 - DNA, 20 bp, Artificial Sequence
  Antisense compound
gagaaaccatcttctcgaaa

SEQ ID NO: 11921 - DNA, 20 bp, Artificial Sequence
  Antisense compound
agagaaaccatcttctcgaa

SEQ ID NO: 11922 - DNA, 20 bp, Artificial Sequence
  Antisense compound
aagagaaaccatcttctcga

SEQ ID NO: 11923 - DNA, 20 bp, Artificial Sequence
  Antisense compound
aaagagaaaccatcttctcg

SEQ ID NO: 11924 - DNA, 20 bp, Artificial Sequence
  Antisense compound
aaaagagaaaccatcttctc

SEQ ID NO: 11925 - DNA, 20 bp, Artificial Sequence
  Antisense compound
caaaagagaaaccatcttct

SEQ ID NO: 11926 - DNA, 20 bp, Artificial Sequence
  Antisense compound
acaaaagagaaaccatcttc

SEQ ID NO: 11927 - DNA, 20 bp, Artificial Sequence
  Antisense compound
gacaaaagagaaaccatctt

SEQ ID NO: 11928 - DNA, 20 bp, Artificial Sequence
  Antisense compound
agacaaaagagaaaccatct

SEQ ID NO: 11929 - DNA, 20 bp, Artificial Sequence
  Antisense compound
cagacaaaagagaaaccatc

SEQ ID NO: 11930 - DNA, 20 bp, Artificial Sequence
  Antisense compound
acagacaaaagagaaaccat

SEQ ID NO: 11931 - DNA, 20 bp, Artificial Sequence
  Antisense compound
aacagacaaaagagaaacca

SEQ ID NO: 11932 - DNA, 20 bp, Artificial Sequence
  Antisense compound
aaacagacaaaagagaaacc

SEQ ID NO: 11933 - DNA, 20 bp, Artificial Sequence
  Antisense compound
aaaacagacaaaagagaaac

SEQ ID NO: 11934 - DNA, 20 bp, Artificial Sequence
  Antisense compound
caaaacagacaaaagagaaa

SEQ ID NO: 11935 - DNA, 20 bp, Artificial Sequence
  Antisense compound
gcaaaacagacaaaagagaa

SEQ ID NO: 11936 - DNA, 20 bp, Artificial Sequence
  Antisense compound
agcaaaacagacaaaagaga

SEQ ID NO: 11937 - DNA, 20 bp, Artificial Sequence
  Antisense compound
tagcaaaacagacaaaagag

SEQ ID NO: 11938 - DNA, 20 bp, Artificial Sequence
  Antisense compound
atagcaaaacagacaaaaga

SEQ ID NO: 11939 - DNA, 20 bp, Artificial Sequence
  Antisense compound
gatagcaaaacagacaaaag

SEQ ID NO: 11940 - DNA, 20 bp, Artificial Sequence
  Antisense compound
ggatagcaaaacagacaaaa

SEQ ID NO: 11941 - DNA, 20 bp, Artificial Sequence
  Antisense compound
tggatagcaaaacagacaaa

SEQ ID NO: 11942 - DNA, 20 bp, Artificial Sequence
  Antisense compound
atggatagcaaaacagacaa

SEQ ID NO: 11943 - DNA, 20 bp, Artificial Sequence
  Antisense compound
catggatagcaaaacagaca

SEQ ID NO: 11944 - DNA, 20 bp, Artificial Sequence
  Antisense compound
gcatggatagcaaaacagac

SEQ ID NO: 11945 - DNA, 20 bp, Artificial Sequence
  Antisense compound
tgcatggatagcaaaacaga

SEQ ID NO: 11946 - DNA, 20 bp, Artificial Sequence
  Antisense compound
ctgcatggatagcaaaacag

SEQ ID NO: 11947 - DNA, 20 bp, Artificial Sequence
  Antisense compound
cctgcatggatagcaaaaca

SEQ ID NO: 11948 - DNA, 20 bp, Artificial Sequence
  Antisense compound
ccctgcatggatagcaaaac

SEQ ID NO: 11949 - DNA, 20 bp, Artificial Sequence
  Antisense compound
accctgcatggatagcaaaa

SEQ ID NO: 11950 - DNA, 20 bp, Artificial Sequence
  Antisense compound
caccctgcatggatagcaaa

SEQ ID NO: 11951 - DNA, 20 bp, Artificial Sequence
  Antisense compound
gcaccctgcatggatagcaa

SEQ ID NO: 11952 - DNA, 20 bp, Artificial Sequence
  Antisense compound
agcaccctgcatggatagca

SEQ ID NO: 11953 - DNA, 20 bp, Artificial Sequence
  Antisense compound
cagcaccctgcatggatagc

SEQ ID NO: 11954 - DNA, 20 bp, Artificial Sequence
  Antisense compound
acagcaccctgcatggatag

SEQ ID NO: 11955 - DNA, 20 bp, Artificial Sequence
  Antisense compound
tacagcaccctgcatggata

SEQ ID NO: 11956 - DNA, 20 bp, Artificial Sequence
  Antisense compound
ctacagcaccctgcatggat

SEQ ID NO: 11957 - DNA, 20 bp, Artificial Sequence
  Antisense compound
tctacagcaccctgcatgga

SEQ ID NO: 11958 - DNA, 20 bp, Artificial Sequence
  Antisense compound
gtctacagcaccctgcatgg

SEQ ID NO: 11959 - DNA, 20 bp, Artificial Sequence
  Antisense compound
tgtctacagcaccctgcatg

SEQ ID NO: 11960 - DNA, 20 bp, Artificial Sequence
  Antisense compound
atgtctacagcaccctgcat

SEQ ID NO: 11961 - DNA, 20 bp, Artificial Sequence
  Antisense compound
aatgtctacagcaccctgca

SEQ ID NO: 11962 - DNA, 20 bp, Artificial Sequence
  Antisense compound
taatgtctacagcaccctgc

SEQ ID NO: 11963 - DNA, 20 bp, Artificial Sequence
  Antisense compound
ttaatgtctacagcaccctg

SEQ ID NO: 11964 - DNA, 20 bp, Artificial Sequence
  Antisense compound
attaatgtctacagcaccct

SEQ ID NO: 11965 - DNA, 20 bp, Artificial Sequence
  Antisense compound
tattaatgtctacagcaccc

SEQ ID NO: 11966 - DNA, 20 bp, Artificial Sequence
  Antisense compound
ctattaatgtctacagcacc

SEQ ID NO: 11967 - DNA, 20 bp, Artificial Sequence
  Antisense compound
cctattaatgtctacagcac

SEQ ID NO: 11968 - DNA, 20 bp, Artificial Sequence
  Antisense compound
acctattaatgtctacagca

SEQ ID NO: 11969 - DNA, 20 bp, Artificial Sequence
  Antisense compound
aacctattaatgtctacagc

SEQ ID NO: 11970 - DNA, 20 bp, Artificial Sequence
  Antisense compound
caacctattaatgtctacag

SEQ ID NO: 11971 - DNA, 20 bp, Artificial Sequence
  Antisense compound
acaacctattaatgtctaca

SEQ ID NO: 11972 - DNA, 20 bp, Artificial Sequence
  Antisense compound
cacaacctattaatgtctac

SEQ ID NO: 11973 - DNA, 20 bp, Artificial Sequence
  Antisense compound
gcacaacctattaatgtcta

SEQ ID NO: 11974 - DNA, 20 bp, Artificial Sequence
  Antisense compound
cgcacaacctattaatgtct

SEQ ID NO: 11975 - DNA, 20 bp, Artificial Sequence
  Antisense compound
tcgcacaacctattaatgtc

SEQ ID NO: 11976 - DNA, 20 bp, Artificial Sequence
  Antisense compound
ctcgcacaacctattaatgt

SEQ ID NO: 11977 - DNA, 20 bp, Artificial Sequence
  Antisense compound
cctcgcacaacctattaatg

SEQ ID NO: 11978 - DNA, 20 bp, Artificial Sequence
  Antisense compound
tcctcgcacaacctattaat

SEQ ID NO: 11979 - DNA, 20 bp, Artificial Sequence
  Antisense compound
ttcctcgcacaacctattaa

SEQ ID NO: 11980 - DNA, 20 bp, Artificial Sequence
  Antisense compound
tttcctcgcacaacctatta

SEQ ID NO: 11981 - DNA, 20 bp, Artificial Sequence
  Antisense compound
atttcctcgcacaacctatt

SEQ ID NO: 11982 - DNA, 20 bp, Artificial Sequence
  Antisense compound
catttcctcgcacaacctat

SEQ ID NO: 11983 - DNA, 20 bp, Artificial Sequence
  Antisense compound
gcatttcctcgcacaaccta

SEQ ID NO: 11984 - DNA, 20 bp, Artificial Sequence
  Antisense compound
agcatttcctcgcacaacct

SEQ ID NO: 11985 - DNA, 20 bp, Artificial Sequence
  Antisense compound
gagcatttcctcgcacaacc

SEQ ID NO: 11986 - DNA, 20 bp, Artificial Sequence
  Antisense compound
cgagcatttcctcgcacaac

SEQ ID NO: 11987 - DNA, 20 bp, Artificial Sequence
  Antisense compound
tcgagcatttcctcgcacaa

SEQ ID NO: 11988 - DNA, 20 bp, Artificial Sequence
  Antisense compound
atcgagcatttcctcgcaca

SEQ ID NO: 11989 - DNA, 20 bp, Artificial Sequence
  Antisense compound
tatcgagcatttcctcgcac

SEQ ID NO: 11990 - DNA, 20 bp, Artificial Sequence
  Antisense compound
ttatcgagcatttcctcgca

SEQ ID NO: 11991 - DNA, 20 bp, Artificial Sequence
  Antisense compound
gttatcgagcatttcctcgc

SEQ ID NO: 11992 - DNA, 20 bp, Artificial Sequence
  Antisense compound
ggttatcgagcatttcctcg

SEQ ID NO: 11993 - DNA, 20 bp, Artificial Sequence
  Antisense compound
cggttatcgagcatttcctc

SEQ ID NO: 11994 - DNA, 20 bp, Artificial Sequence
  Antisense compound
acggttatcgagcatttcct

SEQ ID NO: 11995 - DNA, 20 bp, Artificial Sequence
  Antisense compound
cacggttatcgagcatttcc

SEQ ID NO: 11996 - DNA, 20 bp, Artificial Sequence
  Antisense compound
gcacggttatcgagcatttc

SEQ ID NO: 11997 - DNA, 20 bp, Artificial Sequence
  Antisense compound
agcacggttatcgagcattt

SEQ ID NO: 11998 - DNA, 20 bp, Artificial Sequence
  Antisense compound
tagcacggttatcgagcatt

SEQ ID NO: 11999 - DNA, 20 bp, Artificial Sequence
  Antisense compound
gtagcacggttatcgagcat

SEQ ID NO: 12000 - DNA, 20 bp, Artificial Sequence
  Antisense compound
agtagcacggttatcgagca

SEQ ID NO: 12001 - DNA, 20 bp, Artificial Sequence
  Antisense compound
gagtagcacggttatcgagc

SEQ ID NO: 12002 - DNA, 20 bp, Artificial Sequence
  Antisense compound
agagtagcacggttatcgag

SEQ ID NO: 12003 - DNA, 20 bp, Artificial Sequence
  Antisense compound
aagagtagcacggttatcga

SEQ ID NO: 12004 - DNA, 20 bp, Artificial Sequence
  Antisense compound
gaagagtagcacggttatcg

SEQ ID NO: 12005 - DNA, 20 bp, Artificial Sequence
  Antisense compound
tgaagagtagcacggttatc

SEQ ID NO: 12006 - DNA, 20 bp, Artificial Sequence
  Antisense compound
ctgaagagtagcacggttat

SEQ ID NO: 12007 - DNA, 20 bp, Artificial Sequence
  Antisense compound
cctgaagagtagcacggtta

SEQ ID NO: 12008 - DNA, 20 bp, Artificial Sequence
  Antisense compound
gcctgaagagtagcacggtt

SEQ ID NO: 12009 - DNA, 20 bp, Artificial Sequence
  Antisense compound
agcctgaagagtagcacggt

SEQ ID NO: 12010 - DNA, 20 bp, Artificial Sequence
  Antisense compound
tagcctgaagagtagcacgg

SEQ ID NO: 12011 - DNA, 20 bp, Artificial Sequence
  Antisense compound
atagcctgaagagtagcacg

SEQ ID NO: 12012 - DNA, 20 bp, Artificial Sequence
  Antisense compound
aatagcctgaagagtagcac

SEQ ID NO: 12013 - DNA, 20 bp, Artificial Sequence
  Antisense compound
caatagcctgaagagtagca

SEQ ID NO: 12014 - DNA, 20 bp, Artificial Sequence
  Antisense compound
gcaatagcctgaagagtagc

SEQ ID NO: 12015 - DNA, 20 bp, Artificial Sequence
  Antisense compound
agcaatagcctgaagagtag

SEQ ID NO: 12016 - DNA, 20 bp, Artificial Sequence
  Antisense compound
aagcaatagcctgaagagta

SEQ ID NO: 12017 - DNA, 20 bp, Artificial Sequence
  Antisense compound
gaagcaatagcctgaagagt

SEQ ID NO: 12018 - DNA, 20 bp, Artificial Sequence
  Antisense compound
tgaagcaatagcctgaagag

SEQ ID NO: 12019 - DNA, 20 bp, Artificial Sequence
  Antisense compound
ctgaagcaatagcctgaaga

SEQ ID NO: 12020 - DNA, 20 bp, Artificial Sequence
  Antisense compound
tctgaagcaatagcctgaag

SEQ ID NO: 12021 - DNA, 20 bp, Artificial Sequence
  Antisense compound
ttctgaagcaatagcctgaa

SEQ ID NO: 12022 - DNA, 20 bp, Artificial Sequence
  Antisense compound
attctgaagcaatagcctga

SEQ ID NO: 12023 - DNA, 20 bp, Artificial Sequence
  Antisense compound
aattctgaagcaatagcctg

SEQ ID NO: 12024 - DNA, 20 bp, Artificial Sequence
  Antisense compound
aaattctgaagcaatagcct

SEQ ID NO: 12025 - DNA, 20 bp, Artificial Sequence
  Antisense compound
taaattctgaagcaatagcc

SEQ ID NO: 12026 - DNA, 20 bp, Artificial Sequence
  Antisense compound
ctaaattctgaagcaatagc

SEQ ID NO: 12027 - DNA, 20 bp, Artificial Sequence
  Antisense compound
actaaattctgaagcaatag

SEQ ID NO: 12028 - DNA, 20 bp, Artificial Sequence
  Antisense compound
aactaaattctgaagcaata

SEQ ID NO: 12029 - DNA, 20 bp, Artificial Sequence
  Antisense compound
gaactaaattctgaagcaat

SEQ ID NO: 12030 - DNA, 20 bp, Artificial Sequence
  Antisense compound
agaactaaattctgaagcaa

SEQ ID NO: 12031 - DNA, 20 bp, Artificial Sequence
  Antisense compound
aagaactaaattctgaagca

SEQ ID NO: 12032 - DNA, 20 bp, Artificial Sequence
  Antisense compound
aaagaactaaattctgaagc

SEQ ID NO: 12033 - DNA, 20 bp, Artificial Sequence
  Antisense compound
taaagaactaaattctgaag

SEQ ID NO: 12034 - DNA, 20 bp, Artificial Sequence
  Antisense compound
gtaaagaactaaattctgaa

SEQ ID NO: 12035 - DNA, 20 bp, Artificial Sequence
  Antisense compound
ggtaaagaactaaattctga

SEQ ID NO: 12036 - DNA, 20 bp, Artificial Sequence
  Antisense compound
tggtaaagaactaaattctg

SEQ ID NO: 12037 - DNA, 20 bp, Artificial Sequence
  Antisense compound
atggtaaagaactaaattct

SEQ ID NO: 12038 - DNA, 20 bp, Artificial Sequence
  Antisense compound
gatggtaaagaactaaattc

SEQ ID NO: 12039 - DNA, 20 bp, Artificial Sequence
  Antisense compound
tgatggtaaagaactaaatt

SEQ ID NO: 12040 - DNA, 20 bp, Artificial Sequence
  Antisense compound
atgatggtaaagaactaaat

SEQ ID NO: 12041 - DNA, 20 bp, Artificial Sequence
  Antisense compound
tatgatggtaaagaactaaa

SEQ ID NO: 12042 - DNA, 20 bp, Artificial Sequence
  Antisense compound
atatgatggtaaagaactaa

SEQ ID NO: 12043 - DNA, 20 bp, Artificial Sequence
  Antisense compound
catatgatggtaaagaacta

SEQ ID NO: 12044 - DNA, 20 bp, Artificial Sequence
  Antisense compound
gcatatgatggtaaagaact

SEQ ID NO: 12045 - DNA, 20 bp, Artificial Sequence
  Antisense compound
ggcatatgatggtaaagaac

SEQ ID NO: 12046 - DNA, 20 bp, Artificial Sequence
  Antisense compound
cggcatatgatggtaaagaa

SEQ ID NO: 12047 - DNA, 20 bp, Artificial Sequence
  Antisense compound
gcggcatatgatggtaaaga

SEQ ID NO: 12048 - DNA, 20 bp, Artificial Sequence
  Antisense compound
agcggcatatgatggtaaag

SEQ ID NO: 12049 - DNA, 20 bp, Artificial Sequence
  Antisense compound
aagcggcatatgatggtaaa

SEQ ID NO: 12050 - DNA, 20 bp, Artificial Sequence
  Antisense compound
taagcggcatatgatggtaa

SEQ ID NO: 12051 - DNA, 20 bp, Artificial Sequence
  Antisense compound
ataagcggcatatgatggta

SEQ ID NO: 12052 - DNA, 20 bp, Artificial Sequence
  Antisense compound
cataagcggcatatgatggt

SEQ ID NO: 12053 - DNA, 20 bp, Artificial Sequence
  Antisense compound
gcataagcggcatatgatgg

SEQ ID NO: 12054 - DNA, 20 bp, Artificial Sequence
  Antisense compound
ggcataagcggcatatgatg

SEQ ID NO: 12055 - DNA, 20 bp, Artificial Sequence
  Antisense compound
tggcataagcggcatatgat

SEQ ID NO: 12056 - DNA, 20 bp, Artificial Sequence
  Antisense compound
gtggcataagcggcatatga

SEQ ID NO: 12057 - DNA, 20 bp, Artificial Sequence
  Antisense compound
agtggcataagcggcatatg

SEQ ID NO: 12058 - DNA, 20 bp, Artificial Sequence
  Antisense compound
cagtggcataagcggcatat

SEQ ID NO: 12059 - DNA, 20 bp, Artificial Sequence
  Antisense compound
gcagtggcataagcggcata

SEQ ID NO: 12060 - DNA, 20 bp, Artificial Sequence
  Antisense compound
ggcagtggcataagcggcat

SEQ ID NO: 12061 - DNA, 20 bp, Artificial Sequence
  Antisense compound
gggcagtggcataagcggca

SEQ ID NO: 12062 - DNA, 20 bp, Artificial Sequence
  Antisense compound
tgggcagtggcataagcggc

SEQ ID NO: 12063 - DNA, 20 bp, Artificial Sequence
  Antisense compound
ctgggcagtggcataagcgg

SEQ ID NO: 12064 - DNA, 20 bp, Artificial Sequence
  Antisense compound
cctgggcagtggcataagcg

SEQ ID NO: 12065 - DNA, 20 bp, Artificial Sequence
  Antisense compound
tcctgggcagtggcataagc

SEQ ID NO: 12066 - DNA, 20 bp, Artificial Sequence
  Antisense compound
ctcctgggcagtggcataag

SEQ ID NO: 12067 - DNA, 20 bp, Artificial Sequence
  Antisense compound
cctcctgggcagtggcataa

SEQ ID NO: 12068 - DNA, 20 bp, Artificial Sequence
  Antisense compound
gcctcctgggcagtggcata

SEQ ID NO: 12069 - DNA, 20 bp, Artificial Sequence
  Antisense compound
ggcctcctgggcagtggcat

SEQ ID NO: 12070 - DNA, 20 bp, Artificial Sequence
  Antisense compound
aggcctcctgggcagtggca

SEQ ID NO: 12071 - DNA, 20 bp, Artificial Sequence
  Antisense compound
taggcctcctgggcagtggc

SEQ ID NO: 12072 - DNA, 20 bp, Artificial Sequence
  Antisense compound
ataggcctcctgggcagtgg

SEQ ID NO: 12073 - DNA, 20 bp, Artificial Sequence
  Antisense compound
cataggcctcctgggcagtg

SEQ ID NO: 12074 - DNA, 20 bp, Artificial Sequence
  Antisense compound
tcataggcctcctgggcagt

SEQ ID NO: 12075 - DNA, 20 bp, Artificial Sequence
  Antisense compound
ctcataggcctcctgggcag

SEQ ID NO: 12076 - DNA, 20 bp, Artificial Sequence
  Antisense compound
gctcataggcctcctgggca

SEQ ID NO: 12077 - DNA, 20 bp, Artificial Sequence
  Antisense compound
tgctcataggcctcctgggc

SEQ ID NO: 12078 - DNA, 20 bp, Artificial Sequence
  Antisense compound
ctgctcataggcctcctggg

SEQ ID NO: 12079 - DNA, 20 bp, Artificial Sequence
  Antisense compound
cctgctcataggcctcctgg

SEQ ID NO: 12080 - DNA, 20 bp, Artificial Sequence
  Antisense compound
gcctgctcataggcctcctg

SEQ ID NO: 12081 - DNA, 20 bp, Artificial Sequence
  Antisense compound
agcctgctcataggcctcct

SEQ ID NO: 12082 - DNA, 20 bp, Artificial Sequence
  Antisense compound
cagcctgctcataggcctcc

SEQ ID NO: 12083 - DNA, 20 bp, Artificial Sequence
  Antisense compound
acagcctgctcataggcctc

SEQ ID NO: 12084 - DNA, 20 bp, Artificial Sequence
  Antisense compound
tacagcctgctcataggcct

SEQ ID NO: 12085 - DNA, 20 bp, Artificial Sequence
  Antisense compound
ctacagcctgctcataggcc

SEQ ID NO: 12086 - DNA, 20 bp, Artificial Sequence
  Antisense compound
gctacagcctgctcataggc

SEQ ID NO: 12087 - DNA, 20 bp, Artificial Sequence
  Antisense compound
agctacagcctgctcatagg

SEQ ID NO: 12088 - DNA, 20 bp, Artificial Sequence
  Antisense compound
tagctacagcctgctcatag

SEQ ID NO: 12089 - DNA, 20 bp, Artificial Sequence
  Antisense compound
ttagctacagcctgctcata

SEQ ID NO: 12090 - DNA, 20 bp, Artificial Sequence
  Antisense compound
attagctacagcctgctcat

SEQ ID NO: 12091 - DNA, 20 bp, Artificial Sequence
  Antisense compound
cattagctacagcctgctca

SEQ ID NO: 12092 - DNA, 20 bp, Artificial Sequence
  Antisense compound
ccattagctacagcctgctc

SEQ ID NO: 12093 - DNA, 20 bp, Artificial Sequence
  Antisense compound
accattagctacagcctgct

SEQ ID NO: 12094 - DNA, 20 bp, Artificial Sequence
  Antisense compound
caccattagctacagcctgc

SEQ ID NO: 12095 - DNA, 20 bp, Artificial Sequence
  Antisense compound
tcaccattagctacagcctg

SEQ ID NO: 12096 - DNA, 20 bp, Artificial Sequence
  Antisense compound
atcaccattagctacagcct

SEQ ID NO: 12097 - DNA, 20 bp, Artificial Sequence
  Antisense compound
aatcaccattagctacagcc

SEQ ID NO: 12098 - DNA, 20 bp, Artificial Sequence
  Antisense compound
gaatcaccattagctacagc

SEQ ID NO: 12099 - DNA, 20 bp, Artificial Sequence
  Antisense compound
agaatcaccattagctacag

SEQ ID NO: 12100 - DNA, 20 bp, Artificial Sequence
  Antisense compound
cagaatcaccattagctaca

SEQ ID NO: 12101 - DNA, 20 bp, Artificial Sequence
  Antisense compound
tcagaatcaccattagctac

SEQ ID NO: 12102 - DNA, 20 bp, Artificial Sequence
  Antisense compound
ttcagaatcaccattagcta

SEQ ID NO: 12103 - DNA, 20 bp, Artificial Sequence
  Antisense compound
cttcagaatcaccattagct

SEQ ID NO: 12104 - DNA, 20 bp, Artificial Sequence
  Antisense compound
acttcagaatcaccattagc

SEQ ID NO: 12105 - DNA, 20 bp, Artificial Sequence
  Antisense compound
gacttcagaatcaccattag

SEQ ID NO: 12106 - DNA, 20 bp, Artificial Sequence
  Antisense compound
cgacttcagaatcaccatta

SEQ ID NO: 12107 - DNA, 20 bp, Artificial Sequence
  Antisense compound
acgacttcagaatcaccatt

SEQ ID NO: 12108 - DNA, 20 bp, Artificial Sequence
  Antisense compound
aacgacttcagaatcaccat

SEQ ID NO: 12109 - DNA, 20 bp, Artificial Sequence
  Antisense compound
gaacgacttcagaatcacca

SEQ ID NO: 12110 - DNA, 20 bp, Artificial Sequence
  Antisense compound
agaacgacttcagaatcacc

SEQ ID NO: 12111 - DNA, 20 bp, Artificial Sequence
  Antisense compound
gagaacgacttcagaatcac

SEQ ID NO: 12112 - DNA, 20 bp, Artificial Sequence
  Antisense compound
tgagaacgacttcagaatca

SEQ ID NO: 12113 - DNA, 20 bp, Artificial Sequence
  Antisense compound
ttgagaacgacttcagaatc

SEQ ID NO: 12114 - DNA, 20 bp, Artificial Sequence
  Antisense compound
tttgagaacgacttcagaat

SEQ ID NO: 12115 - DNA, 20 bp, Artificial Sequence
  Antisense compound
ttttgagaacgacttcagaa

SEQ ID NO: 12116 - DNA, 20 bp, Artificial Sequence
  Antisense compound
tttttgagaacgacttcaga

SEQ ID NO: 12117 - DNA, 20 bp, Artificial Sequence
  Antisense compound
ctttttgagaacgacttcag

SEQ ID NO: 12118 - DNA, 20 bp, Artificial Sequence
  Antisense compound
actttttgagaacgacttca

SEQ ID NO: 12119 - DNA, 20 bp, Artificial Sequence
  Antisense compound
aactttttgagaacgacttc

SEQ ID NO: 12120 - DNA, 20 bp, Artificial Sequence
  Antisense compound
taactttttgagaacgactt

SEQ ID NO: 12121 - DNA, 20 bp, Artificial Sequence
  Antisense compound
ttaactttttgagaacgact

SEQ ID NO: 12122 - DNA, 20 bp, Artificial Sequence
  Antisense compound
tttaactttttgagaacgac

SEQ ID NO: 12123 - DNA, 20 bp, Artificial Sequence
  Antisense compound
ctttaactttttgagaacga

SEQ ID NO: 12124 - DNA, 20 bp, Artificial Sequence
  Antisense compound
tctttaactttttgagaacg

SEQ ID NO: 12125 - DNA, 20 bp, Artificial Sequence
  Antisense compound
ttctttaactttttgagaac

SEQ ID NO: 12126 - DNA, 20 bp, Artificial Sequence
  Antisense compound
tttctttaactttttgagaa

SEQ ID NO: 12127 - DNA, 20 bp, Artificial Sequence
  Antisense compound
atttctttaactttttgaga

SEQ ID NO: 12128 - DNA, 20 bp, Artificial Sequence
  Antisense compound
gatttctttaactttttgag

SEQ ID NO: 12129 - DNA, 20 bp, Artificial Sequence
  Antisense compound
agatttctttaactttttga

SEQ ID NO: 12130 - DNA, 20 bp, Artificial Sequence
  Antisense compound
aagatttctttaactttttg

SEQ ID NO: 12131 - DNA, 20 bp, Artificial Sequence
  Antisense compound
aaagatttctttaacttttt

SEQ ID NO: 12132 - DNA, 20 bp, Artificial Sequence
  Antisense compound
caaagatttctttaactttt

SEQ ID NO: 12133 - DNA, 20 bp, Artificial Sequence
  Antisense compound
tcaaagatttctttaacttt

SEQ ID NO: 12134 - DNA, 20 bp, Artificial Sequence
  Antisense compound
ttcaaagatttctttaactt

SEQ ID NO: 12135 - DNA, 20 bp, Artificial Sequence
  Antisense compound
attcaaagatttctttaact

SEQ ID NO: 12136 - DNA, 20 bp, Artificial Sequence
  Antisense compound
cattcaaagatttctttaac

SEQ ID NO: 12137 - DNA, 20 bp, Artificial Sequence
  Antisense compound
acattcaaagatttctttaa

SEQ ID NO: 12138 - DNA, 20 bp, Artificial Sequence
  Antisense compound
cacattcaaagatttcttta

SEQ ID NO: 12139 - DNA, 20 bp, Artificial Sequence
  Antisense compound
ccacattcaaagatttcttt

SEQ ID NO: 12140 - DNA, 20 bp, Artificial Sequence
  Antisense compound
gccacattcaaagatttctt

SEQ ID NO: 12141 - DNA, 20 bp, Artificial Sequence
  Antisense compound
agccacattcaaagatttct

SEQ ID NO: 12142 - DNA, 20 bp, Artificial Sequence
  Antisense compound
tagccacattcaaagatttc

SEQ ID NO: 12143 - DNA, 20 bp, Artificial Sequence
  Antisense compound
ttagccacattcaaagattt

SEQ ID NO: 12144 - DNA, 20 bp, Artificial Sequence
  Antisense compound
tttagccacattcaaagatt

SEQ ID NO: 12145 - DNA, 20 bp, Artificial Sequence
  Antisense compound
atttagccacattcaaagat

SEQ ID NO: 12146 - DNA, 20 bp, Artificial Sequence
  Antisense compound
gatttagccacattcaaaga

SEQ ID NO: 12147 - DNA, 20 bp, Artificial Sequence
  Antisense compound
agatttagccacattcaaag

SEQ ID NO: 12148 - DNA, 20 bp, Artificial Sequence
  Antisense compound
cagatttagccacattcaaa

SEQ ID NO: 12149 - DNA, 20 bp, Artificial Sequence
  Antisense compound
tcagatttagccacattcaa

SEQ ID NO: 12150 - DNA, 20 bp, Artificial Sequence
  Antisense compound
ctcagatttagccacattca

SEQ ID NO: 12151 - DNA, 20 bp, Artificial Sequence
  Antisense compound
actcagatttagccacattc

SEQ ID NO: 12152 - DNA, 20 bp, Artificial Sequence
  Antisense compound
aactcagatttagccacatt

SEQ ID NO: 12153 - DNA, 20 bp, Artificial Sequence
  Antisense compound
aaactcagatttagccacat

SEQ ID NO: 12154 - DNA, 20 bp, Artificial Sequence
  Antisense compound
caaactcagatttagccaca

SEQ ID NO: 12155 - DNA, 20 bp, Artificial Sequence
  Antisense compound
tcaaactcagatttagccac

SEQ ID NO: 12156 - DNA, 20 bp, Artificial Sequence
  Antisense compound
gtcaaactcagatttagcca

SEQ ID NO: 12157 - DNA, 20 bp, Artificial Sequence
  Antisense compound
ggtcaaactcagatttagcc

SEQ ID NO: 12158 - DNA, 20 bp, Artificial Sequence
  Antisense compound
cggtcaaactcagatttagc

SEQ ID NO: 12159 - DNA, 20 bp, Artificial Sequence
  Antisense compound
acggtcaaactcagatttag

SEQ ID NO: 12160 - DNA, 20 bp, Artificial Sequence
  Antisense compound
cacggtcaaactcagattta

SEQ ID NO: 12161 - DNA, 20 bp, Artificial Sequence
  Antisense compound
tcacggtcaaactcagattt

SEQ ID NO: 12162 - DNA, 20 bp, Artificial Sequence
  Antisense compound
atcacggtcaaactcagatt

SEQ ID NO: 12163 - DNA, 20 bp, Artificial Sequence
  Antisense compound
catcacggtcaaactcagat

SEQ ID NO: 12164 - DNA, 20 bp, Artificial Sequence
  Antisense compound
gcatcacggtcaaactcaga

SEQ ID NO: 12165 - DNA, 20 bp, Artificial Sequence
  Antisense compound
agcatcacggtcaaactcag

SEQ ID NO: 12166 - DNA, 20 bp, Artificial Sequence
  Antisense compound
cagcatcacggtcaaactca

SEQ ID NO: 12167 - DNA, 20 bp, Artificial Sequence
  Antisense compound
gcagcatcacggtcaaactc

SEQ ID NO: 12168 - DNA, 20 bp, Artificial Sequence
  Antisense compound
ggcagcatcacggtcaaact

SEQ ID NO: 12169 - DNA, 20 bp, Artificial Sequence
  Antisense compound
tggcagcatcacggtcaaac

SEQ ID NO: 12170 - DNA, 20 bp, Artificial Sequence
  Antisense compound
atggcagcatcacggtcaaa

SEQ ID NO: 12171 - DNA, 20 bp, Artificial Sequence
  Antisense compound
catggcagcatcacggtcaa

SEQ ID NO: 12172 - DNA, 20 bp, Artificial Sequence
  Antisense compound
gcatggcagcatcacggtca

SEQ ID NO: 12173 - DNA, 20 bp, Artificial Sequence
  Antisense compound
tgcatggcagcatcacggtc

SEQ ID NO: 12174 - DNA, 20 bp, Artificial Sequence
  Antisense compound
ttgcatggcagcatcacggt

SEQ ID NO: 12175 - DNA, 20 bp, Artificial Sequence
  Antisense compound
gttgcatggcagcatcacgg

SEQ ID NO: 12176 - DNA, 20 bp, Artificial Sequence
  Antisense compound
cgttgcatggcagcatcacg

SEQ ID NO: 12177 - DNA, 20 bp, Artificial Sequence
  Antisense compound
gcgttgcatggcagcatcac

SEQ ID NO: 12178 - DNA, 20 bp, Artificial Sequence
  Antisense compound
tgcgttgcatggcagcatca

SEQ ID NO: 12179 - DNA, 20 bp, Artificial Sequence
  Antisense compound
ttgcgttgcatggcagcatc

SEQ ID NO: 12180 - DNA, 20 bp, Artificial Sequence
  Antisense compound
cttgcgttgcatggcagcat

SEQ ID NO: 12181 - DNA, 20 bp, Artificial Sequence
  Antisense compound
acttgcgttgcatggcagca

SEQ ID NO: 12182 - DNA, 20 bp, Artificial Sequence
  Antisense compound
aacttgcgttgcatggcagc

SEQ ID NO: 12183 - DNA, 20 bp, Artificial Sequence
  Antisense compound
caacttgcgttgcatggcag

SEQ ID NO: 12184 - DNA, 20 bp, Artificial Sequence
  Antisense compound
ccaacttgcgttgcatggca

SEQ ID NO: 12185 - DNA, 20 bp, Artificial Sequence
  Antisense compound
tccaacttgcgttgcatggc

SEQ ID NO: 12186 - DNA, 20 bp, Artificial Sequence
  Antisense compound
ttccaacttgcgttgcatgg

SEQ ID NO: 12187 - DNA, 20 bp, Artificial Sequence
  Antisense compound
tttccaacttgcgttgcatg

SEQ ID NO: 12188 - DNA, 20 bp, Artificial Sequence
  Antisense compound
ttttccaacttgcgttgcat

SEQ ID NO: 12189 - DNA, 20 bp, Artificial Sequence
  Antisense compound
cttttccaacttgcgttgca

SEQ ID NO: 12190 - DNA, 20 bp, Artificial Sequence
  Antisense compound
tcttttccaacttgcgttgc

SEQ ID NO: 12191 - DNA, 20 bp, Artificial Sequence
  Antisense compound
atcttttccaacttgcgttg

SEQ ID NO: 12192 - DNA, 20 bp, Artificial Sequence
  Antisense compound
catcttttccaacttgcgtt

SEQ ID NO: 12193 - DNA, 20 bp, Artificial Sequence
  Antisense compound
ccatcttttccaacttgcgt

SEQ ID NO: 12194 - DNA, 20 bp, Artificial Sequence
  Antisense compound
gccatcttttccaacttgcg

SEQ ID NO: 12195 - DNA, 20 bp, Artificial Sequence
  Antisense compound
tgccatcttttccaacttgc

SEQ ID NO: 12196 - DNA, 20 bp, Artificial Sequence
  Antisense compound
ctgccatcttttccaacttg

SEQ ID NO: 12197 - DNA, 20 bp, Artificial Sequence
  Antisense compound
tctgccatcttttccaactt

SEQ ID NO: 12198 - DNA, 20 bp, Artificial Sequence
  Antisense compound
atctgccatcttttccaact

SEQ ID NO: 12199 - DNA, 20 bp, Artificial Sequence
  Antisense compound
gatctgccatcttttccaac

SEQ ID NO: 12200 - DNA, 20 bp, Artificial Sequence
  Antisense compound
tgatctgccatcttttccaa

SEQ ID NO: 12201 - DNA, 20 bp, Artificial Sequence
  Antisense compound
ctgatctgccatcttttcca

SEQ ID NO: 12202 - DNA, 20 bp, Artificial Sequence
  Antisense compound
cctgatctgccatcttttcc

SEQ ID NO: 12203 - DNA, 20 bp, Artificial Sequence
  Antisense compound
gcctgatctgccatcttttc

SEQ ID NO: 12204 - DNA, 20 bp, Artificial Sequence
  Antisense compound
agcctgatctgccatctttt

SEQ ID NO: 12205 - DNA, 20 bp, Artificial Sequence
  Antisense compound
tagcctgatctgccatcttt

SEQ ID NO: 12206 - DNA, 20 bp, Artificial Sequence
  Antisense compound
atagcctgatctgccatctt

SEQ ID NO: 12207 - DNA, 20 bp, Artificial Sequence
  Antisense compound
catagcctgatctgccatct

SEQ ID NO: 12208 - DNA, 20 bp, Artificial Sequence
  Antisense compound
tcatagcctgatctgccatc

SEQ ID NO: 12209 - DNA, 20 bp, Artificial Sequence
  Antisense compound
gtcatagcctgatctgccat

SEQ ID NO: 12210 - DNA, 20 bp, Artificial Sequence
  Antisense compound
ggtcatagcctgatctgcca

SEQ ID NO: 12211 - DNA, 20 bp, Artificial Sequence
  Antisense compound
gggtcatagcctgatctgcc

SEQ ID NO: 12212 - DNA, 20 bp, Artificial Sequence
  Antisense compound
tgggtcatagcctgatctgc

SEQ ID NO: 12213 - DNA, 20 bp, Artificial Sequence
  Antisense compound
ttgggtcatagcctgatctg

SEQ ID NO: 12214 - DNA, 20 bp, Artificial Sequence
  Antisense compound
tttgggtcatagcctgatct

SEQ ID NO: 12215 - DNA, 20 bp, Artificial Sequence
  Antisense compound
atttgggtcatagcctgatc

SEQ ID NO: 12216 - DNA, 20 bp, Artificial Sequence
  Antisense compound
catttgggtcatagcctgat

SEQ ID NO: 12217 - DNA, 20 bp, Artificial Sequence
  Antisense compound
acatttgggtcatagcctga

SEQ ID NO: 12218 - DNA, 20 bp, Artificial Sequence
  Antisense compound
tacatttgggtcatagcctg

SEQ ID NO: 12219 - DNA, 20 bp, Artificial Sequence
  Antisense compound
gtacatttgggtcatagcct

SEQ ID NO: 12220 - DNA, 20 bp, Artificial Sequence
  Antisense compound
tgtacatttgggtcatagcc

SEQ ID NO: 12221 - DNA, 20 bp, Artificial Sequence
  Antisense compound
ttgtacatttgggtcatagc

SEQ ID NO: 12222 - DNA, 20 bp, Artificial Sequence
  Antisense compound
tttgtacatttgggtcatag

SEQ ID NO: 12223 - DNA, 20 bp, Artificial Sequence
  Antisense compound
gtttgtacatttgggtcata

SEQ ID NO: 12224 - DNA, 20 bp, Artificial Sequence
  Antisense compound
tgtttgtacatttgggtcat

SEQ ID NO: 12225 - DNA, 20 bp, Artificial Sequence
  Antisense compound
ctgtttgtacatttgggtca

SEQ ID NO: 12226 - DNA, 20 bp, Artificial Sequence
  Antisense compound
cctgtttgtacatttgggtc

SEQ ID NO: 12227 - DNA, 20 bp, Artificial Sequence
  Antisense compound
gcctgtttgtacatttgggt

SEQ ID NO: 12228 - DNA, 20 bp, Artificial Sequence
  Antisense compound
tgcctgtttgtacatttggg

SEQ ID NO: 12229 - DNA, 20 bp, Artificial Sequence
  Antisense compound
ttgcctgtttgtacatttgg

SEQ ID NO: 12230 - DNA, 20 bp, Artificial Sequence
  Antisense compound
cttgcctgtttgtacatttg

SEQ ID NO: 12231 - DNA, 20 bp, Artificial Sequence
  Antisense compound
tcttgcctgtttgtacattt

SEQ ID NO: 12232 - DNA, 20 bp, Artificial Sequence
  Antisense compound
atcttgcctgtttgtacatt

SEQ ID NO: 12233 - DNA, 20 bp, Artificial Sequence
  Antisense compound
gatcttgcctgtttgtacat

SEQ ID NO: 12234 - DNA, 20 bp, Artificial Sequence
  Antisense compound
agatcttgcctgtttgtaca

SEQ ID NO: 12235 - DNA, 20 bp, Artificial Sequence
  Antisense compound
cagatcttgcctgtttgtac

SEQ ID NO: 12236 - DNA, 20 bp, Artificial Sequence
  Antisense compound
tcagatcttgcctgtttgta

SEQ ID NO: 12237 - DNA, 20 bp, Artificial Sequence
  Antisense compound
ctcagatcttgcctgtttgt

SEQ ID NO: 12238 - DNA, 20 bp, Artificial Sequence
  Antisense compound
cctcagatcttgcctgtttg

SEQ ID NO: 12239 - DNA, 20 bp, Artificial Sequence
  Antisense compound
tcctcagatcttgcctgttt

SEQ ID NO: 12240 - DNA, 20 bp, Artificial Sequence
  Antisense compound
gtcctcagatcttgcctgtt

SEQ ID NO: 12241 - DNA, 20 bp, Artificial Sequence
  Antisense compound
tgtcctcagatcttgcctgt

SEQ ID NO: 12242 - DNA, 20 bp, Artificial Sequence
  Antisense compound
ttgtcctcagatcttgcctg

SEQ ID NO: 12243 - DNA, 20 bp, Artificial Sequence
  Antisense compound
cttgtcctcagatcttgcct

SEQ ID NO: 12244 - DNA, 20 bp, Artificial Sequence
  Antisense compound
tcttgtcctcagatcttgcc

SEQ ID NO: 12245 - DNA, 20 bp, Artificial Sequence
  Antisense compound
ctcttgtcctcagatcttgc

SEQ ID NO: 12246 - DNA, 20 bp, Artificial Sequence
  Antisense compound
cctcttgtcctcagatcttg

SEQ ID NO: 12247 - DNA, 20 bp, Artificial Sequence
  Antisense compound
ccctcttgtcctcagatctt

SEQ ID NO: 12248 - DNA, 20 bp, Artificial Sequence
  Antisense compound
gccctcttgtcctcagatct

SEQ ID NO: 12249 - DNA, 20 bp, Artificial Sequence
  Antisense compound
tgccctcttgtcctcagatc

SEQ ID NO: 12250 - DNA, 20 bp, Artificial Sequence
  Antisense compound
ttgccctcttgtcctcagat

SEQ ID NO: 12251 - DNA, 20 bp, Artificial Sequence
  Antisense compound
tttgccctcttgtcctcaga

SEQ ID NO: 12252 - DNA, 20 bp, Artificial Sequence
  Antisense compound
ttttgccctcttgtcctcag

SEQ ID NO: 12253 - DNA, 20 bp, Artificial Sequence
  Antisense compound
cttttgccctcttgtcctca

SEQ ID NO: 12254 - DNA, 20 bp, Artificial Sequence
  Antisense compound
acttttgccctcttgtcctc

SEQ ID NO: 12255 - DNA, 20 bp, Artificial Sequence
  Antisense compound
tacttttgccctcttgtcct

SEQ ID NO: 12256 - DNA, 20 bp, Artificial Sequence
  Antisense compound
ttacttttgccctcttgtcc

SEQ ID NO: 12257 - DNA, 20 bp, Artificial Sequence
  Antisense compound
gttacttttgccctcttgtc

SEQ ID NO: 12258 - DNA, 20 bp, Artificial Sequence
  Antisense compound
agttacttttgccctcttgt

SEQ ID NO: 12259 - DNA, 20 bp, Artificial Sequence
  Antisense compound
tagttacttttgccctcttg

SEQ ID NO: 12260 - DNA, 20 bp, Artificial Sequence
  Antisense compound
ctagttacttttgccctctt

SEQ ID NO: 12261 - DNA, 20 bp, Artificial Sequence
  Antisense compound
actagttacttttgccctct

SEQ ID NO: 12262 - DNA, 20 bp, Artificial Sequence
  Antisense compound
cactagttacttttgccctc

SEQ ID NO: 12263 - DNA, 20 bp, Artificial Sequence
  Antisense compound
gcactagttacttttgccct

SEQ ID NO: 12264 - DNA, 20 bp, Artificial Sequence
  Antisense compound
agcactagttacttttgccc

SEQ ID NO: 12265 - DNA, 20 bp, Artificial Sequence
  Antisense compound
tagcactagttacttttgcc

SEQ ID NO: 12266 - DNA, 20 bp, Artificial Sequence
  Antisense compound
atagcactagttacttttgc

SEQ ID NO: 12267 - DNA, 20 bp, Artificial Sequence
  Antisense compound
catagcactagttacttttg

SEQ ID NO: 12268 - DNA, 20 bp, Artificial Sequence
  Antisense compound
gcatagcactagttactttt

SEQ ID NO: 12269 - DNA, 20 bp, Artificial Sequence
  Antisense compound
tgcatagcactagttacttt

SEQ ID NO: 12270 - DNA, 20 bp, Artificial Sequence
  Antisense compound
ttgcatagcactagttactt

SEQ ID NO: 12271 - DNA, 20 bp, Artificial Sequence
  Antisense compound
tttgcatagcactagttact

SEQ ID NO: 12272 - DNA, 20 bp, Artificial Sequence
  Antisense compound
gtttgcatagcactagttac

SEQ ID NO: 12273 - DNA, 20 bp, Artificial Sequence
  Antisense compound
tgtttgcatagcactagtta

SEQ ID NO: 12274 - DNA, 20 bp, Artificial Sequence
  Antisense compound
ttgtttgcatagcactagtt

SEQ ID NO: 12275 - DNA, 20 bp, Artificial Sequence
  Antisense compound
attgtttgcatagcactagt

SEQ ID NO: 12276 - DNA, 20 bp, Artificial Sequence
  Antisense compound
cattgtttgcatagcactag

SEQ ID NO: 12277 - DNA, 20 bp, Artificial Sequence
  Antisense compound
gcattgtttgcatagcacta

SEQ ID NO: 12278 - DNA, 20 bp, Artificial Sequence
  Antisense compound
agcattgtttgcatagcact

SEQ ID NO: 12279 - DNA, 20 bp, Artificial Sequence
  Antisense compound
gagcattgtttgcatagcac

SEQ ID NO: 12280 - DNA, 20 bp, Artificial Sequence
  Antisense compound
agagcattgtttgcatagca

SEQ ID NO: 12281 - DNA, 20 bp, Artificial Sequence
  Antisense compound
aagagcattgtttgcatagc

SEQ ID NO: 12282 - DNA, 20 bp, Artificial Sequence
  Antisense compound
gaagagcattgtttgcatag

SEQ ID NO: 12283 - DNA, 20 bp, Artificial Sequence
  Antisense compound
tgaagagcattgtttgcata

SEQ ID NO: 12284 - DNA, 20 bp, Artificial Sequence
  Antisense compound
gtgaagagcattgtttgcat

SEQ ID NO: 12285 - DNA, 20 bp, Artificial Sequence
  Antisense compound
agtgaagagcattgtttgca

SEQ ID NO: 12286 - DNA, 20 bp, Artificial Sequence
  Antisense compound
tagtgaagagcattgtttgc

SEQ ID NO: 12287 - DNA, 20 bp, Artificial Sequence
  Antisense compound
atagtgaagagcattgtttg

SEQ ID NO: 12288 - DNA, 20 bp, Artificial Sequence
  Antisense compound
catagtgaagagcattgttt

SEQ ID NO: 12289 - DNA, 20 bp, Artificial Sequence
  Antisense compound
gcatagtgaagagcattgtt

SEQ ID NO: 12290 - DNA, 20 bp, Artificial Sequence
  Antisense compound
agcatagtgaagagcattgt

SEQ ID NO: 12291 - DNA, 20 bp, Artificial Sequence
  Antisense compound
aagcatagtgaagagcattg

SEQ ID NO: 12292 - DNA, 20 bp, Artificial Sequence
  Antisense compound
taagcatagtgaagagcatt

SEQ ID NO: 12293 - DNA, 20 bp, Artificial Sequence
  Antisense compound
ctaagcatagtgaagagcat

SEQ ID NO: 12294 - DNA, 20 bp, Artificial Sequence
  Antisense compound
cctaagcatagtgaagagca

SEQ ID NO: 12295 - DNA, 20 bp, Artificial Sequence
  Antisense compound
tcctaagcatagtgaagagc

SEQ ID NO: 12296 - DNA, 20 bp, Artificial Sequence
  Antisense compound
ttcctaagcatagtgaagag

SEQ ID NO: 12297 - DNA, 20 bp, Artificial Sequence
  Antisense compound
cttcctaagcatagtgaaga

SEQ ID NO: 12298 - DNA, 20 bp, Artificial Sequence
  Antisense compound
gcttcctaagcatagtgaag

SEQ ID NO: 12299 - DNA, 20 bp, Artificial Sequence
  Antisense compound
agcttcctaagcatagtgaa

SEQ ID NO: 12300 - DNA, 20 bp, Artificial Sequence
  Antisense compound
aagcttcctaagcatagtga

SEQ ID NO: 12301 - DNA, 20 bp, Artificial Sequence
  Antisense compound
caagcttcctaagcatagtg

SEQ ID NO: 12302 - DNA, 20 bp, Artificial Sequence
  Antisense compound
tcaagcttcctaagcatagt

SEQ ID NO: 12303 - DNA, 20 bp, Artificial Sequence
  Antisense compound
atcaagcttcctaagcatag

SEQ ID NO: 12304 - DNA, 20 bp, Artificial Sequence
  Antisense compound
tatcaagcttcctaagcata

SEQ ID NO: 12305 - DNA, 20 bp, Artificial Sequence
  Antisense compound
ttatcaagcttcctaagcat

SEQ ID NO: 12306 - DNA, 20 bp, Artificial Sequence
  Antisense compound
attatcaagcttcctaagca

SEQ ID NO: 12307 - DNA, 20 bp, Artificial Sequence
  Antisense compound
cattatcaagcttcctaagc

SEQ ID NO: 12308 - DNA, 20 bp, Artificial Sequence
  Antisense compound
tcattatcaagcttcctaag

SEQ ID NO: 12309 - DNA, 20 bp, Artificial Sequence
  Antisense compound
atcattatcaagcttcctaa

SEQ ID NO: 12310 - DNA, 20 bp, Artificial Sequence
  Antisense compound
catcattatcaagcttccta

SEQ ID NO: 12311 - DNA, 20 bp, Artificial Sequence
  Antisense compound
gcatcattatcaagcttcct

SEQ ID NO: 12312 - DNA, 20 bp, Artificial Sequence
  Antisense compound
tgcatcattatcaagcttcc

SEQ ID NO: 12313 - DNA, 20 bp, Artificial Sequence
  Antisense compound
gtgcatcattatcaagcttc

SEQ ID NO: 12314 - DNA, 20 bp, Artificial Sequence
  Antisense compound
agtgcatcattatcaagctt

SEQ ID NO: 12315 - DNA, 20 bp, Artificial Sequence
  Antisense compound
aagtgcatcattatcaagct

SEQ ID NO: 12316 - DNA, 20 bp, Artificial Sequence
  Antisense compound
taagtgcatcattatcaagc

SEQ ID NO: 12317 - DNA, 20 bp, Artificial Sequence
  Antisense compound
ttaagtgcatcattatcaag

SEQ ID NO: 12318 - DNA, 20 bp, Artificial Sequence
  Antisense compound
gttaagtgcatcattatcaa

SEQ ID NO: 12319 - DNA, 20 bp, Artificial Sequence
  Antisense compound
tgttaagtgcatcattatca

SEQ ID NO: 12320 - DNA, 20 bp, Artificial Sequence
  Antisense compound
ttgttaagtgcatcattatc

SEQ ID NO: 12321 - DNA, 20 bp, Artificial Sequence
  Antisense compound
gttgttaagtgcatcattat

SEQ ID NO: 12322 - DNA, 20 bp, Artificial Sequence
  Antisense compound
tgttgttaagtgcatcatta

SEQ ID NO: 12323 - DNA, 20 bp, Artificial Sequence
  Antisense compound
atgttgttaagtgcatcatt

SEQ ID NO: 12324 - DNA, 20 bp, Artificial Sequence
  Antisense compound
aatgttgttaagtgcatcat

SEQ ID NO: 12325 - DNA, 20 bp, Artificial Sequence
  Antisense compound
taatgttgttaagtgcatca

SEQ ID NO: 12326 - DNA, 20 bp, Artificial Sequence
  Antisense compound
ataatgttgttaagtgcatc

SEQ ID NO: 12327 - DNA, 20 bp, Artificial Sequence
  Antisense compound
gataatgttgttaagtgcat

SEQ ID NO: 12328 - DNA, 20 bp, Artificial Sequence
  Antisense compound
tgataatgttgttaagtgca

SEQ ID NO: 12329 - DNA, 20 bp, Artificial Sequence
  Antisense compound
ttgataatgttgttaagtgc

SEQ ID NO: 12330 - DNA, 20 bp, Artificial Sequence
  Antisense compound
gttgataatgttgttaagtg

SEQ ID NO: 12331 - DNA, 20 bp, Artificial Sequence
  Antisense compound
tgttgataatgttgttaagt

SEQ ID NO: 12332 - DNA, 20 bp, Artificial Sequence
  Antisense compound
ttgttgataatgttgttaag

SEQ ID NO: 12333 - DNA, 20 bp, Artificial Sequence
  Antisense compound
attgttgataatgttgttaa

SEQ ID NO: 12334 - DNA, 20 bp, Artificial Sequence
  Antisense compound
cattgttgataatgttgtta

SEQ ID NO: 12335 - DNA, 20 bp, Artificial Sequence
  Antisense compound
gcattgttgataatgttgtt

SEQ ID NO: 12336 - DNA, 20 bp, Artificial Sequence
  Antisense compound
cgcattgttgataatgttgt

SEQ ID NO: 12337 - DNA, 20 bp, Artificial Sequence
  Antisense compound
gcgcattgttgataatgttg

SEQ ID NO: 12338 - DNA, 20 bp, Artificial Sequence
  Antisense compound
cgcgcattgttgataatgtt

SEQ ID NO: 12339 - DNA, 20 bp, Artificial Sequence
  Antisense compound
acgcgcattgttgataatgt

SEQ ID NO: 12340 - DNA, 20 bp, Artificial Sequence
  Antisense compound
cacgcgcattgttgataatg

SEQ ID NO: 12341 - DNA, 20 bp, Artificial Sequence
  Antisense compound
tcacgcgcattgttgataat

SEQ ID NO: 12342 - DNA, 20 bp, Artificial Sequence
  Antisense compound
atcacgcgcattgttgataa

SEQ ID NO: 12343 - DNA, 20 bp, Artificial Sequence
  Antisense compound
catcacgcgcattgttgata

SEQ ID NO: 12344 - DNA, 20 bp, Artificial Sequence
  Antisense compound
ccatcacgcgcattgttgat

SEQ ID NO: 12345 - DNA, 20 bp, Artificial Sequence
  Antisense compound
accatcacgcgcattgttga

SEQ ID NO: 12346 - DNA, 20 bp, Artificial Sequence
  Antisense compound
aaccatcacgcgcattgttg

SEQ ID NO: 12347 - DNA, 20 bp, Artificial Sequence
  Antisense compound
caaccatcacgcgcattgtt

SEQ ID NO: 12348 - DNA, 20 bp, Artificial Sequence
  Antisense compound
acaaccatcacgcgcattgt

SEQ ID NO: 12349 - DNA, 20 bp, Artificial Sequence
  Antisense compound
cacaaccatcacgcgcattg

SEQ ID NO: 12350 - DNA, 20 bp, Artificial Sequence
  Antisense compound
acacaaccatcacgcgcatt

SEQ ID NO: 12351 - DNA, 20 bp, Artificial Sequence
  Antisense compound
aacacaaccatcacgcgcat

SEQ ID NO: 12352 - DNA, 20 bp, Artificial Sequence
  Antisense compound
gaacacaaccatcacgcgca

SEQ ID NO: 12353 - DNA, 20 bp, Artificial Sequence
  Antisense compound
ggaacacaaccatcacgcgc

SEQ ID NO: 12354 - DNA, 20 bp, Artificial Sequence
  Antisense compound
tggaacacaaccatcacgcg

SEQ ID NO: 12355 - DNA, 20 bp, Artificial Sequence
  Antisense compound
gtggaacacaaccatcacgc

SEQ ID NO: 12356 - DNA, 20 bp, Artificial Sequence
  Antisense compound
agtggaacacaaccatcacg

SEQ ID NO: 12357 - DNA, 20 bp, Artificial Sequence
  Antisense compound
gagtggaacacaaccatcac

SEQ ID NO: 12358 - DNA, 20 bp, Artificial Sequence
  Antisense compound
tgagtggaacacaaccatca

SEQ ID NO: 12359 - DNA, 20 bp, Artificial Sequence
  Antisense compound
ttgagtggaacacaaccatc

SEQ ID NO: 12360 - DNA, 20 bp, Artificial Sequence
  Antisense compound
gttgagtggaacacaaccat

SEQ ID NO: 12361 - DNA, 20 bp, Artificial Sequence
  Antisense compound
tgttgagtggaacacaacca

SEQ ID NO: 12362 - DNA, 20 bp, Artificial Sequence
  Antisense compound
atgttgagtggaacacaacc

SEQ ID NO: 12363 - DNA, 20 bp, Artificial Sequence
  Antisense compound
gatgttgagtggaacacaac

SEQ ID NO: 12364 - DNA, 20 bp, Artificial Sequence
  Antisense compound
tgatgttgagtggaacacaa

SEQ ID NO: 12365 - DNA, 20 bp, Artificial Sequence
  Antisense compound
atgatgttgagtggaacaca

SEQ ID NO: 12366 - DNA, 20 bp, Artificial Sequence
  Antisense compound
tatgatgttgagtggaacac

SEQ ID NO: 12367 - DNA, 20 bp, Artificial Sequence
  Antisense compound
gtatgatgttgagtggaaca

SEQ ID NO: 12368 - DNA, 20 bp, Artificial Sequence
  Antisense compound
ggtatgatgttgagtggaac

SEQ ID NO: 12369 - DNA, 20 bp, Artificial Sequence
  Antisense compound
tggtatgatgttgagtggaa

SEQ ID NO: 12370 - DNA, 20 bp, Artificial Sequence
  Antisense compound
atggtatgatgttgagtgga

SEQ ID NO: 12371 - DNA, 20 bp, Artificial Sequence
  Antisense compound
aatggtatgatgttgagtgg

SEQ ID NO: 12372 - DNA, 20 bp, Artificial Sequence
  Antisense compound
caatggtatgatgttgagtg

SEQ ID NO: 12373 - DNA, 20 bp, Artificial Sequence
  Antisense compound
tcaatggtatgatgttgagt

SEQ ID NO: 12374 - DNA, 20 bp, Artificial Sequence
  Antisense compound
gtcaatggtatgatgttgag

SEQ ID NO: 12375 - DNA, 20 bp, Artificial Sequence
  Antisense compound
agtcaatggtatgatgttga

SEQ ID NO: 12376 - DNA, 20 bp, Artificial Sequence
  Antisense compound
tagtcaatggtatgatgttg

SEQ ID NO: 12377 - DNA, 20 bp, Artificial Sequence
  Antisense compound
gtagtcaatggtatgatgtt

SEQ ID NO: 12378 - DNA, 20 bp, Artificial Sequence
  Antisense compound
tgtagtcaatggtatgatgt

SEQ ID NO: 12379 - DNA, 20 bp, Artificial Sequence
  Antisense compound
ctgtagtcaatggtatgatg

SEQ ID NO: 12380 - DNA, 20 bp, Artificial Sequence
  Antisense compound
gctgtagtcaatggtatgat

SEQ ID NO: 12381 - DNA, 20 bp, Artificial Sequence
  Antisense compound
tgctgtagtcaatggtatga

SEQ ID NO: 12382 - DNA, 20 bp, Artificial Sequence
  Antisense compound
ctgctgtagtcaatggtatg

SEQ ID NO: 12383 - DNA, 20 bp, Artificial Sequence
  Antisense compound
gctgctgtagtcaatggtat

SEQ ID NO: 12384 - DNA, 20 bp, Artificial Sequence
  Antisense compound
ggctgctgtagtcaatggta

SEQ ID NO: 12385 - DNA, 20 bp, Artificial Sequence
  Antisense compound
tggctgctgtagtcaatggt

SEQ ID NO: 12386 - DNA, 20 bp, Artificial Sequence
  Antisense compound
ttggctgctgtagtcaatgg

SEQ ID NO: 12387 - DNA, 20 bp, Artificial Sequence
  Antisense compound
tttggctgctgtagtcaatg

SEQ ID NO: 12388 - DNA, 20 bp, Artificial Sequence
  Antisense compound
gtttggctgctgtagtcaat

SEQ ID NO: 12389 - DNA, 20 bp, Artificial Sequence
  Antisense compound
agtttggctgctgtagtcaa

SEQ ID NO: 12390 - DNA, 20 bp, Artificial Sequence
  Antisense compound
gagtttggctgctgtagtca

SEQ ID NO: 12391 - DNA, 20 bp, Artificial Sequence
  Antisense compound
tgagtttggctgctgtagtc

SEQ ID NO: 12392 - DNA, 20 bp, Artificial Sequence
  Antisense compound
atgagtttggctgctgtagt

SEQ ID NO: 12393 - DNA, 20 bp, Artificial Sequence
  Antisense compound
catgagtttggctgctgtag

SEQ ID NO: 12394 - DNA, 20 bp, Artificial Sequence
  Antisense compound
ccatgagtttggctgctgta

SEQ ID NO: 12395 - DNA, 20 bp, Artificial Sequence
  Antisense compound
accatgagtttggctgctgt

SEQ ID NO: 12396 - DNA, 20 bp, Artificial Sequence
  Antisense compound
aaccatgagtttggctgctg

SEQ ID NO: 12397 - DNA, 20 bp, Artificial Sequence
  Antisense compound
caaccatgagtttggctgct

SEQ ID NO: 12398 - DNA, 20 bp, Artificial Sequence
  Antisense compound
acaaccatgagtttggctgc

SEQ ID NO: 12399 - DNA, 20 bp, Artificial Sequence
  Antisense compound
aacaaccatgagtttggctg

SEQ ID NO: 12400 - DNA, 20 bp, Artificial Sequence
  Antisense compound
caacaaccatgagtttggct

SEQ ID NO: 12401 - DNA, 20 bp, Artificial Sequence
  Antisense compound
acaacaaccatgagtttggc

SEQ ID NO: 12402 - DNA, 20 bp, Artificial Sequence
  Antisense compound
gacaacaaccatgagtttgg

SEQ ID NO: 12403 - DNA, 20 bp, Artificial Sequence
  Antisense compound
ggacaacaaccatgagtttg

SEQ ID NO: 12404 - DNA, 20 bp, Artificial Sequence
  Antisense compound
gggacaacaaccatgagttt

SEQ ID NO: 12405 - DNA, 20 bp, Artificial Sequence
  Antisense compound
agggacaacaaccatgagtt

SEQ ID NO: 12406 - DNA, 20 bp, Artificial Sequence
  Antisense compound
cagggacaacaaccatgagt

SEQ ID NO: 12407 - DNA, 20 bp, Artificial Sequence
  Antisense compound
tcagggacaacaaccatgag

SEQ ID NO: 12408 - DNA, 20 bp, Artificial Sequence
  Antisense compound
atcagggacaacaaccatga

SEQ ID NO: 12409 - DNA, 20 bp, Artificial Sequence
  Antisense compound
aatcagggacaacaaccatg

SEQ ID NO: 12410 - DNA, 20 bp, Artificial Sequence
  Antisense compound
taatcagggacaacaaccat

SEQ ID NO: 12411 - DNA, 20 bp, Artificial Sequence
  Antisense compound
ataatcagggacaacaacca

SEQ ID NO: 12412 - DNA, 20 bp, Artificial Sequence
  Antisense compound
cataatcagggacaacaacc

SEQ ID NO: 12413 - DNA, 20 bp, Artificial Sequence
  Antisense compound
ccataatcagggacaacaac

SEQ ID NO: 12414 - DNA, 20 bp, Artificial Sequence
  Antisense compound
accataatcagggacaacaa

SEQ ID NO: 12415 - DNA, 20 bp, Artificial Sequence
  Antisense compound
taccataatcagggacaaca

SEQ ID NO: 12416 - DNA, 20 bp, Artificial Sequence
  Antisense compound
gtaccataatcagggacaac

SEQ ID NO: 12417 - DNA, 20 bp, Artificial Sequence
  Antisense compound
ggtaccataatcagggacaa

SEQ ID NO: 12418 - DNA, 20 bp, Artificial Sequence
  Antisense compound
aggtaccataatcagggaca

SEQ ID NO: 12419 - DNA, 20 bp, Artificial Sequence
  Antisense compound
taggtaccataatcagggac

SEQ ID NO: 12420 - DNA, 20 bp, Artificial Sequence
  Antisense compound
gtaggtaccataatcaggga

SEQ ID NO: 12421 - DNA, 20 bp, Artificial Sequence
  Antisense compound
tgtaggtaccataatcaggg

SEQ ID NO: 12422 - DNA, 20 bp, Artificial Sequence
  Antisense compound
ttgtaggtaccataatcagg

SEQ ID NO: 12423 - DNA, 20 bp, Artificial Sequence
  Antisense compound
cttgtaggtaccataatcag

SEQ ID NO: 12424 - DNA, 20 bp, Artificial Sequence
  Antisense compound
tcttgtaggtaccataatca

SEQ ID NO: 12425 - DNA, 20 bp, Artificial Sequence
  Antisense compound
ttcttgtaggtaccataatc

SEQ ID NO: 12426 - DNA, 20 bp, Artificial Sequence
  Antisense compound
gttcttgtaggtaccataat

SEQ ID NO: 12427 - DNA, 20 bp, Artificial Sequence
  Antisense compound
tgttcttgtaggtaccataa

SEQ ID NO: 12428 - DNA, 20 bp, Artificial Sequence
  Antisense compound
gtgttcttgtaggtaccata

SEQ ID NO: 12429 - DNA, 20 bp, Artificial Sequence
  Antisense compound
agtgttcttgtaggtaccat

SEQ ID NO: 12430 - DNA, 20 bp, Artificial Sequence
  Antisense compound
aagtgttcttgtaggtacca

SEQ ID NO: 12431 - DNA, 20 bp, Artificial Sequence
  Antisense compound
caagtgttcttgtaggtacc

SEQ ID NO: 12432 - DNA, 20 bp, Artificial Sequence
  Antisense compound
acaagtgttcttgtaggtac

SEQ ID NO: 12433 - DNA, 20 bp, Artificial Sequence
  Antisense compound
cacaagtgttcttgtaggta

SEQ ID NO: 12434 - DNA, 20 bp, Artificial Sequence
  Antisense compound
tcacaagtgttcttgtaggt

SEQ ID NO: 12435 - DNA, 20 bp, Artificial Sequence
  Antisense compound
atcacaagtgttcttgtagg

SEQ ID NO: 12436 - DNA, 20 bp, Artificial Sequence
  Antisense compound
catcacaagtgttcttgtag

SEQ ID NO: 12437 - DNA, 20 bp, Artificial Sequence
  Antisense compound
ccatcacaagtgttcttgta

SEQ ID NO: 12438 - DNA, 20 bp, Artificial Sequence
  Antisense compound
accatcacaagtgttcttgt

SEQ ID NO: 12439 - DNA, 20 bp, Artificial Sequence
  Antisense compound
taccatcacaagtgttcttg

SEQ ID NO: 12440 - DNA, 20 bp, Artificial Sequence
  Antisense compound
ttaccatcacaagtgttctt

SEQ ID NO: 12441 - DNA, 20 bp, Artificial Sequence
  Antisense compound
gttaccatcacaagtgttct

SEQ ID NO: 12442 - DNA, 20 bp, Artificial Sequence
  Antisense compound
tgttaccatcacaagtgttc

SEQ ID NO: 12443 - DNA, 20 bp, Artificial Sequence
  Antisense compound
gtgttaccatcacaagtgtt

SEQ ID NO: 12444 - DNA, 20 bp, Artificial Sequence
  Antisense compound
ggtgttaccatcacaagtgt

SEQ ID NO: 12445 - DNA, 20 bp, Artificial Sequence
  Antisense compound
aggtgttaccatcacaagtg

SEQ ID NO: 12446 - DNA, 20 bp, Artificial Sequence
  Antisense compound
aaggtgttaccatcacaagt

SEQ ID NO: 12447 - DNA, 20 bp, Artificial Sequence
  Antisense compound
aaaggtgttaccatcacaag

SEQ ID NO: 12448 - DNA, 20 bp, Artificial Sequence
  Antisense compound
taaaggtgttaccatcacaa

SEQ ID NO: 12449 - DNA, 20 bp, Artificial Sequence
  Antisense compound
gtaaaggtgttaccatcaca

SEQ ID NO: 12450 - DNA, 20 bp, Artificial Sequence
  Antisense compound
tgtaaaggtgttaccatcac

SEQ ID NO: 12451 - DNA, 20 bp, Artificial Sequence
  Antisense compound
atgtaaaggtgttaccatca

SEQ ID NO: 12452 - DNA, 20 bp, Artificial Sequence
  Antisense compound
tatgtaaaggtgttaccatc

SEQ ID NO: 12453 - DNA, 20 bp, Artificial Sequence
  Antisense compound
atatgtaaaggtgttaccat

SEQ ID NO: 12454 - DNA, 20 bp, Artificial Sequence
  Antisense compound
catatgtaaaggtgttacca

SEQ ID NO: 12455 - DNA, 20 bp, Artificial Sequence
  Antisense compound
gcatatgtaaaggtgttacc

SEQ ID NO: 12456 - DNA, 20 bp, Artificial Sequence
  Antisense compound
tgcatatgtaaaggtgttac

SEQ ID NO: 12457 - DNA, 20 bp, Artificial Sequence
  Antisense compound
atgcatatgtaaaggtgtta

SEQ ID NO: 12458 - DNA, 20 bp, Artificial Sequence
  Antisense compound
gatgcatatgtaaaggtgtt

SEQ ID NO: 12459 - DNA, 20 bp, Artificial Sequence
  Antisense compound
agatgcatatgtaaaggtgt

SEQ ID NO: 12460 - DNA, 20 bp, Artificial Sequence
  Antisense compound
cagatgcatatgtaaaggtg

SEQ ID NO: 12461 - DNA, 20 bp, Artificial Sequence
  Antisense compound
gcagatgcatatgtaaaggt

SEQ ID NO: 12462 - DNA, 20 bp, Artificial Sequence
  Antisense compound
tgcagatgcatatgtaaagg

SEQ ID NO: 12463 - DNA, 20 bp, Artificial Sequence
  Antisense compound
gtgcagatgcatatgtaaag

SEQ ID NO: 12464 - DNA, 20 bp, Artificial Sequence
  Antisense compound
agtgcagatgcatatgtaaa

SEQ ID NO: 12465 - DNA, 20 bp, Artificial Sequence
  Antisense compound
gagtgcagatgcatatgtaa

SEQ ID NO: 12466 - DNA, 20 bp, Artificial Sequence
  Antisense compound
agagtgcagatgcatatgta

SEQ ID NO: 12467 - DNA, 20 bp, Artificial Sequence
  Antisense compound
cagagtgcagatgcatatgt

SEQ ID NO: 12468 - DNA, 20 bp, Artificial Sequence
  Antisense compound
ccagagtgcagatgcatatg

SEQ ID NO: 12469 - DNA, 20 bp, Artificial Sequence
  Antisense compound
cccagagtgcagatgcatat

SEQ ID NO: 12470 - DNA, 20 bp, Artificial Sequence
  Antisense compound
tcccagagtgcagatgcata

SEQ ID NO: 12471 - DNA, 20 bp, Artificial Sequence
  Antisense compound
ttcccagagtgcagatgcat

SEQ ID NO: 12472 - DNA, 20 bp, Artificial Sequence
  Antisense compound
tttcccagagtgcagatgca

SEQ ID NO: 12473 - DNA, 20 bp, Artificial Sequence
  Antisense compound
atttcccagagtgcagatgc

SEQ ID NO: 12474 - DNA, 20 bp, Artificial Sequence
  Antisense compound
gatttcccagagtgcagatg

SEQ ID NO: 12475 - DNA, 20 bp, Artificial Sequence
  Antisense compound
ggatttcccagagtgcagat

SEQ ID NO: 12476 - DNA, 20 bp, Artificial Sequence
  Antisense compound
tggatttcccagagtgcaga

SEQ ID NO: 12477 - DNA, 20 bp, Artificial Sequence
  Antisense compound
ctggatttcccagagtgcag

SEQ ID NO: 12478 - DNA, 20 bp, Artificial Sequence
  Antisense compound
gctggatttcccagagtgca

SEQ ID NO: 12479 - DNA, 20 bp, Artificial Sequence
  Antisense compound
tgctggatttcccagagtgc

SEQ ID NO: 12480 - DNA, 20 bp, Artificial Sequence
  Antisense compound
ttgctggatttcccagagtg

SEQ ID NO: 12481 - DNA, 20 bp, Artificial Sequence
  Antisense compound
cttgctggatttcccagagt

SEQ ID NO: 12482 - DNA, 20 bp, Artificial Sequence
  Antisense compound
acttgctggatttcccagag

SEQ ID NO: 12483 - DNA, 20 bp, Artificial Sequence
  Antisense compound
aacttgctggatttcccaga

SEQ ID NO: 12484 - DNA, 20 bp, Artificial Sequence
  Antisense compound
caacttgctggatttcccag

SEQ ID NO: 12485 - DNA, 20 bp, Artificial Sequence
  Antisense compound
acaacttgctggatttccca

SEQ ID NO: 12486 - DNA, 20 bp, Artificial Sequence
  Antisense compound
aacaacttgctggatttccc

SEQ ID NO: 12487 - DNA, 20 bp, Artificial Sequence
  Antisense compound
caacaacttgctggatttcc

SEQ ID NO: 12488 - DNA, 20 bp, Artificial Sequence
  Antisense compound
tcaacaacttgctggatttc

SEQ ID NO: 12489 - DNA, 20 bp, Artificial Sequence
  Antisense compound
atcaacaacttgctggattt

SEQ ID NO: 12490 - DNA, 20 bp, Artificial Sequence
  Antisense compound
catcaacaacttgctggatt

SEQ ID NO: 12491 - DNA, 20 bp, Artificial Sequence
  Antisense compound
gcatcaacaacttgctggat

SEQ ID NO: 12492 - DNA, 20 bp, Artificial Sequence
  Antisense compound
cgcatcaacaacttgctgga

SEQ ID NO: 12493 - DNA, 20 bp, Artificial Sequence
  Antisense compound
ccgcatcaacaacttgctgg

SEQ ID NO: 12494 - DNA, 20 bp, Artificial Sequence
  Antisense compound
tccgcatcaacaacttgctg

SEQ ID NO: 12495 - DNA, 20 bp, Artificial Sequence
  Antisense compound
atccgcatcaacaacttgct

SEQ ID NO: 12496 - DNA, 20 bp, Artificial Sequence
  Antisense compound
tatccgcatcaacaacttgc

SEQ ID NO: 12497 - DNA, 20 bp, Artificial Sequence
  Antisense compound
ctatccgcatcaacaacttg

SEQ ID NO: 12498 - DNA, 20 bp, Artificial Sequence
  Antisense compound
gctatccgcatcaacaactt

SEQ ID NO: 12499 - DNA, 20 bp, Artificial Sequence
  Antisense compound
tgctatccgcatcaacaact

SEQ ID NO: 12500 - DNA, 20 bp, Artificial Sequence
  Antisense compound
ttgctatccgcatcaacaac

SEQ ID NO: 12501 - DNA, 20 bp, Artificial Sequence
  Antisense compound
cttgctatccgcatcaacaa

SEQ ID NO: 12502 - DNA, 20 bp, Artificial Sequence
  Antisense compound
tcttgctatccgcatcaaca

SEQ ID NO: 12503 - DNA, 20 bp, Artificial Sequence
  Antisense compound
atcttgctatccgcatcaac

SEQ ID NO: 12504 - DNA, 20 bp, Artificial Sequence
  Antisense compound
aatcttgctatccgcatcaa

SEQ ID NO: 12505 - DNA, 20 bp, Artificial Sequence
  Antisense compound
caatcttgctatccgcatca

SEQ ID NO: 12506 - DNA, 20 bp, Artificial Sequence
  Antisense compound
acaatcttgctatccgcatc

SEQ ID NO: 12507 - DNA, 20 bp, Artificial Sequence
  Antisense compound
aacaatcttgctatccgcat

SEQ ID NO: 12508 - DNA, 20 bp, Artificial Sequence
  Antisense compound
gaacaatcttgctatccgca

SEQ ID NO: 12509 - DNA, 20 bp, Artificial Sequence
  Antisense compound
tgaacaatcttgctatccgc

SEQ ID NO: 12510 - DNA, 20 bp, Artificial Sequence
  Antisense compound
ttgaacaatcttgctatccg

SEQ ID NO: 12511 - DNA, 20 bp, Artificial Sequence
  Antisense compound
gttgaacaatcttgctatcc

SEQ ID NO: 12512 - DNA, 20 bp, Artificial Sequence
  Antisense compound
agttgaacaatcttgctatc

SEQ ID NO: 12513 - DNA, 20 bp, Artificial Sequence
  Antisense compound
aagttgaacaatcttgctat

SEQ ID NO: 12514 - DNA, 20 bp, Artificial Sequence
  Antisense compound
taagttgaacaatcttgcta

SEQ ID NO: 12515 - DNA, 20 bp, Artificial Sequence
  Antisense compound
ctaagttgaacaatcttgct

SEQ ID NO: 12516 - DNA, 20 bp, Artificial Sequence
  Antisense compound
actaagttgaacaatcttgc

SEQ ID NO: 12517 - DNA, 20 bp, Artificial Sequence
  Antisense compound
cactaagttgaacaatcttg

SEQ ID NO: 12518 - DNA, 20 bp, Artificial Sequence
  Antisense compound
tcactaagttgaacaatctt

SEQ ID NO: 12519 - DNA, 20 bp, Artificial Sequence
  Antisense compound
ttcactaagttgaacaatct

SEQ ID NO: 12520 - DNA, 20 bp, Artificial Sequence
  Antisense compound
tttcactaagttgaacaatc

SEQ ID NO: 12521 - DNA, 20 bp, Artificial Sequence
  Antisense compound
atttcactaagttgaacaat

SEQ ID NO: 12522 - DNA, 20 bp, Artificial Sequence
  Antisense compound
aatttcactaagttgaacaa

SEQ ID NO: 12523 - DNA, 20 bp, Artificial Sequence
  Antisense compound
taatttcactaagttgaaca

SEQ ID NO: 12524 - DNA, 20 bp, Artificial Sequence
  Antisense compound
ttaatttcactaagttgaac

SEQ ID NO: 12525 - DNA, 20 bp, Artificial Sequence
  Antisense compound
gttaatttcactaagttgaa

SEQ ID NO: 12526 - DNA, 20 bp, Artificial Sequence
  Antisense compound
tgttaatttcactaagttga

SEQ ID NO: 12527 - DNA, 20 bp, Artificial Sequence
  Antisense compound
atgttaatttcactaagttg

SEQ ID NO: 12528 - DNA, 20 bp, Artificial Sequence
  Antisense compound
catgttaatttcactaagtt

SEQ ID NO: 12529 - DNA, 20 bp, Artificial Sequence
  Antisense compound
ccatgttaatttcactaagt

SEQ ID NO: 12530 - DNA, 20 bp, Artificial Sequence
  Antisense compound
tccatgttaatttcactaag

SEQ ID NO: 12531 - DNA, 20 bp, Artificial Sequence
  Antisense compound
gtccatgttaatttcactaa

SEQ ID NO: 12532 - DNA, 20 bp, Artificial Sequence
  Antisense compound
tgtccatgttaatttcacta

SEQ ID NO: 12533 - DNA, 20 bp, Artificial Sequence
  Antisense compound
ttgtccatgttaatttcact

SEQ ID NO: 12534 - DNA, 20 bp, Artificial Sequence
  Antisense compound
attgtccatgttaatttcac

SEQ ID NO: 12535 - DNA, 20 bp, Artificial Sequence
  Antisense compound
aattgtccatgttaatttca

SEQ ID NO: 12536 - DNA, 20 bp, Artificial Sequence
  Antisense compound
gaattgtccatgttaatttc

SEQ ID NO: 12537 - DNA, 20 bp, Artificial Sequence
  Antisense compound
tgaattgtccatgttaattt

SEQ ID NO: 12538 - DNA, 20 bp, Artificial Sequence
  Antisense compound
gtgaattgtccatgttaatt

SEQ ID NO: 12539 - DNA, 20 bp, Artificial Sequence
  Antisense compound
ggtgaattgtccatgttaat

SEQ ID NO: 12540 - DNA, 20 bp, Artificial Sequence
  Antisense compound
tggtgaattgtccatgttaa

SEQ ID NO: 12541 - DNA, 20 bp, Artificial Sequence
  Antisense compound
ttggtgaattgtccatgtta

SEQ ID NO: 12542 - DNA, 20 bp, Artificial Sequence
  Antisense compound
tttggtgaattgtccatgtt

SEQ ID NO: 12543 - DNA, 20 bp, Artificial Sequence
  Antisense compound
atttggtgaattgtccatgt

SEQ ID NO: 12544 - DNA, 20 bp, Artificial Sequence
  Antisense compound
aatttggtgaattgtccatg

SEQ ID NO: 12545 - DNA, 20 bp, Artificial Sequence
  Antisense compound
aaatttggtgaattgtccat

SEQ ID NO: 12546 - DNA, 20 bp, Artificial Sequence
  Antisense compound
caaatttggtgaattgtcca

SEQ ID NO: 12547 - DNA, 20 bp, Artificial Sequence
  Antisense compound
ccaaatttggtgaattgtcc

SEQ ID NO: 12548 - DNA, 20 bp, Artificial Sequence
  Antisense compound
gccaaatttggtgaattgtc

SEQ ID NO: 12549 - DNA, 20 bp, Artificial Sequence
  Antisense compound
agccaaatttggtgaattgt

SEQ ID NO: 12550 - DNA, 20 bp, Artificial Sequence
  Antisense compound
aagccaaatttggtgaattg

SEQ ID NO: 12551 - DNA, 20 bp, Artificial Sequence
  Antisense compound
caagccaaatttggtgaatt

SEQ ID NO: 12552 - DNA, 20 bp, Artificial Sequence
  Antisense compound
ccaagccaaatttggtgaat

SEQ ID NO: 12553 - DNA, 20 bp, Artificial Sequence
  Antisense compound
gccaagccaaatttggtgaa

SEQ ID NO: 12554 - DNA, 20 bp, Artificial Sequence
  Antisense compound
ggccaagccaaatttggtga

SEQ ID NO: 12555 - DNA, 20 bp, Artificial Sequence
  Antisense compound
aggccaagccaaatttggtg

SEQ ID NO: 12556 - DNA, 20 bp, Artificial Sequence
  Antisense compound
gaggccaagccaaatttggt

SEQ ID NO: 12557 - DNA, 20 bp, Artificial Sequence
  Antisense compound
agaggccaagccaaatttgg

SEQ ID NO: 12558 - DNA, 20 bp, Artificial Sequence
  Antisense compound
aagaggccaagccaaatttg

SEQ ID NO: 12559 - DNA, 20 bp, Artificial Sequence
  Antisense compound
taagaggccaagccaaattt

SEQ ID NO: 12560 - DNA, 20 bp, Artificial Sequence
  Antisense compound
ataagaggccaagccaaatt

SEQ ID NO: 12561 - DNA, 20 bp, Artificial Sequence
  Antisense compound
aataagaggccaagccaaat

SEQ ID NO: 12562 - DNA, 20 bp, Artificial Sequence
  Antisense compound
caataagaggccaagccaaa

SEQ ID NO: 12563 - DNA, 20 bp, Artificial Sequence
  Antisense compound
acaataagaggccaagccaa

SEQ ID NO: 12564 - DNA, 20 bp, Artificial Sequence
  Antisense compound
aacaataagaggccaagcca

SEQ ID NO: 12565 - DNA, 20 bp, Artificial Sequence
  Antisense compound
taacaataagaggccaagcc

SEQ ID NO: 12566 - DNA, 20 bp, Artificial Sequence
  Antisense compound
gtaacaataagaggccaagc

SEQ ID NO: 12567 - DNA, 20 bp, Artificial Sequence
  Antisense compound
tgtaacaataagaggccaag

SEQ ID NO: 12568 - DNA, 20 bp, Artificial Sequence
  Antisense compound
ctgtaacaataagaggccaa

SEQ ID NO: 12569 - DNA, 20 bp, Artificial Sequence
  Antisense compound
gctgtaacaataagaggcca

SEQ ID NO: 12570 - DNA, 20 bp, Artificial Sequence
  Antisense compound
agctgtaacaataagaggcc

SEQ ID NO: 12571 - DNA, 20 bp, Artificial Sequence
  Antisense compound
gagctgtaacaataagaggc

SEQ ID NO: 12572 - DNA, 20 bp, Artificial Sequence
  Antisense compound
agagctgtaacaataagagg

SEQ ID NO: 12573 - DNA, 20 bp, Artificial Sequence
  Antisense compound
tagagctgtaacaataagag

SEQ ID NO: 12574 - DNA, 20 bp, Artificial Sequence
  Antisense compound
ttagagctgtaacaataaga

SEQ ID NO: 12575 - DNA, 20 bp, Artificial Sequence
  Antisense compound
cttagagctgtaacaataag

SEQ ID NO: 12576 - DNA, 20 bp, Artificial Sequence
  Antisense compound
tcttagagctgtaacaataa

SEQ ID NO: 12577 - DNA, 20 bp, Artificial Sequence
  Antisense compound
ctcttagagctgtaacaata

SEQ ID NO: 12578 - DNA, 20 bp, Artificial Sequence
  Antisense compound
gctcttagagctgtaacaat

SEQ ID NO: 12579 - DNA, 20 bp, Artificial Sequence
  Antisense compound
ggctcttagagctgtaacaa

SEQ ID NO: 12580 - DNA, 20 bp, Artificial Sequence
  Antisense compound
tggctcttagagctgtaaca

SEQ ID NO: 12581 - DNA, 20 bp, Artificial Sequence
  Antisense compound
ttggctcttagagctgtaac

SEQ ID NO: 12582 - DNA, 20 bp, Artificial Sequence
  Antisense compound
gttggctcttagagctgtaa

SEQ ID NO: 12583 - DNA, 20 bp, Artificial Sequence
  Antisense compound
agttggctcttagagctgta

SEQ ID NO: 12584 - DNA, 20 bp, Artificial Sequence
  Antisense compound
gagttggctcttagagctgt

SEQ ID NO: 12585 - DNA, 20 bp, Artificial Sequence
  Antisense compound
tgagttggctcttagagctg

SEQ ID NO: 12586 - DNA, 20 bp, Artificial Sequence
  Antisense compound
ctgagttggctcttagagct

SEQ ID NO: 12587 - DNA, 20 bp, Artificial Sequence
  Antisense compound
gctgagttggctcttagagc

SEQ ID NO: 12588 - DNA, 20 bp, Artificial Sequence
  Antisense compound
agctgagttggctcttagag

SEQ ID NO: 12589 - DNA, 20 bp, Artificial Sequence
  Antisense compound
cagctgagttggctcttaga

SEQ ID NO: 12590 - DNA, 20 bp, Artificial Sequence
  Antisense compound
acagctgagttggctcttag

SEQ ID NO: 12591 - DNA, 20 bp, Artificial Sequence
  Antisense compound
aacagctgagttggctctta

SEQ ID NO: 12592 - DNA, 20 bp, Artificial Sequence
  Antisense compound
taacagctgagttggctctt

SEQ ID NO: 12593 - DNA, 20 bp, Artificial Sequence
  Antisense compound
ttaacagctgagttggctct

SEQ ID NO: 12594 - DNA, 20 bp, Artificial Sequence
  Antisense compound
tttaacagctgagttggctc

SEQ ID NO: 12595 - DNA, 20 bp, Artificial Sequence
  Antisense compound
gtttaacagctgagttggct

SEQ ID NO: 12596 - DNA, 20 bp, Artificial Sequence
  Antisense compound
agtttaacagctgagttggc

SEQ ID NO: 12597 - DNA, 20 bp, Artificial Sequence
  Antisense compound
tagtttaacagctgagttgg

SEQ ID NO: 12598 - DNA, 20 bp, Artificial Sequence
  Antisense compound
gtagtttaacagctgagttg

SEQ ID NO: 12599 - DNA, 20 bp, Artificial Sequence
  Antisense compound
tgtagtttaacagctgagtt

SEQ ID NO: 12600 - DNA, 20 bp, Artificial Sequence
  Antisense compound
ctgtagtttaacagctgagt

SEQ ID NO: 12601 - DNA, 20 bp, Artificial Sequence
  Antisense compound
tctgtagtttaacagctgag

SEQ ID NO: 12602 - DNA, 20 bp, Artificial Sequence
  Antisense compound
ttctgtagtttaacagctga

SEQ ID NO: 12603 - DNA, 20 bp, Artificial Sequence
  Antisense compound
attctgtagtttaacagctg

SEQ ID NO: 12604 - DNA, 20 bp, Artificial Sequence
  Antisense compound
tattctgtagtttaacagct

SEQ ID NO: 12605 - DNA, 20 bp, Artificial Sequence
  Antisense compound
ttattctgtagtttaacagc

SEQ ID NO: 12606 - DNA, 20 bp, Artificial Sequence
  Antisense compound
attattctgtagtttaacag

SEQ ID NO: 12607 - DNA, 20 bp, Artificial Sequence
  Antisense compound
cattattctgtagtttaaca

SEQ ID NO: 12608 - DNA, 20 bp, Artificial Sequence
  Antisense compound
tcattattctgtagtttaac

SEQ ID NO: 12609 - DNA, 20 bp, Artificial Sequence
  Antisense compound
ttcattattctgtagtttaa

SEQ ID NO: 12610 - DNA, 20 bp, Artificial Sequence
  Antisense compound
gttcattattctgtagttta

SEQ ID NO: 12611 - DNA, 20 bp, Artificial Sequence
  Antisense compound
agttcattattctgtagttt

SEQ ID NO: 12612 - DNA, 20 bp, Artificial Sequence
  Antisense compound
cagttcattattctgtagtt

SEQ ID NO: 12613 - DNA, 20 bp, Artificial Sequence
  Antisense compound
tcagttcattattctgtagt

SEQ ID NO: 12614 - DNA, 20 bp, Artificial Sequence
  Antisense compound
ctcagttcattattctgtag

SEQ ID NO: 12615 - DNA, 20 bp, Artificial Sequence
  Antisense compound
actcagttcattattctgta

SEQ ID NO: 12616 - DNA, 20 bp, Artificial Sequence
  Antisense compound
gactcagttcattattctgt

SEQ ID NO: 12617 - DNA, 20 bp, Artificial Sequence
  Antisense compound
ggactcagttcattattctg

SEQ ID NO: 12618 - DNA, 20 bp, Artificial Sequence
  Antisense compound
tggactcagttcattattct

SEQ ID NO: 12619 - DNA, 20 bp, Artificial Sequence
  Antisense compound
ctggactcagttcattattc

SEQ ID NO: 12620 - DNA, 20 bp, Artificial Sequence
  Antisense compound
actggactcagttcattatt

SEQ ID NO: 12621 - DNA, 20 bp, Artificial Sequence
  Antisense compound
tactggactcagttcattat

SEQ ID NO: 12622 - DNA, 20 bp, Artificial Sequence
  Antisense compound
ctactggactcagttcatta

SEQ ID NO: 12623 - DNA, 20 bp, Artificial Sequence
  Antisense compound
gctactggactcagttcatt

SEQ ID NO: 12624 - DNA, 20 bp, Artificial Sequence
  Antisense compound
tgctactggactcagttcat

SEQ ID NO: 12625 - DNA, 20 bp, Artificial Sequence
  Antisense compound
gtgctactggactcagttca

SEQ ID NO: 12626 - DNA, 20 bp, Artificial Sequence
  Antisense compound
agtgctactggactcagttc

SEQ ID NO: 12627 - DNA, 20 bp, Artificial Sequence
  Antisense compound
tagtgctactggactcagtt

SEQ ID NO: 12628 - DNA, 20 bp, Artificial Sequence
  Antisense compound
gtagtgctactggactcagt

SEQ ID NO: 12629 - DNA, 20 bp, Artificial Sequence
  Antisense compound
cgtagtgctactggactcag

SEQ ID NO: 12630 - DNA, 20 bp, Artificial Sequence
  Antisense compound
tcgtagtgctactggactca

SEQ ID NO: 12631 - DNA, 20 bp, Artificial Sequence
  Antisense compound
gtcgtagtgctactggactc

SEQ ID NO: 12632 - DNA, 20 bp, Artificial Sequence
  Antisense compound
tgtcgtagtgctactggact

SEQ ID NO: 12633 - DNA, 20 bp, Artificial Sequence
  Antisense compound
ctgtcgtagtgctactggac

SEQ ID NO: 12634 - DNA, 20 bp, Artificial Sequence
  Antisense compound
tctgtcgtagtgctactgga

SEQ ID NO: 12635 - DNA, 20 bp, Artificial Sequence
  Antisense compound
atctgtcgtagtgctactgg

SEQ ID NO: 12636 - DNA, 20 bp, Artificial Sequence
  Antisense compound
catctgtcgtagtgctactg

SEQ ID NO: 12637 - DNA, 20 bp, Artificial Sequence
  Antisense compound
acatctgtcgtagtgctact

SEQ ID NO: 12638 - DNA, 20 bp, Artificial Sequence
  Antisense compound
gacatctgtcgtagtgctac

SEQ ID NO: 12639 - DNA, 20 bp, Artificial Sequence
  Antisense compound
ggacatctgtcgtagtgcta

SEQ ID NO: 12640 - DNA, 20 bp, Artificial Sequence
  Antisense compound
aggacatctgtcgtagtgct

SEQ ID NO: 12641 - DNA, 20 bp, Artificial Sequence
  Antisense compound
caggacatctgtcgtagtgc

SEQ ID NO: 12642 - DNA, 20 bp, Artificial Sequence
  Antisense compound
acaggacatctgtcgtagtg

SEQ ID NO: 12643 - DNA, 20 bp, Artificial Sequence
  Antisense compound
cacaggacatctgtcgtagt

SEQ ID NO: 12644 - DNA, 20 bp, Artificial Sequence
  Antisense compound
gcacaggacatctgtcgtag

SEQ ID NO: 12645 - DNA, 20 bp, Artificial Sequence
  Antisense compound
cgcacaggacatctgtcgta

SEQ ID NO: 12646 - DNA, 20 bp, Artificial Sequence
  Antisense compound
ccgcacaggacatctgtcgt

SEQ ID NO: 12647 - DNA, 20 bp, Artificial Sequence
  Antisense compound
gccgcacaggacatctgtcg

SEQ ID NO: 12648 - DNA, 20 bp, Artificial Sequence
  Antisense compound
agccgcacaggacatctgtc

SEQ ID NO: 12649 - DNA, 20 bp, Artificial Sequence
  Antisense compound
cagccgcacaggacatctgt

SEQ ID NO: 12650 - DNA, 20 bp, Artificial Sequence
  Antisense compound
ccagccgcacaggacatctg

SEQ ID NO: 12651 - DNA, 20 bp, Artificial Sequence
  Antisense compound
accagccgcacaggacatct

SEQ ID NO: 12652 - DNA, 20 bp, Artificial Sequence
  Antisense compound
taccagccgcacaggacatc

SEQ ID NO: 12653 - DNA, 20 bp, Artificial Sequence
  Antisense compound
gtaccagccgcacaggacat

SEQ ID NO: 12654 - DNA, 20 bp, Artificial Sequence
  Antisense compound
ggtaccagccgcacaggaca

SEQ ID NO: 12655 - DNA, 20 bp, Artificial Sequence
  Antisense compound
tggtaccagccgcacaggac

SEQ ID NO: 12656 - DNA, 20 bp, Artificial Sequence
  Antisense compound
gtggtaccagccgcacagga

SEQ ID NO: 12657 - DNA, 20 bp, Artificial Sequence
  Antisense compound
tgtggtaccagccgcacagg

SEQ ID NO: 12658 - DNA, 20 bp, Artificial Sequence
  Antisense compound
gtgtggtaccagccgcacag

SEQ ID NO: 12659 - DNA, 20 bp, Artificial Sequence
  Antisense compound
tgtgtggtaccagccgcaca

SEQ ID NO: 12660 - DNA, 20 bp, Artificial Sequence
  Antisense compound
ttgtgtggtaccagccgcac

SEQ ID NO: 12661 - DNA, 20 bp, Artificial Sequence
  Antisense compound
tttgtgtggtaccagccgca

SEQ ID NO: 12662 - DNA, 20 bp, Artificial Sequence
  Antisense compound
gtttgtgtggtaccagccgc

SEQ ID NO: 12663 - DNA, 20 bp, Artificial Sequence
  Antisense compound
tgtttgtgtggtaccagccg

SEQ ID NO: 12664 - DNA, 20 bp, Artificial Sequence
  Antisense compound
ctgtttgtgtggtaccagcc

SEQ ID NO: 12665 - DNA, 20 bp, Artificial Sequence
  Antisense compound
gctgtttgtgtggtaccagc

SEQ ID NO: 12666 - DNA, 20 bp, Artificial Sequence
  Antisense compound
agctgtttgtgtggtaccag

SEQ ID NO: 12667 - DNA, 20 bp, Artificial Sequence
  Antisense compound
aagctgtttgtgtggtacca

SEQ ID NO: 12668 - DNA, 20 bp, Artificial Sequence
  Antisense compound
caagctgtttgtgtggtacc

SEQ ID NO: 12669 - DNA, 20 bp, Artificial Sequence
  Antisense compound
acaagctgtttgtgtggtac

SEQ ID NO: 12670 - DNA, 20 bp, Artificial Sequence
  Antisense compound
tacaagctgtttgtgtggta

SEQ ID NO: 12671 - DNA, 20 bp, Artificial Sequence
  Antisense compound
gtacaagctgtttgtgtggt

SEQ ID NO: 12672 - DNA, 20 bp, Artificial Sequence
  Antisense compound
agtacaagctgtttgtgtgg

SEQ ID NO: 12673 - DNA, 20 bp, Artificial Sequence
  Antisense compound
cagtacaagctgtttgtgtg

SEQ ID NO: 12674 - DNA, 20 bp, Artificial Sequence
  Antisense compound
tcagtacaagctgtttgtgt

SEQ ID NO: 12675 - DNA, 20 bp, Artificial Sequence
  Antisense compound
atcagtacaagctgtttgtg

SEQ ID NO: 12676 - DNA, 20 bp, Artificial Sequence
  Antisense compound
catcagtacaagctgtttgt

SEQ ID NO: 12677 - DNA, 20 bp, Artificial Sequence
  Antisense compound
tcatcagtacaagctgtttg

SEQ ID NO: 12678 - DNA, 20 bp, Artificial Sequence
  Antisense compound
gtcatcagtacaagctgttt

SEQ ID NO: 12679 - DNA, 20 bp, Artificial Sequence
  Antisense compound
tgtcatcagtacaagctgtt

SEQ ID NO: 12680 - DNA, 20 bp, Artificial Sequence
  Antisense compound
ttgtcatcagtacaagctgt

SEQ ID NO: 12681 - DNA, 20 bp, Artificial Sequence
  Antisense compound
attgtcatcagtacaagctg

SEQ ID NO: 12682 - DNA, 20 bp, Artificial Sequence
  Antisense compound
cattgtcatcagtacaagct

SEQ ID NO: 12683 - DNA, 20 bp, Artificial Sequence
  Antisense compound
gcattgtcatcagtacaagc

SEQ ID NO: 12684 - DNA, 20 bp, Artificial Sequence
  Antisense compound
tgcattgtcatcagtacaag

SEQ ID NO: 12685 - DNA, 20 bp, Artificial Sequence
  Antisense compound
gtgcattgtcatcagtacaa

SEQ ID NO: 12686 - DNA, 20 bp, Artificial Sequence
  Antisense compound
agtgcattgtcatcagtaca

SEQ ID NO: 12687 - DNA, 20 bp, Artificial Sequence
  Antisense compound
aagtgcattgtcatcagtac

SEQ ID NO: 12688 - DNA, 20 bp, Artificial Sequence
  Antisense compound
caagtgcattgtcatcagta

SEQ ID NO: 12689 - DNA, 20 bp, Artificial Sequence
  Antisense compound
gcaagtgcattgtcatcagt

SEQ ID NO: 12690 - DNA, 20 bp, Artificial Sequence
  Antisense compound
ggcaagtgcattgtcatcag

SEQ ID NO: 12691 - DNA, 20 bp, Artificial Sequence
  Antisense compound
aggcaagtgcattgtcatca

SEQ ID NO: 12692 - DNA, 20 bp, Artificial Sequence
  Antisense compound
taggcaagtgcattgtcatc

SEQ ID NO: 12693 - DNA, 20 bp, Artificial Sequence
  Antisense compound
gtaggcaagtgcattgtcat

SEQ ID NO: 12694 - DNA, 20 bp, Artificial Sequence
  Antisense compound
agtaggcaagtgcattgtca

SEQ ID NO: 12695 - DNA, 20 bp, Artificial Sequence
  Antisense compound
tagtaggcaagtgcattgtc

SEQ ID NO: 12696 - DNA, 20 bp, Artificial Sequence
  Antisense compound
atagtaggcaagtgcattgt

SEQ ID NO: 12697 - DNA, 20 bp, Artificial Sequence
  Antisense compound
tatagtaggcaagtgcattg

SEQ ID NO: 12698 - DNA, 20 bp, Artificial Sequence
  Antisense compound
ttatagtaggcaagtgcatt

SEQ ID NO: 12699 - DNA, 20 bp, Artificial Sequence
  Antisense compound
gttatagtaggcaagtgcat

SEQ ID NO: 12700 - DNA, 20 bp, Artificial Sequence
  Antisense compound
tgttatagtaggcaagtgca

SEQ ID NO: 12701 - DNA, 20 bp, Artificial Sequence
  Antisense compound
ttgttatagtaggcaagtgc

SEQ ID NO: 12702 - DNA, 20 bp, Artificial Sequence
  Antisense compound
attgttatagtaggcaagtg

SEQ ID NO: 12703 - DNA, 20 bp, Artificial Sequence
  Antisense compound
aattgttatagtaggcaagt

SEQ ID NO: 12704 - DNA, 20 bp, Artificial Sequence
  Antisense compound
gaattgttatagtaggcaag

SEQ ID NO: 12705 - DNA, 20 bp, Artificial Sequence
  Antisense compound
cgaattgttatagtaggcaa

SEQ ID NO: 12706 - DNA, 20 bp, Artificial Sequence
  Antisense compound
tcgaattgttatagtaggca

SEQ ID NO: 12707 - DNA, 20 bp, Artificial Sequence
  Antisense compound
ttcgaattgttatagtaggc

SEQ ID NO: 12708 - DNA, 20 bp, Artificial Sequence
  Antisense compound
cttcgaattgttatagtagg

SEQ ID NO: 12709 - DNA, 20 bp, Artificial Sequence
  Antisense compound
ccttcgaattgttatagtag

SEQ ID NO: 12710 - DNA, 20 bp, Artificial Sequence
  Antisense compound
cccttcgaattgttatagta

SEQ ID NO: 12711 - DNA, 20 bp, Artificial Sequence
  Antisense compound
tcccttcgaattgttatagt

SEQ ID NO: 12712 - DNA, 20 bp, Artificial Sequence
  Antisense compound
ctcccttcgaattgttatag

SEQ ID NO: 12713 - DNA, 20 bp, Artificial Sequence
  Antisense compound
cctcccttcgaattgttata

SEQ ID NO: 12714 - DNA, 20 bp, Artificial Sequence
  Antisense compound
acctcccttcgaattgttat

SEQ ID NO: 12715 - DNA, 20 bp, Artificial Sequence
  Antisense compound
tacctcccttcgaattgtta

SEQ ID NO: 12716 - DNA, 20 bp, Artificial Sequence
  Antisense compound
ctacctcccttcgaattgtt

SEQ ID NO: 12717 - DNA, 20 bp, Artificial Sequence
  Antisense compound
cctacctcccttcgaattgt

SEQ ID NO: 12718 - DNA, 20 bp, Artificial Sequence
  Antisense compound
acctacctcccttcgaattg

SEQ ID NO: 12719 - DNA, 20 bp, Artificial Sequence
  Antisense compound
aacctacctcccttcgaatt

SEQ ID NO: 12720 - DNA, 20 bp, Artificial Sequence
  Antisense compound
aaacctacctcccttcgaat

SEQ ID NO: 12721 - DNA, 20 bp, Artificial Sequence
  Antisense compound
caaacctacctcccttcgaa

SEQ ID NO: 12722 - DNA, 20 bp, Artificial Sequence
  Antisense compound
acaaacctacctcccttcga

SEQ ID NO: 12723 - DNA, 20 bp, Artificial Sequence
  Antisense compound
cacaaacctacctcccttcg

SEQ ID NO: 12724 - DNA, 20 bp, Artificial Sequence
  Antisense compound
gcacaaacctacctcccttc

SEQ ID NO: 12725 - DNA, 20 bp, Artificial Sequence
  Antisense compound
agcacaaacctacctccctt

SEQ ID NO: 12726 - DNA, 20 bp, Artificial Sequence
  Antisense compound
cagcacaaacctacctccct

SEQ ID NO: 12727 - DNA, 20 bp, Artificial Sequence
  Antisense compound
ccagcacaaacctacctccc

SEQ ID NO: 12728 - DNA, 20 bp, Artificial Sequence
  Antisense compound
gccagcacaaacctacctcc

SEQ ID NO: 12729 - DNA, 20 bp, Artificial Sequence
  Antisense compound
tgccagcacaaacctacctc

SEQ ID NO: 12730 - DNA, 20 bp, Artificial Sequence
  Antisense compound
atgccagcacaaacctacct

SEQ ID NO: 12731 - DNA, 20 bp, Artificial Sequence
  Antisense compound
aatgccagcacaaacctacc

SEQ ID NO: 12732 - DNA, 20 bp, Artificial Sequence
  Antisense compound
taatgccagcacaaacctac

SEQ ID NO: 12733 - DNA, 20 bp, Artificial Sequence
  Antisense compound
gtaatgccagcacaaaccta

SEQ ID NO: 12734 - DNA, 20 bp, Artificial Sequence
  Antisense compound
agtaatgccagcacaaacct

SEQ ID NO: 12735 - DNA, 20 bp, Artificial Sequence
  Antisense compound
tagtaatgccagcacaaacc

SEQ ID NO: 12736 - DNA, 20 bp, Artificial Sequence
  Antisense compound
atagtaatgccagcacaaac

SEQ ID NO: 12737 - DNA, 20 bp, Artificial Sequence
  Antisense compound
gatagtaatgccagcacaaa

SEQ ID NO: 12738 - DNA, 20 bp, Artificial Sequence
  Antisense compound
tgatagtaatgccagcacaa

SEQ ID NO: 12739 - DNA, 20 bp, Artificial Sequence
  Antisense compound
ctgatagtaatgccagcaca

SEQ ID NO: 12740 - DNA, 20 bp, Artificial Sequence
  Antisense compound
tctgatagtaatgccagcac

SEQ ID NO: 12741 - DNA, 20 bp, Artificial Sequence
  Antisense compound
gtctgatagtaatgccagca

SEQ ID NO: 12742 - DNA, 20 bp, Artificial Sequence
  Antisense compound
ggtctgatagtaatgccagc

SEQ ID NO: 12743 - DNA, 20 bp, Artificial Sequence
  Antisense compound
tggtctgatagtaatgccag

SEQ ID NO: 12744 - DNA, 20 bp, Artificial Sequence
  Antisense compound
gtggtctgatagtaatgcca

SEQ ID NO: 12745 - DNA, 20 bp, Artificial Sequence
  Antisense compound
ggtggtctgatagtaatgcc

SEQ ID NO: 12746 - DNA, 20 bp, Artificial Sequence
  Antisense compound
tggtggtctgatagtaatgc

SEQ ID NO: 12747 - DNA, 20 bp, Artificial Sequence
  Antisense compound
ttggtggtctgatagtaatg

SEQ ID NO: 12748 - DNA, 20 bp, Artificial Sequence
  Antisense compound
cttggtggtctgatagtaat

SEQ ID NO: 12749 - DNA, 20 bp, Artificial Sequence
  Antisense compound
tcttggtggtctgatagtaa

SEQ ID NO: 12750 - DNA, 20 bp, Artificial Sequence
  Antisense compound
atcttggtggtctgatagta

SEQ ID NO: 12751 - DNA, 20 bp, Artificial Sequence
  Antisense compound
gatcttggtggtctgatagt

SEQ ID NO: 12752 - DNA, 20 bp, Artificial Sequence
  Antisense compound
agatcttggtggtctgatag

SEQ ID NO: 12753 - DNA, 20 bp, Artificial Sequence
  Antisense compound
gagatcttggtggtctgata

SEQ ID NO: 12754 - DNA, 20 bp, Artificial Sequence
  Antisense compound
tgagatcttggtggtctgat

SEQ ID NO: 12755 - DNA, 20 bp, Artificial Sequence
  Antisense compound
ttgagatcttggtggtctga

SEQ ID NO: 12756 - DNA, 20 bp, Artificial Sequence
  Antisense compound
tttgagatcttggtggtctg

SEQ ID NO: 12757 - DNA, 20 bp, Artificial Sequence
  Antisense compound
atttgagatcttggtggtct

SEQ ID NO: 12758 - DNA, 20 bp, Artificial Sequence
  Antisense compound
catttgagatcttggtggtc

SEQ ID NO: 12759 - DNA, 20 bp, Artificial Sequence
  Antisense compound
ccatttgagatcttggtggt

SEQ ID NO: 12760 - DNA, 20 bp, Artificial Sequence
  Antisense compound
cccatttgagatcttggtgg

SEQ ID NO: 12761 - DNA, 20 bp, Artificial Sequence
  Antisense compound
gcccatttgagatcttggtg

SEQ ID NO: 12762 - DNA, 20 bp, Artificial Sequence
  Antisense compound
agcccatttgagatcttggt

SEQ ID NO: 12763 - DNA, 20 bp, Artificial Sequence
  Antisense compound
tagcccatttgagatcttgg

SEQ ID NO: 12764 - DNA, 20 bp, Artificial Sequence
  Antisense compound
ctagcccatttgagatcttg

SEQ ID NO: 12765 - DNA, 20 bp, Artificial Sequence
  Antisense compound
tctagcccatttgagatctt

SEQ ID NO: 12766 - DNA, 20 bp, Artificial Sequence
  Antisense compound
atctagcccatttgagatct

SEQ ID NO: 12767 - DNA, 20 bp, Artificial Sequence
  Antisense compound
aatctagcccatttgagatc

SEQ ID NO: 12768 - DNA, 20 bp, Artificial Sequence
  Antisense compound
gaatctagcccatttgagat

SEQ ID NO: 12769 - DNA, 20 bp, Artificial Sequence
  Antisense compound
ggaatctagcccatttgaga

SEQ ID NO: 12770 - DNA, 20 bp, Artificial Sequence
  Antisense compound
gggaatctagcccatttgag

SEQ ID NO: 12771 - DNA, 20 bp, Artificial Sequence
  Antisense compound
agggaatctagcccatttga

SEQ ID NO: 12772 - DNA, 20 bp, Artificial Sequence
  Antisense compound
tagggaatctagcccatttg

SEQ ID NO: 12773 - DNA, 20 bp, Artificial Sequence
  Antisense compound
ttagggaatctagcccattt

SEQ ID NO: 12774 - DNA, 20 bp, Artificial Sequence
  Antisense compound
cttagggaatctagcccatt

SEQ ID NO: 12775 - DNA, 20 bp, Artificial Sequence
  Antisense compound
tcttagggaatctagcccat

SEQ ID NO: 12776 - DNA, 20 bp, Artificial Sequence
  Antisense compound
ctcttagggaatctagccca

SEQ ID NO: 12777 - DNA, 20 bp, Artificial Sequence
  Antisense compound
actcttagggaatctagccc

SEQ ID NO: 12778 - DNA, 20 bp, Artificial Sequence
  Antisense compound
cactcttagggaatctagcc

SEQ ID NO: 12779 - DNA, 20 bp, Artificial Sequence
  Antisense compound
tcactcttagggaatctagc

SEQ ID NO: 12780 - DNA, 20 bp, Artificial Sequence
  Antisense compound
atcactcttagggaatctag

SEQ ID NO: 12781 - DNA, 20 bp, Artificial Sequence
  Antisense compound
catcactcttagggaatcta

SEQ ID NO: 12782 - DNA, 20 bp, Artificial Sequence
  Antisense compound
ccatcactcttagggaatct

SEQ ID NO: 12783 - DNA, 20 bp, Artificial Sequence
  Antisense compound
accatcactcttagggaatc

SEQ ID NO: 12784 - DNA, 20 bp, Artificial Sequence
  Antisense compound
taccatcactcttagggaat

SEQ ID NO: 12785 - DNA, 20 bp, Artificial Sequence
  Antisense compound
gtaccatcactcttagggaa

SEQ ID NO: 12786 - DNA, 20 bp, Artificial Sequence
  Antisense compound
tgtaccatcactcttaggga

SEQ ID NO: 12787 - DNA, 20 bp, Artificial Sequence
  Antisense compound
ctgtaccatcactcttaggg

SEQ ID NO: 12788 - DNA, 20 bp, Artificial Sequence
  Antisense compound
cctgtaccatcactcttagg

SEQ ID NO: 12789 - DNA, 20 bp, Artificial Sequence
  Antisense compound
acctgtaccatcactcttag

SEQ ID NO: 12790 - DNA, 20 bp, Artificial Sequence
  Antisense compound
tacctgtaccatcactctta

SEQ ID NO: 12791 - DNA, 20 bp, Artificial Sequence
  Antisense compound
gtacctgtaccatcactctt

SEQ ID NO: 12792 - DNA, 20 bp, Artificial Sequence
  Antisense compound
tgtacctgtaccatcactct

SEQ ID NO: 12793 - DNA, 20 bp, Artificial Sequence
  Antisense compound
ttgtacctgtaccatcactc

SEQ ID NO: 12794 - DNA, 20 bp, Artificial Sequence
  Antisense compound
attgtacctgtaccatcact

SEQ ID NO: 12795 - DNA, 20 bp, Artificial Sequence
  Antisense compound
aattgtacctgtaccatcac

SEQ ID NO: 12796 - DNA, 20 bp, Artificial Sequence
  Antisense compound
aaattgtacctgtaccatca

SEQ ID NO: 12797 - DNA, 20 bp, Artificial Sequence
  Antisense compound
taaattgtacctgtaccatc

SEQ ID NO: 12798 - DNA, 20 bp, Artificial Sequence
  Antisense compound
gtaaattgtacctgtaccat

SEQ ID NO: 12799 - DNA, 20 bp, Artificial Sequence
  Antisense compound
tgtaaattgtacctgtacca

SEQ ID NO: 12800 - DNA, 20 bp, Artificial Sequence
  Antisense compound
gtgtaaattgtacctgtacc

SEQ ID NO: 12801 - DNA, 20 bp, Artificial Sequence
  Antisense compound
tgtgtaaattgtacctgtac

SEQ ID NO: 12802 - DNA, 20 bp, Artificial Sequence
  Antisense compound
ctgtgtaaattgtacctgta

SEQ ID NO: 12803 - DNA, 20 bp, Artificial Sequence
  Antisense compound
tctgtgtaaattgtacctgt

SEQ ID NO: 12804 - DNA, 20 bp, Artificial Sequence
  Antisense compound
ttctgtgtaaattgtacctg

SEQ ID NO: 12805 - DNA, 20 bp, Artificial Sequence
  Antisense compound
gttctgtgtaaattgtacct

SEQ ID NO: 12806 - DNA, 20 bp, Artificial Sequence
  Antisense compound
agttctgtgtaaattgtacc

SEQ ID NO: 12807 - DNA, 20 bp, Artificial Sequence
  Antisense compound
cagttctgtgtaaattgtac

SEQ ID NO: 12808 - DNA, 20 bp, Artificial Sequence
  Antisense compound
ccagttctgtgtaaattgta

SEQ ID NO: 12809 - DNA, 20 bp, Artificial Sequence
  Antisense compound
tccagttctgtgtaaattgt

SEQ ID NO: 12810 - DNA, 20 bp, Artificial Sequence
  Antisense compound
ttccagttctgtgtaaattg

SEQ ID NO: 12811 - DNA, 20 bp, Artificial Sequence
  Antisense compound
gttccagttctgtgtaaatt

SEQ ID NO: 12812 - DNA, 20 bp, Artificial Sequence
  Antisense compound
ggttccagttctgtgtaaat

SEQ ID NO: 12813 - DNA, 20 bp, Artificial Sequence
  Antisense compound
tggttccagttctgtgtaaa

SEQ ID NO: 12814 - DNA, 20 bp, Artificial Sequence
  Antisense compound
gtggttccagttctgtgtaa

SEQ ID NO: 12815 - DNA, 20 bp, Artificial Sequence
  Antisense compound
ggtggttccagttctgtgta

SEQ ID NO: 12816 - DNA, 20 bp, Artificial Sequence
  Antisense compound
aggtggttccagttctgtgt

SEQ ID NO: 12817 - DNA, 20 bp, Artificial Sequence
  Antisense compound
aaggtggttccagttctgtg

SEQ ID NO: 12818 - DNA, 20 bp, Artificial Sequence
  Antisense compound
caaggtggttccagttctgt

SEQ ID NO: 12819 - DNA, 20 bp, Artificial Sequence
  Antisense compound
acaaggtggttccagttctg

SEQ ID NO: 12820 - DNA, 20 bp, Artificial Sequence
  Antisense compound
tacaaggtggttccagttct

SEQ ID NO: 12821 - DNA, 20 bp, Artificial Sequence
  Antisense compound
ctacaaggtggttccagttc

SEQ ID NO: 12822 - DNA, 20 bp, Artificial Sequence
  Antisense compound
cctacaaggtggttccagtt

SEQ ID NO: 12823 - DNA, 20 bp, Artificial Sequence
  Antisense compound
acctacaaggtggttccagt

SEQ ID NO: 12824 - DNA, 20 bp, Artificial Sequence
  Antisense compound
aacctacaaggtggttccag

SEQ ID NO: 12825 - DNA, 20 bp, Artificial Sequence
  Antisense compound
aaacctacaaggtggttcca

SEQ ID NO: 12826 - DNA, 20 bp, Artificial Sequence
  Antisense compound
caaacctacaaggtggttcc

SEQ ID NO: 12827 - DNA, 20 bp, Artificial Sequence
  Antisense compound
acaaacctacaaggtggttc

SEQ ID NO: 12828 - DNA, 20 bp, Artificial Sequence
  Antisense compound
aacaaacctacaaggtggtt

SEQ ID NO: 12829 - DNA, 20 bp, Artificial Sequence
  Antisense compound
taacaaacctacaaggtggt

SEQ ID NO: 12830 - DNA, 20 bp, Artificial Sequence
  Antisense compound
gtaacaaacctacaaggtgg

SEQ ID NO: 12831 - DNA, 20 bp, Artificial Sequence
  Antisense compound
tgtaacaaacctacaaggtg

SEQ ID NO: 12832 - DNA, 20 bp, Artificial Sequence
  Antisense compound
ctgtaacaaacctacaaggt

SEQ ID NO: 12833 - DNA, 20 bp, Artificial Sequence
  Antisense compound
tctgtaacaaacctacaagg

SEQ ID NO: 12834 - DNA, 20 bp, Artificial Sequence
  Antisense compound
gtctgtaacaaacctacaag

SEQ ID NO: 12835 - DNA, 20 bp, Artificial Sequence
  Antisense compound
tgtctgtaacaaacctacaa

SEQ ID NO: 12836 - DNA, 20 bp, Artificial Sequence
  Antisense compound
gtgtctgtaacaaacctaca

SEQ ID NO: 12837 - DNA, 20 bp, Artificial Sequence
  Antisense compound
tgtgtctgtaacaaacctac

SEQ ID NO: 12838 - DNA, 20 bp, Artificial Sequence
  Antisense compound
gtgtgtctgtaacaaaccta

SEQ ID NO: 12839 - DNA, 20 bp, Artificial Sequence
  Antisense compound
ggtgtgtctgtaacaaacct

SEQ ID NO: 12840 - DNA, 20 bp, Artificial Sequence
  Antisense compound
tggtgtgtctgtaacaaacc

SEQ ID NO: 12841 - DNA, 20 bp, Artificial Sequence
  Antisense compound
ttggtgtgtctgtaacaaac

SEQ ID NO: 12842 - DNA, 20 bp, Artificial Sequence
  Antisense compound
tttggtgtgtctgtaacaaa

SEQ ID NO: 12843 - DNA, 20 bp, Artificial Sequence
  Antisense compound
ttttggtgtgtctgtaacaa

SEQ ID NO: 12844 - DNA, 20 bp, Artificial Sequence
  Antisense compound
cttttggtgtgtctgtaaca

SEQ ID NO: 12845 - DNA, 20 bp, Artificial Sequence
  Antisense compound
ccttttggtgtgtctgtaac

SEQ ID NO: 12846 - DNA, 20 bp, Artificial Sequence
  Antisense compound
cccttttggtgtgtctgtaa

SEQ ID NO: 12847 - DNA, 20 bp, Artificial Sequence
  Antisense compound
gcccttttggtgtgtctgta

SEQ ID NO: 12848 - DNA, 20 bp, Artificial Sequence
  Antisense compound
ggcccttttggtgtgtctgt

SEQ ID NO: 12849 - DNA, 20 bp, Artificial Sequence
  Antisense compound
aggcccttttggtgtgtctg

SEQ ID NO: 12850 - DNA, 20 bp, Artificial Sequence
  Antisense compound
taggcccttttggtgtgtct

SEQ ID NO: 12851 - DNA, 20 bp, Artificial Sequence
  Antisense compound
ttaggcccttttggtgtgtc

SEQ ID NO: 12852 - DNA, 20 bp, Artificial Sequence
  Antisense compound
tttaggcccttttggtgtgt

SEQ ID NO: 12853 - DNA, 20 bp, Artificial Sequence
  Antisense compound
ctttaggcccttttggtgtg

SEQ ID NO: 12854 - DNA, 20 bp, Artificial Sequence
  Antisense compound
actttaggcccttttggtgt

SEQ ID NO: 12855 - DNA, 20 bp, Artificial Sequence
  Antisense compound
cactttaggcccttttggtg

SEQ ID NO: 12856 - DNA, 20 bp, Artificial Sequence
  Antisense compound
tcactttaggcccttttggt

SEQ ID NO: 12857 - DNA, 20 bp, Artificial Sequence
  Antisense compound
ttcactttaggcccttttgg

SEQ ID NO: 12858 - DNA, 20 bp, Artificial Sequence
  Antisense compound
tttcactttaggcccttttg

SEQ ID NO: 12859 - DNA, 20 bp, Artificial Sequence
  Antisense compound
atttcactttaggccctttt

SEQ ID NO: 12860 - DNA, 20 bp, Artificial Sequence
  Antisense compound
tatttcactttaggcccttt

SEQ ID NO: 12861 - DNA, 20 bp, Artificial Sequence
  Antisense compound
gtatttcactttaggccctt

SEQ ID NO: 12862 - DNA, 20 bp, Artificial Sequence
  Antisense compound
agtatttcactttaggccct

SEQ ID NO: 12863 - DNA, 20 bp, Artificial Sequence
  Antisense compound
aagtatttcactttaggccc

SEQ ID NO: 12864 - DNA, 20 bp, Artificial Sequence
  Antisense compound
caagtatttcactttaggcc

SEQ ID NO: 12865 - DNA, 20 bp, Artificial Sequence
  Antisense compound
acaagtatttcactttaggc

SEQ ID NO: 12866 - DNA, 20 bp, Artificial Sequence
  Antisense compound
tacaagtatttcactttagg

SEQ ID NO: 12867 - DNA, 20 bp, Artificial Sequence
  Antisense compound
gtacaagtatttcactttag

SEQ ID NO: 12868 - DNA, 20 bp, Artificial Sequence
  Antisense compound
agtacaagtatttcacttta

SEQ ID NO: 12869 - DNA, 20 bp, Artificial Sequence
  Antisense compound
aagtacaagtatttcacttt

SEQ ID NO: 12870 - DNA, 20 bp, Artificial Sequence
  Antisense compound
gaagtacaagtatttcactt

SEQ ID NO: 12871 - DNA, 20 bp, Artificial Sequence
  Antisense compound
tgaagtacaagtatttcact

SEQ ID NO: 12872 - DNA, 20 bp, Artificial Sequence
  Antisense compound
atgaagtacaagtatttcac

SEQ ID NO: 12873 - DNA, 20 bp, Artificial Sequence
  Antisense compound
gatgaagtacaagtatttca

SEQ ID NO: 12874 - DNA, 20 bp, Artificial Sequence
  Antisense compound
tgatgaagtacaagtatttc

SEQ ID NO: 12875 - DNA, 20 bp, Artificial Sequence
  Antisense compound
ttgatgaagtacaagtattt

SEQ ID NO: 12876 - DNA, 20 bp, Artificial Sequence
  Antisense compound
tttgatgaagtacaagtatt

SEQ ID NO: 12877 - DNA, 20 bp, Artificial Sequence
  Antisense compound
ctttgatgaagtacaagtat

SEQ ID NO: 12878 - DNA, 20 bp, Artificial Sequence
  Antisense compound
cctttgatgaagtacaagta

SEQ ID NO: 12879 - DNA, 20 bp, Artificial Sequence
  Antisense compound
gcctttgatgaagtacaagt

SEQ ID NO: 12880 - DNA, 20 bp, Artificial Sequence
  Antisense compound
agcctttgatgaagtacaag

SEQ ID NO: 12881 - DNA, 20 bp, Artificial Sequence
  Antisense compound
aagcctttgatgaagtacaa

SEQ ID NO: 12882 - DNA, 20 bp, Artificial Sequence
  Antisense compound
taagcctttgatgaagtaca

SEQ ID NO: 12883 - DNA, 20 bp, Artificial Sequence
  Antisense compound
ttaagcctttgatgaagtac

SEQ ID NO: 12884 - DNA, 20 bp, Artificial Sequence
  Antisense compound
tttaagcctttgatgaagta

SEQ ID NO: 12885 - DNA, 20 bp, Artificial Sequence
  Antisense compound
gtttaagcctttgatgaagt

SEQ ID NO: 12886 - DNA, 20 bp, Artificial Sequence
  Antisense compound
tgtttaagcctttgatgaag

SEQ ID NO: 12887 - DNA, 20 bp, Artificial Sequence
  Antisense compound
ttgtttaagcctttgatgaa

SEQ ID NO: 12888 - DNA, 20 bp, Artificial Sequence
  Antisense compound
gttgtttaagcctttgatga

SEQ ID NO: 12889 - DNA, 20 bp, Artificial Sequence
  Antisense compound
ggttgtttaagcctttgatg

SEQ ID NO: 12890 - DNA, 20 bp, Artificial Sequence
  Antisense compound
aggttgtttaagcctttgat

SEQ ID NO: 12891 - DNA, 20 bp, Artificial Sequence
  Antisense compound
taggttgtttaagcctttga

SEQ ID NO: 12892 - DNA, 20 bp, Artificial Sequence
  Antisense compound
ttaggttgtttaagcctttg

SEQ ID NO: 12893 - DNA, 20 bp, Artificial Sequence
  Antisense compound
tttaggttgtttaagccttt

SEQ ID NO: 12894 - DNA, 20 bp, Artificial Sequence
  Antisense compound
atttaggttgtttaagcctt

SEQ ID NO: 12895 - DNA, 20 bp, Artificial Sequence
  Antisense compound
tatttaggttgtttaagcct

SEQ ID NO: 12896 - DNA, 20 bp, Artificial Sequence
  Antisense compound
ctatttaggttgtttaagcc

SEQ ID NO: 12897 - DNA, 20 bp, Artificial Sequence
  Antisense compound
tctatttaggttgtttaagc

SEQ ID NO: 12898 - DNA, 20 bp, Artificial Sequence
  Antisense compound
ctctatttaggttgtttaag

SEQ ID NO: 12899 - DNA, 20 bp, Artificial Sequence
  Antisense compound
cctctatttaggttgtttaa

SEQ ID NO: 12900 - DNA, 20 bp, Artificial Sequence
  Antisense compound
acctctatttaggttgttta

SEQ ID NO: 12901 - DNA, 20 bp, Artificial Sequence
  Antisense compound
tacctctatttaggttgttt

SEQ ID NO: 12902 - DNA, 20 bp, Artificial Sequence
  Antisense compound
atacctctatttaggttgtt

SEQ ID NO: 12903 - DNA, 20 bp, Artificial Sequence
  Antisense compound
catacctctatttaggttgt

SEQ ID NO: 12904 - DNA, 20 bp, Artificial Sequence
  Antisense compound
ccatacctctatttaggttg

SEQ ID NO: 12905 - DNA, 20 bp, Artificial Sequence
  Antisense compound
accatacctctatttaggtt

SEQ ID NO: 12906 - DNA, 20 bp, Artificial Sequence
  Antisense compound
caccatacctctatttaggt

SEQ ID NO: 12907 - DNA, 20 bp, Artificial Sequence
  Antisense compound
gcaccatacctctatttagg

SEQ ID NO: 12908 - DNA, 20 bp, Artificial Sequence
  Antisense compound
agcaccatacctctatttag

SEQ ID NO: 12909 - DNA, 20 bp, Artificial Sequence
  Antisense compound
cagcaccatacctctattta

SEQ ID NO: 12910 - DNA, 20 bp, Artificial Sequence
  Antisense compound
ccagcaccatacctctattt

SEQ ID NO: 12911 - DNA, 20 bp, Artificial Sequence
  Antisense compound
cccagcaccatacctctatt

SEQ ID NO: 12912 - DNA, 20 bp, Artificial Sequence
  Antisense compound
gcccagcaccatacctctat

SEQ ID NO: 12913 - DNA, 20 bp, Artificial Sequence
  Antisense compound
tgcccagcaccatacctcta

SEQ ID NO: 12914 - DNA, 20 bp, Artificial Sequence
  Antisense compound
ctgcccagcaccatacctct

SEQ ID NO: 12915 - DNA, 20 bp, Artificial Sequence
  Antisense compound
actgcccagcaccatacctc

SEQ ID NO: 12916 - DNA, 20 bp, Artificial Sequence
  Antisense compound
aactgcccagcaccatacct

SEQ ID NO: 12917 - DNA, 20 bp, Artificial Sequence
  Antisense compound
aaactgcccagcaccatacc

SEQ ID NO: 12918 - DNA, 20 bp, Artificial Sequence
  Antisense compound
taaactgcccagcaccatac

SEQ ID NO: 12919 - DNA, 20 bp, Artificial Sequence
  Antisense compound
ctaaactgcccagcaccata

SEQ ID NO: 12920 - DNA, 20 bp, Artificial Sequence
  Antisense compound
gctaaactgcccagcaccat

SEQ ID NO: 12921 - DNA, 20 bp, Artificial Sequence
  Antisense compound
agctaaactgcccagcacca

SEQ ID NO: 12922 - DNA, 20 bp, Artificial Sequence
  Antisense compound
cagctaaactgcccagcacc

SEQ ID NO: 12923 - DNA, 20 bp, Artificial Sequence
  Antisense compound
gcagctaaactgcccagcac

SEQ ID NO: 12924 - DNA, 20 bp, Artificial Sequence
  Antisense compound
agcagctaaactgcccagca

SEQ ID NO: 12925 - DNA, 20 bp, Artificial Sequence
  Antisense compound
tagcagctaaactgcccagc

SEQ ID NO: 12926 - DNA, 20 bp, Artificial Sequence
  Antisense compound
gtagcagctaaactgcccag

SEQ ID NO: 12927 - DNA, 20 bp, Artificial Sequence
  Antisense compound
tgtagcagctaaactgccca

SEQ ID NO: 12928 - DNA, 20 bp, Artificial Sequence
  Antisense compound
ctgtagcagctaaactgccc

SEQ ID NO: 12929 - DNA, 20 bp, Artificial Sequence
  Antisense compound
actgtagcagctaaactgcc

SEQ ID NO: 12930 - DNA, 20 bp, Artificial Sequence
  Antisense compound
tactgtagcagctaaactgc

SEQ ID NO: 12931 - DNA, 20 bp, Artificial Sequence
  Antisense compound
gtactgtagcagctaaactg

SEQ ID NO: 12932 - DNA, 20 bp, Artificial Sequence
  Antisense compound
cgtactgtagcagctaaact

SEQ ID NO: 12933 - DNA, 20 bp, Artificial Sequence
  Antisense compound
acgtactgtagcagctaaac

SEQ ID NO: 12934 - DNA, 20 bp, Artificial Sequence
  Antisense compound
gacgtactgtagcagctaaa

SEQ ID NO: 12935 - DNA, 20 bp, Artificial Sequence
  Antisense compound
agacgtactgtagcagctaa

SEQ ID NO: 12936 - DNA, 20 bp, Artificial Sequence
  Antisense compound
aagacgtactgtagcagcta

SEQ ID NO: 12937 - DNA, 20 bp, Artificial Sequence
  Antisense compound
gaagacgtactgtagcagct

SEQ ID NO: 12938 - DNA, 20 bp, Artificial Sequence
  Antisense compound
tgaagacgtactgtagcagc

SEQ ID NO: 12939 - DNA, 20 bp, Artificial Sequence
  Antisense compound
ctgaagacgtactgtagcag

SEQ ID NO: 12940 - DNA, 20 bp, Artificial Sequence
  Antisense compound
cctgaagacgtactgtagca

SEQ ID NO: 12941 - DNA, 20 bp, Artificial Sequence
  Antisense compound
gcctgaagacgtactgtagc

SEQ ID NO: 12942 - DNA, 20 bp, Artificial Sequence
  Antisense compound
agcctgaagacgtactgtag

SEQ ID NO: 12943 - DNA, 20 bp, Artificial Sequence
  Antisense compound
cagcctgaagacgtactgta

SEQ ID NO: 12944 - DNA, 20 bp, Artificial Sequence
  Antisense compound
ccagcctgaagacgtactgt

SEQ ID NO: 12945 - DNA, 20 bp, Artificial Sequence
  Antisense compound
tccagcctgaagacgtactg

SEQ ID NO: 12946 - DNA, 20 bp, Artificial Sequence
  Antisense compound
ttccagcctgaagacgtact

SEQ ID NO: 12947 - DNA, 20 bp, Artificial Sequence
  Antisense compound
tttccagcctgaagacgtac

SEQ ID NO: 12948 - DNA, 20 bp, Artificial Sequence
  Antisense compound
atttccagcctgaagacgta

SEQ ID NO: 12949 - DNA, 20 bp, Artificial Sequence
  Antisense compound
catttccagcctgaagacgt

SEQ ID NO: 12950 - DNA, 20 bp, Artificial Sequence
  Antisense compound
gcatttccagcctgaagacg

SEQ ID NO: 12951 - DNA, 20 bp, Artificial Sequence
  Antisense compound
agcatttccagcctgaagac

SEQ ID NO: 12952 - DNA, 20 bp, Artificial Sequence
  Antisense compound
tagcatttccagcctgaaga

SEQ ID NO: 12953 - DNA, 20 bp, Artificial Sequence
  Antisense compound
gtagcatttccagcctgaag

SEQ ID NO: 12954 - DNA, 20 bp, Artificial Sequence
  Antisense compound
tgtagcatttccagcctgaa

SEQ ID NO: 12955 - DNA, 20 bp, Artificial Sequence
  Antisense compound
ctgtagcatttccagcctga

SEQ ID NO: 12956 - DNA, 20 bp, Artificial Sequence
  Antisense compound
tctgtagcatttccagcctg

SEQ ID NO: 12957 - DNA, 20 bp, Artificial Sequence
  Antisense compound
ttctgtagcatttccagcct

SEQ ID NO: 12958 - DNA, 20 bp, Artificial Sequence
  Antisense compound
cttctgtagcatttccagcc

SEQ ID NO: 12959 - DNA, 20 bp, Artificial Sequence
  Antisense compound
acttctgtagcatttccagc

SEQ ID NO: 12960 - DNA, 20 bp, Artificial Sequence
  Antisense compound
tacttctgtagcatttccag

SEQ ID NO: 12961 - DNA, 20 bp, Artificial Sequence
  Antisense compound
gtacttctgtagcatttcca

SEQ ID NO: 12962 - DNA, 20 bp, Artificial Sequence
  Antisense compound
ggtacttctgtagcatttcc

SEQ ID NO: 12963 - DNA, 20 bp, Artificial Sequence
  Antisense compound
aggtacttctgtagcatttc

SEQ ID NO: 12964 - DNA, 20 bp, Artificial Sequence
  Antisense compound
caggtacttctgtagcattt

SEQ ID NO: 12965 - DNA, 20 bp, Artificial Sequence
  Antisense compound
gcaggtacttctgtagcatt

SEQ ID NO: 12966 - DNA, 20 bp, Artificial Sequence
  Antisense compound
ggcaggtacttctgtagcat

SEQ ID NO: 12967 - DNA, 20 bp, Artificial Sequence
  Antisense compound
tggcaggtacttctgtagca

SEQ ID NO: 12968 - DNA, 20 bp, Artificial Sequence
  Antisense compound
ttggcaggtacttctgtagc

SEQ ID NO: 12969 - DNA, 20 bp, Artificial Sequence
  Antisense compound
attggcaggtacttctgtag

SEQ ID NO: 12970 - DNA, 20 bp, Artificial Sequence
  Antisense compound
aattggcaggtacttctgta

SEQ ID NO: 12971 - DNA, 20 bp, Artificial Sequence
  Antisense compound
gaattggcaggtacttctgt

SEQ ID NO: 12972 - DNA, 20 bp, Artificial Sequence
  Antisense compound
tgaattggcaggtacttctg

SEQ ID NO: 12973 - DNA, 20 bp, Artificial Sequence
  Antisense compound
ttgaattggcaggtacttct

SEQ ID NO: 12974 - DNA, 20 bp, Artificial Sequence
  Antisense compound
gttgaattggcaggtacttc

SEQ ID NO: 12975 - DNA, 20 bp, Artificial Sequence
  Antisense compound
agttgaattggcaggtactt

SEQ ID NO: 12976 - DNA, 20 bp, Artificial Sequence
  Antisense compound
cagttgaattggcaggtact

SEQ ID NO: 12977 - DNA, 20 bp, Artificial Sequence
  Antisense compound
acagttgaattggcaggtac

SEQ ID NO: 12978 - DNA, 20 bp, Artificial Sequence
  Antisense compound
cacagttgaattggcaggta

SEQ ID NO: 12979 - DNA, 20 bp, Artificial Sequence
  Antisense compound
gcacagttgaattggcaggt

SEQ ID NO: 12980 - DNA, 20 bp, Artificial Sequence
  Antisense compound
agcacagttgaattggcagg

SEQ ID NO: 12981 - DNA, 20 bp, Artificial Sequence
  Antisense compound
aagcacagttgaattggcag

SEQ ID NO: 12982 - DNA, 20 bp, Artificial Sequence
  Antisense compound
aaagcacagttgaattggca

SEQ ID NO: 12983 - DNA, 20 bp, Artificial Sequence
  Antisense compound
gaaagcacagttgaattggc

SEQ ID NO: 12984 - DNA, 20 bp, Artificial Sequence
  Antisense compound
ggaaagcacagttgaattgg

SEQ ID NO: 12985 - DNA, 20 bp, Artificial Sequence
  Antisense compound
aggaaagcacagttgaattg

SEQ ID NO: 12986 - DNA, 20 bp, Artificial Sequence
  Antisense compound
aaggaaagcacagttgaatt

SEQ ID NO: 12987 - DNA, 20 bp, Artificial Sequence
  Antisense compound
gaaggaaagcacagttgaat

SEQ ID NO: 12988 - DNA, 20 bp, Artificial Sequence
  Antisense compound
agaaggaaagcacagttgaa

SEQ ID NO: 12989 - DNA, 20 bp, Artificial Sequence
  Antisense compound
cagaaggaaagcacagttga

SEQ ID NO: 12990 - DNA, 20 bp, Artificial Sequence
  Antisense compound
acagaaggaaagcacagttg

SEQ ID NO: 12991 - DNA, 20 bp, Artificial Sequence
  Antisense compound
cacagaaggaaagcacagtt

SEQ ID NO: 12992 - DNA, 20 bp, Artificial Sequence
  Antisense compound
gcacagaaggaaagcacagt

SEQ ID NO: 12993 - DNA, 20 bp, Artificial Sequence
  Antisense compound
agcacagaaggaaagcacag

SEQ ID NO: 12994 - DNA, 20 bp, Artificial Sequence
  Antisense compound
aagcacagaaggaaagcaca

SEQ ID NO: 12995 - DNA, 20 bp, Artificial Sequence
  Antisense compound
aaagcacagaaggaaagcac

SEQ ID NO: 12996 - DNA, 20 bp, Artificial Sequence
  Antisense compound
aaaagcacagaaggaaagca

SEQ ID NO: 12997 - DNA, 20 bp, Artificial Sequence
  Antisense compound
caaaagcacagaaggaaagc

SEQ ID NO: 12998 - DNA, 20 bp, Artificial Sequence
  Antisense compound
gcaaaagcacagaaggaaag

SEQ ID NO: 12999 - DNA, 20 bp, Artificial Sequence
  Antisense compound
tgcaaaagcacagaaggaaa

SEQ ID NO: 13000 - DNA, 20 bp, Artificial Sequence
  Antisense compound
ctgcaaaagcacagaaggaa

SEQ ID NO: 13001 - DNA, 20 bp, Artificial Sequence
  Antisense compound
actgcaaaagcacagaagga

SEQ ID NO: 13002 - DNA, 20 bp, Artificial Sequence
  Antisense compound
tactgcaaaagcacagaagg

SEQ ID NO: 13003 - DNA, 20 bp, Artificial Sequence
  Antisense compound
ctactgcaaaagcacagaag

SEQ ID NO: 13004 - DNA, 20 bp, Artificial Sequence
  Antisense compound
tctactgcaaaagcacagaa

SEQ ID NO: 13005 - DNA, 20 bp, Artificial Sequence
  Antisense compound
gtctactgcaaaagcacaga

SEQ ID NO: 13006 - DNA, 20 bp, Artificial Sequence
  Antisense compound
ggtctactgcaaaagcacag

SEQ ID NO: 13007 - DNA, 20 bp, Artificial Sequence
  Antisense compound
gggtctactgcaaaagcaca

SEQ ID NO: 13008 - DNA, 20 bp, Artificial Sequence
  Antisense compound
agggtctactgcaaaagcac

SEQ ID NO: 13009 - DNA, 20 bp, Artificial Sequence
  Antisense compound
cagggtctactgcaaaagca

SEQ ID NO: 13010 - DNA, 20 bp, Artificial Sequence
  Antisense compound
gcagggtctactgcaaaagc

SEQ ID NO: 13011 - DNA, 20 bp, Artificial Sequence
  Antisense compound
agcagggtctactgcaaaag

SEQ ID NO: 13012 - DNA, 20 bp, Artificial Sequence
  Antisense compound
tagcagggtctactgcaaaa

SEQ ID NO: 13013 - DNA, 20 bp, Artificial Sequence
  Antisense compound
ttagcagggtctactgcaaa

SEQ ID NO: 13014 - DNA, 20 bp, Artificial Sequence
  Antisense compound
tttagcagggtctactgcaa

SEQ ID NO: 13015 - DNA, 20 bp, Artificial Sequence
  Antisense compound
ctttagcagggtctactgca

SEQ ID NO: 13016 - DNA, 20 bp, Artificial Sequence
  Antisense compound
gctttagcagggtctactgc

SEQ ID NO: 13017 - DNA, 20 bp, Artificial Sequence
  Antisense compound
tgctttagcagggtctactg

SEQ ID NO: 13018 - DNA, 20 bp, Artificial Sequence
  Antisense compound
atgctttagcagggtctact

SEQ ID NO: 13019 - DNA, 20 bp, Artificial Sequence
  Antisense compound
tatgctttagcagggtctac

SEQ ID NO: 13020 - DNA, 20 bp, Artificial Sequence
  Antisense compound
atatgctttagcagggtcta

SEQ ID NO: 13021 - DNA, 20 bp, Artificial Sequence
  Antisense compound
tatatgctttagcagggtct

SEQ ID NO: 13022 - DNA, 20 bp, Artificial Sequence
  Antisense compound
ttatatgctttagcagggtc

SEQ ID NO: 13023 - DNA, 20 bp, Artificial Sequence
  Antisense compound
cttatatgctttagcagggt

SEQ ID NO: 13024 - DNA, 20 bp, Artificial Sequence
  Antisense compound
ccttatatgctttagcaggg

SEQ ID NO: 13025 - DNA, 20 bp, Artificial Sequence
  Antisense compound
tccttatatgctttagcagg

SEQ ID NO: 13026 - DNA, 20 bp, Artificial Sequence
  Antisense compound
atccttatatgctttagcag

SEQ ID NO: 13027 - DNA, 20 bp, Artificial Sequence
  Antisense compound
aatccttatatgctttagca

SEQ ID NO: 13028 - DNA, 20 bp, Artificial Sequence
  Antisense compound
taatccttatatgctttagc

SEQ ID NO: 13029 - DNA, 20 bp, Artificial Sequence
  Antisense compound
gtaatccttatatgctttag

SEQ ID NO: 13030 - DNA, 20 bp, Artificial Sequence
  Antisense compound
ggtaatccttatatgcttta

SEQ ID NO: 13031 - DNA, 20 bp, Artificial Sequence
  Antisense compound
aggtaatccttatatgcttt

SEQ ID NO: 13032 - DNA, 20 bp, Artificial Sequence
  Antisense compound
taggtaatccttatatgctt

SEQ ID NO: 13033 - DNA, 20 bp, Artificial Sequence
  Antisense compound
ctaggtaatccttatatgct

SEQ ID NO: 13034 - DNA, 20 bp, Artificial Sequence
  Antisense compound
gctaggtaatccttatatgc

SEQ ID NO: 13035 - DNA, 20 bp, Artificial Sequence
  Antisense compound
tgctaggtaatccttatatg

SEQ ID NO: 13036 - DNA, 20 bp, Artificial Sequence
  Antisense compound
ttgctaggtaatccttatat

SEQ ID NO: 13037 - DNA, 20 bp, Artificial Sequence
  Antisense compound
cttgctaggtaatccttata

SEQ ID NO: 13038 - DNA, 20 bp, Artificial Sequence
  Antisense compound
acttgctaggtaatccttat

SEQ ID NO: 13039 - DNA, 20 bp, Artificial Sequence
  Antisense compound
cacttgctaggtaatcctta

SEQ ID NO: 13040 - DNA, 20 bp, Artificial Sequence
  Antisense compound
ccacttgctaggtaatcctt

SEQ ID NO: 13041 - DNA, 20 bp, Artificial Sequence
  Antisense compound
tccacttgctaggtaatcct

SEQ ID NO: 13042 - DNA, 20 bp, Artificial Sequence
  Antisense compound
ctccacttgctaggtaatcc

SEQ ID NO: 13043 - DNA, 20 bp, Artificial Sequence
  Antisense compound
cctccacttgctaggtaatc

SEQ ID NO: 13044 - DNA, 20 bp, Artificial Sequence
  Antisense compound
tcctccacttgctaggtaat

SEQ ID NO: 13045 - DNA, 20 bp, Artificial Sequence
  Antisense compound
gtcctccacttgctaggtaa

SEQ ID NO: 13046 - DNA, 20 bp, Artificial Sequence
  Antisense compound
tgtcctccacttgctaggta

SEQ ID NO: 13047 - DNA, 20 bp, Artificial Sequence
  Antisense compound
ttgtcctccacttgctaggt

SEQ ID NO: 13048 - DNA, 20 bp, Artificial Sequence
  Antisense compound
gttgtcctccacttgctagg

SEQ ID NO: 13049 - DNA, 20 bp, Artificial Sequence
  Antisense compound
ggttgtcctccacttgctag

SEQ ID NO: 13050 - DNA, 20 bp, Artificial Sequence
  Antisense compound
tggttgtcctccacttgcta

SEQ ID NO: 13051 - DNA, 20 bp, Artificial Sequence
  Antisense compound
ttggttgtcctccacttgct

SEQ ID NO: 13052 - DNA, 20 bp, Artificial Sequence
  Antisense compound
attggttgtcctccacttgc

SEQ ID NO: 13053 - DNA, 20 bp, Artificial Sequence
  Antisense compound
gattggttgtcctccacttg

SEQ ID NO: 13054 - DNA, 20 bp, Artificial Sequence
  Antisense compound
tgattggttgtcctccactt

SEQ ID NO: 13055 - DNA, 20 bp, Artificial Sequence
  Antisense compound
gtgattggttgtcctccact

SEQ ID NO: 13056 - DNA, 20 bp, Artificial Sequence
  Antisense compound
ggtgattggttgtcctccac

SEQ ID NO: 13057 - DNA, 20 bp, Artificial Sequence
  Antisense compound
tggtgattggttgtcctcca

SEQ ID NO: 13058 - DNA, 20 bp, Artificial Sequence
  Antisense compound
ttggtgattggttgtcctcc

SEQ ID NO: 13059 - DNA, 20 bp, Artificial Sequence
  Antisense compound
gttggtgattggttgtcctc

SEQ ID NO: 13060 - DNA, 20 bp, Artificial Sequence
  Antisense compound
agttggtgattggttgtcct

SEQ ID NO: 13061 - DNA, 20 bp, Artificial Sequence
  Antisense compound
cagttggtgattggttgtcc

SEQ ID NO: 13062 - DNA, 20 bp, Artificial Sequence
  Antisense compound
acagttggtgattggttgtc

SEQ ID NO: 13063 - DNA, 20 bp, Artificial Sequence
  Antisense compound
cacagttggtgattggttgt

SEQ ID NO: 13064 - DNA, 20 bp, Artificial Sequence
  Antisense compound
acacagttggtgattggttg

SEQ ID NO: 13065 - DNA, 20 bp, Artificial Sequence
  Antisense compound
cacacagttggtgattggtt

SEQ ID NO: 13066 - DNA, 20 bp, Artificial Sequence
  Antisense compound
tcacacagttggtgattggt

SEQ ID NO: 13067 - DNA, 20 bp, Artificial Sequence
  Antisense compound
ttcacacagttggtgattgg

SEQ ID NO: 13068 - DNA, 20 bp, Artificial Sequence
  Antisense compound
cttcacacagttggtgattg

SEQ ID NO: 13069 - DNA, 20 bp, Artificial Sequence
  Antisense compound
tcttcacacagttggtgatt

SEQ ID NO: 13070 - DNA, 20 bp, Artificial Sequence
  Antisense compound
atcttcacacagttggtgat

SEQ ID NO: 13071 - DNA, 20 bp, Artificial Sequence
  Antisense compound
catcttcacacagttggtga

SEQ ID NO: 13072 - DNA, 20 bp, Artificial Sequence
  Antisense compound
acatcttcacacagttggtg

SEQ ID NO: 13073 - DNA, 20 bp, Artificial Sequence
  Antisense compound
aacatcttcacacagttggt

SEQ ID NO: 13074 - DNA, 20 bp, Artificial Sequence
  Antisense compound
caacatcttcacacagttgg

SEQ ID NO: 13075 - DNA, 20 bp, Artificial Sequence
  Antisense compound
acaacatcttcacacagttg

SEQ ID NO: 13076 - DNA, 20 bp, Artificial Sequence
  Antisense compound
cacaacatcttcacacagtt

SEQ ID NO: 13077 - DNA, 20 bp, Artificial Sequence
  Antisense compound
acacaacatcttcacacagt

SEQ ID NO: 13078 - DNA, 20 bp, Artificial Sequence
  Antisense compound
tacacaacatcttcacacag

SEQ ID NO: 13079 - DNA, 20 bp, Artificial Sequence
  Antisense compound
gtacacaacatcttcacaca

SEQ ID NO: 13080 - DNA, 20 bp, Artificial Sequence
  Antisense compound
tgtacacaacatcttcacac

SEQ ID NO: 13081 - DNA, 20 bp, Artificial Sequence
  Antisense compound
gtgtacacaacatcttcaca

SEQ ID NO: 13082 - DNA, 20 bp, Artificial Sequence
  Antisense compound
tgtgtacacaacatcttcac

SEQ ID NO: 13083 - DNA, 20 bp, Artificial Sequence
  Antisense compound
gtgtgtacacaacatcttca

SEQ ID NO: 13084 - DNA, 20 bp, Artificial Sequence
  Antisense compound
tgtgtgtacacaacatcttc

SEQ ID NO: 13085 - DNA, 20 bp, Artificial Sequence
  Antisense compound
gtgtgtgtacacaacatctt

SEQ ID NO: 13086 - DNA, 20 bp, Artificial Sequence
  Antisense compound
agtgtgtgtacacaacatct

SEQ ID NO: 13087 - DNA, 20 bp, Artificial Sequence
  Antisense compound
cagtgtgtgtacacaacatc

SEQ ID NO: 13088 - DNA, 20 bp, Artificial Sequence
  Antisense compound
ccagtgtgtgtacacaacat

SEQ ID NO: 13089 - DNA, 20 bp, Artificial Sequence
  Antisense compound
accagtgtgtgtacacaaca

SEQ ID NO: 13090 - DNA, 20 bp, Artificial Sequence
  Antisense compound
taccagtgtgtgtacacaac

SEQ ID NO: 13091 - DNA, 20 bp, Artificial Sequence
  Antisense compound
gtaccagtgtgtgtacacaa

SEQ ID NO: 13092 - DNA, 20 bp, Artificial Sequence
  Antisense compound
tgtaccagtgtgtgtacaca

SEQ ID NO: 13093 - DNA, 20 bp, Artificial Sequence
  Antisense compound
ctgtaccagtgtgtgtacac

SEQ ID NO: 13094 - DNA, 20 bp, Artificial Sequence
  Antisense compound
cctgtaccagtgtgtgtaca

SEQ ID NO: 13095 - DNA, 20 bp, Artificial Sequence
  Antisense compound
tcctgtaccagtgtgtgtac

SEQ ID NO: 13096 - DNA, 20 bp, Artificial Sequence
  Antisense compound
gtcctgtaccagtgtgtgta

SEQ ID NO: 13097 - DNA, 20 bp, Artificial Sequence
  Antisense compound
tgtcctgtaccagtgtgtgt

SEQ ID NO: 13098 - DNA, 20 bp, Artificial Sequence
  Antisense compound
ctgtcctgtaccagtgtgtg

SEQ ID NO: 13099 - DNA, 20 bp, Artificial Sequence
  Antisense compound
cctgtcctgtaccagtgtgt

SEQ ID NO: 13100 - DNA, 20 bp, Artificial Sequence
  Antisense compound
gcctgtcctgtaccagtgtg

SEQ ID NO: 13101 - DNA, 20 bp, Artificial Sequence
  Antisense compound
tgcctgtcctgtaccagtgt

SEQ ID NO: 13102 - DNA, 20 bp, Artificial Sequence
  Antisense compound
ttgcctgtcctgtaccagtg

SEQ ID NO: 13103 - DNA, 20 bp, Artificial Sequence
  Antisense compound
attgcctgtcctgtaccagt

SEQ ID NO: 13104 - DNA, 20 bp, Artificial Sequence
  Antisense compound
aattgcctgtcctgtaccag

SEQ ID NO: 13105 - DNA, 20 bp, Artificial Sequence
  Antisense compound
taattgcctgtcctgtacca

SEQ ID NO: 13106 - DNA, 20 bp, Artificial Sequence
  Antisense compound
gtaattgcctgtcctgtacc

SEQ ID NO: 13107 - DNA, 20 bp, Artificial Sequence
  Antisense compound
agtaattgcctgtcctgtac

SEQ ID NO: 13108 - DNA, 20 bp, Artificial Sequence
  Antisense compound
cagtaattgcctgtcctgta

SEQ ID NO: 13109 - DNA, 20 bp, Artificial Sequence
  Antisense compound
acagtaattgcctgtcctgt

SEQ ID NO: 13110 - DNA, 20 bp, Artificial Sequence
  Antisense compound
tacagtaattgcctgtcctg

SEQ ID NO: 13111 - DNA, 20 bp, Artificial Sequence
  Antisense compound
ttacagtaattgcctgtcct

SEQ ID NO: 13112 - DNA, 20 bp, Artificial Sequence
  Antisense compound
gttacagtaattgcctgtcc

SEQ ID NO: 13113 - DNA, 20 bp, Artificial Sequence
  Antisense compound
tgttacagtaattgcctgtc

SEQ ID NO: 13114 - DNA, 20 bp, Artificial Sequence
  Antisense compound
gtgttacagtaattgcctgt

SEQ ID NO: 13115 - DNA, 20 bp, Artificial Sequence
  Antisense compound
ggtgttacagtaattgcctg

SEQ ID NO: 13116 - DNA, 20 bp, Artificial Sequence
  Antisense compound
tggtgttacagtaattgcct

SEQ ID NO: 13117 - DNA, 20 bp, Artificial Sequence
  Antisense compound
ctggtgttacagtaattgcc

SEQ ID NO: 13118 - DNA, 20 bp, Artificial Sequence
  Antisense compound
tctggtgttacagtaattgc

SEQ ID NO: 13119 - DNA, 20 bp, Artificial Sequence
  Antisense compound
ttctggtgttacagtaattg

SEQ ID NO: 13120 - DNA, 20 bp, Artificial Sequence
  Antisense compound
cttctggtgttacagtaatt

SEQ ID NO: 13121 - DNA, 20 bp, Artificial Sequence
  Antisense compound
gcttctggtgttacagtaat

SEQ ID NO: 13122 - DNA, 20 bp, Artificial Sequence
  Antisense compound
agcttctggtgttacagtaa

SEQ ID NO: 13123 - DNA, 20 bp, Artificial Sequence
  Antisense compound
tagcttctggtgttacagta

SEQ ID NO: 13124 - DNA, 20 bp, Artificial Sequence
  Antisense compound
ttagcttctggtgttacagt

SEQ ID NO: 13125 - DNA, 20 bp, Artificial Sequence
  Antisense compound
gttagcttctggtgttacag

SEQ ID NO: 13126 - DNA, 20 bp, Artificial Sequence
  Antisense compound
tgttagcttctggtgttaca

SEQ ID NO: 13127 - DNA, 20 bp, Artificial Sequence
  Antisense compound
atgttagcttctggtgttac

SEQ ID NO: 13128 - DNA, 20 bp, Artificial Sequence
  Antisense compound
catgttagcttctggtgtta

SEQ ID NO: 13129 - DNA, 20 bp, Artificial Sequence
  Antisense compound
ccatgttagcttctggtgtt

SEQ ID NO: 13130 - DNA, 20 bp, Artificial Sequence
  Antisense compound
tccatgttagcttctggtgt

SEQ ID NO: 13131 - DNA, 20 bp, Artificial Sequence
  Antisense compound
gtccatgttagcttctggtg

SEQ ID NO: 13132 - DNA, 20 bp, Artificial Sequence
  Antisense compound
ggtccatgttagcttctggt

SEQ ID NO: 13133 - DNA, 20 bp, Artificial Sequence
  Antisense compound
tggtccatgttagcttctgg

SEQ ID NO: 13134 - DNA, 20 bp, Artificial Sequence
  Antisense compound
ttggtccatgttagcttctg

SEQ ID NO: 13135 - DNA, 20 bp, Artificial Sequence
  Antisense compound
cttggtccatgttagcttct

SEQ ID NO: 13136 - DNA, 20 bp, Artificial Sequence
  Antisense compound
tcttggtccatgttagcttc

SEQ ID NO: 13137 - DNA, 20 bp, Artificial Sequence
  Antisense compound
ctcttggtccatgttagctt

SEQ ID NO: 13138 - DNA, 20 bp, Artificial Sequence
  Antisense compound
actcttggtccatgttagct

SEQ ID NO: 13139 - DNA, 20 bp, Artificial Sequence
  Antisense compound
gactcttggtccatgttagc

SEQ ID NO: 13140 - DNA, 20 bp, Artificial Sequence
  Antisense compound
ggactcttggtccatgttag

SEQ ID NO: 13141 - DNA, 20 bp, Artificial Sequence
  Antisense compound
aggactcttggtccatgtta

SEQ ID NO: 13142 - DNA, 20 bp, Artificial Sequence
  Antisense compound
aaggactcttggtccatgtt

SEQ ID NO: 13143 - DNA, 20 bp, Artificial Sequence
  Antisense compound
aaaggactcttggtccatgt

SEQ ID NO: 13144 - DNA, 20 bp, Artificial Sequence
  Antisense compound
caaaggactcttggtccatg

SEQ ID NO: 13145 - DNA, 20 bp, Artificial Sequence
  Antisense compound
ccaaaggactcttggtccat

SEQ ID NO: 13146 - DNA, 20 bp, Artificial Sequence
  Antisense compound
accaaaggactcttggtcca

SEQ ID NO: 13147 - DNA, 20 bp, Artificial Sequence
  Antisense compound
caccaaaggactcttggtcc

SEQ ID NO: 13148 - DNA, 20 bp, Artificial Sequence
  Antisense compound
ccaccaaaggactcttggtc

SEQ ID NO: 13149 - DNA, 20 bp, Artificial Sequence
  Antisense compound
accaccaaaggactcttggt

SEQ ID NO: 13150 - DNA, 20 bp, Artificial Sequence
  Antisense compound
caccaccaaaggactcttgg

SEQ ID NO: 13151 - DNA, 20 bp, Artificial Sequence
  Antisense compound
gcaccaccaaaggactcttg

SEQ ID NO: 13152 - DNA, 20 bp, Artificial Sequence
  Antisense compound
agcaccaccaaaggactctt

SEQ ID NO: 13153 - DNA, 20 bp, Artificial Sequence
  Antisense compound
aagcaccaccaaaggactct

SEQ ID NO: 13154 - DNA, 20 bp, Artificial Sequence
  Antisense compound
gaagcaccaccaaaggactc

SEQ ID NO: 13155 - DNA, 20 bp, Artificial Sequence
  Antisense compound
tgaagcaccaccaaaggact

SEQ ID NO: 13156 - DNA, 20 bp, Artificial Sequence
  Antisense compound
atgaagcaccaccaaaggac

SEQ ID NO: 13157 - DNA, 20 bp, Artificial Sequence
  Antisense compound
catgaagcaccaccaaagga

SEQ ID NO: 13158 - DNA, 20 bp, Artificial Sequence
  Antisense compound
acatgaagcaccaccaaagg

SEQ ID NO: 13159 - DNA, 20 bp, Artificial Sequence
  Antisense compound
aacatgaagcaccaccaaag

SEQ ID NO: 13160 - DNA, 20 bp, Artificial Sequence
  Antisense compound
caacatgaagcaccaccaaa

SEQ ID NO: 13161 - DNA, 20 bp, Artificial Sequence
  Antisense compound
acaacatgaagcaccaccaa

SEQ ID NO: 13162 - DNA, 20 bp, Artificial Sequence
  Antisense compound
gacaacatgaagcaccacca

SEQ ID NO: 13163 - DNA, 20 bp, Artificial Sequence
  Antisense compound
agacaacatgaagcaccacc

SEQ ID NO: 13164 - DNA, 20 bp, Artificial Sequence
  Antisense compound
cagacaacatgaagcaccac

SEQ ID NO: 13165 - DNA, 20 bp, Artificial Sequence
  Antisense compound
acagacaacatgaagcacca

SEQ ID NO: 13166 - DNA, 20 bp, Artificial Sequence
  Antisense compound
tacagacaacatgaagcacc

SEQ ID NO: 13167 - DNA, 20 bp, Artificial Sequence
  Antisense compound
atacagacaacatgaagcac

SEQ ID NO: 13168 - DNA, 20 bp, Artificial Sequence
  Antisense compound
aatacagacaacatgaagca

SEQ ID NO: 13169 - DNA, 20 bp, Artificial Sequence
  Antisense compound
caatacagacaacatgaagc

SEQ ID NO: 13170 - DNA, 20 bp, Artificial Sequence
  Antisense compound
acaatacagacaacatgaag

SEQ ID NO: 13171 - DNA, 20 bp, Artificial Sequence
  Antisense compound
tacaatacagacaacatgaa

SEQ ID NO: 13172 - DNA, 20 bp, Artificial Sequence
  Antisense compound
ctacaatacagacaacatga

SEQ ID NO: 13173 - DNA, 20 bp, Artificial Sequence
  Antisense compound
tctacaatacagacaacatg

SEQ ID NO: 13174 - DNA, 20 bp, Artificial Sequence
  Antisense compound
atctacaatacagacaacat

SEQ ID NO: 13175 - DNA, 20 bp, Artificial Sequence
  Antisense compound
catctacaatacagacaaca

SEQ ID NO: 13176 - DNA, 20 bp, Artificial Sequence
  Antisense compound
gcatctacaatacagacaac

SEQ ID NO: 13177 - DNA, 20 bp, Artificial Sequence
  Antisense compound
ggcatctacaatacagacaa

SEQ ID NO: 13178 - DNA, 20 bp, Artificial Sequence
  Antisense compound
tggcatctacaatacagaca

SEQ ID NO: 13179 - DNA, 20 bp, Artificial Sequence
  Antisense compound
gtggcatctacaatacagac

SEQ ID NO: 13180 - DNA, 20 bp, Artificial Sequence
  Antisense compound
tgtggcatctacaatacaga

SEQ ID NO: 13181 - DNA, 20 bp, Artificial Sequence
  Antisense compound
atgtggcatctacaatacag

SEQ ID NO: 13182 - DNA, 20 bp, Artificial Sequence
  Antisense compound
aatgtggcatctacaataca

SEQ ID NO: 13183 - DNA, 20 bp, Artificial Sequence
  Antisense compound
caatgtggcatctacaatac

SEQ ID NO: 13184 - DNA, 20 bp, Artificial Sequence
  Antisense compound
tcaatgtggcatctacaata

SEQ ID NO: 13185 - DNA, 20 bp, Artificial Sequence
  Antisense compound
gtcaatgtggcatctacaat

SEQ ID NO: 13186 - DNA, 20 bp, Artificial Sequence
  Antisense compound
ggtcaatgtggcatctacaa

SEQ ID NO: 13187 - DNA, 20 bp, Artificial Sequence
  Antisense compound
tggtcaatgtggcatctaca

SEQ ID NO: 13188 - DNA, 20 bp, Artificial Sequence
  Antisense compound
atggtcaatgtggcatctac

SEQ ID NO: 13189 - DNA, 20 bp, Artificial Sequence
  Antisense compound
gatggtcaatgtggcatcta

SEQ ID NO: 13190 - DNA, 20 bp, Artificial Sequence
  Antisense compound
ggatggtcaatgtggcatct

SEQ ID NO: 13191 - DNA, 20 bp, Artificial Sequence
  Antisense compound
tggatggtcaatgtggcatc

SEQ ID NO: 13192 - DNA, 20 bp, Artificial Sequence
  Antisense compound
ttggatggtcaatgtggcat

SEQ ID NO: 13193 - DNA, 20 bp, Artificial Sequence
  Antisense compound
tttggatggtcaatgtggca

SEQ ID NO: 13194 - DNA, 20 bp, Artificial Sequence
  Antisense compound
atttggatggtcaatgtggc

SEQ ID NO: 13195 - DNA, 20 bp, Artificial Sequence
  Antisense compound
gatttggatggtcaatgtgg

SEQ ID NO: 13196 - DNA, 20 bp, Artificial Sequence
  Antisense compound
ggatttggatggtcaatgtg

SEQ ID NO: 13197 - DNA, 20 bp, Artificial Sequence
  Antisense compound
aggatttggatggtcaatgt

SEQ ID NO: 13198 - DNA, 20 bp, Artificial Sequence
  Antisense compound
taggatttggatggtcaatg

SEQ ID NO: 13199 - DNA, 20 bp, Artificial Sequence
  Antisense compound
ttaggatttggatggtcaat

SEQ ID NO: 13200 - DNA, 20 bp, Artificial Sequence
  Antisense compound
tttaggatttggatggtcaa

SEQ ID NO: 13201 - DNA, 20 bp, Artificial Sequence
  Antisense compound
ctttaggatttggatggtca

SEQ ID NO: 13202 - DNA, 20 bp, Artificial Sequence
  Antisense compound
cctttaggatttggatggtc

SEQ ID NO: 13203 - DNA, 20 bp, Artificial Sequence
  Antisense compound
tcctttaggatttggatggt

SEQ ID NO: 13204 - DNA, 20 bp, Artificial Sequence
  Antisense compound
atcctttaggatttggatgg

SEQ ID NO: 13205 - DNA, 20 bp, Artificial Sequence
  Antisense compound
aatcctttaggatttggatg

SEQ ID NO: 13206 - DNA, 20 bp, Artificial Sequence
  Antisense compound
gaatcctttaggatttggat

SEQ ID NO: 13207 - DNA, 20 bp, Artificial Sequence
  Antisense compound
agaatcctttaggatttgga

SEQ ID NO: 13208 - DNA, 20 bp, Artificial Sequence
  Antisense compound
cagaatcctttaggatttgg

SEQ ID NO: 13209 - DNA, 20 bp, Artificial Sequence
  Antisense compound
acagaatcctttaggatttg

SEQ ID NO: 13210 - DNA, 20 bp, Artificial Sequence
  Antisense compound
cacagaatcctttaggattt

SEQ ID NO: 13211 - DNA, 20 bp, Artificial Sequence
  Antisense compound
tcacagaatcctttaggatt

SEQ ID NO: 13212 - DNA, 20 bp, Artificial Sequence
  Antisense compound
gtcacagaatcctttaggat

SEQ ID NO: 13213 - DNA, 20 bp, Artificial Sequence
  Antisense compound
agtcacagaatcctttagga

SEQ ID NO: 13214 - DNA, 20 bp, Artificial Sequence
  Antisense compound
aagtcacagaatcctttagg

SEQ ID NO: 13215 - DNA, 20 bp, Artificial Sequence
  Antisense compound
caagtcacagaatcctttag

SEQ ID NO: 13216 - DNA, 20 bp, Artificial Sequence
  Antisense compound
tcaagtcacagaatccttta

SEQ ID NO: 13217 - DNA, 20 bp, Artificial Sequence
  Antisense compound
ttcaagtcacagaatccttt

SEQ ID NO: 13218 - DNA, 20 bp, Artificial Sequence
  Antisense compound
tttcaagtcacagaatcctt

SEQ ID NO: 13219 - DNA, 20 bp, Artificial Sequence
  Antisense compound
ctttcaagtcacagaatcct

SEQ ID NO: 13220 - DNA, 20 bp, Artificial Sequence
  Antisense compound
cctttcaagtcacagaatcc

SEQ ID NO: 13221 - DNA, 20 bp, Artificial Sequence
  Antisense compound
acctttcaagtcacagaatc

SEQ ID NO: 13222 - DNA, 20 bp, Artificial Sequence
  Antisense compound
tacctttcaagtcacagaat

SEQ ID NO: 13223 - DNA, 20 bp, Artificial Sequence
  Antisense compound
ttacctttcaagtcacagaa

SEQ ID NO: 13224 - DNA, 20 bp, Artificial Sequence
  Antisense compound
cttacctttcaagtcacaga

SEQ ID NO: 13225 - DNA, 20 bp, Artificial Sequence
  Antisense compound
acttacctttcaagtcacag

SEQ ID NO: 13226 - DNA, 20 bp, Artificial Sequence
  Antisense compound
tacttacctttcaagtcaca

SEQ ID NO: 13227 - DNA, 20 bp, Artificial Sequence
  Antisense compound
gtacttacctttcaagtcac

SEQ ID NO: 13228 - DNA, 20 bp, Artificial Sequence
  Antisense compound
cgtacttacctttcaagtca

SEQ ID NO: 13229 - DNA, 20 bp, Artificial Sequence
  Antisense compound
acgtacttacctttcaagtc

SEQ ID NO: 13230 - DNA, 20 bp, Artificial Sequence
  Antisense compound
gacgtacttacctttcaagt

SEQ ID NO: 13231 - DNA, 20 bp, Artificial Sequence
  Antisense compound
ggacgtacttacctttcaag

SEQ ID NO: 13232 - DNA, 20 bp, Artificial Sequence
  Antisense compound
tggacgtacttacctttcaa

SEQ ID NO: 13233 - DNA, 20 bp, Artificial Sequence
  Antisense compound
ttggacgtacttacctttca

SEQ ID NO: 13234 - DNA, 20 bp, Artificial Sequence
  Antisense compound
tttggacgtacttacctttc

SEQ ID NO: 13235 - DNA, 20 bp, Artificial Sequence
  Antisense compound
atttggacgtacttaccttt

SEQ ID NO: 13236 - DNA, 20 bp, Artificial Sequence
  Antisense compound
tatttggacgtacttacctt

SEQ ID NO: 13237 - DNA, 20 bp, Artificial Sequence
  Antisense compound
gtatttggacgtacttacct

SEQ ID NO: 13238 - DNA, 20 bp, Artificial Sequence
  Antisense compound
ggtatttggacgtacttacc

SEQ ID NO: 13239 - DNA, 20 bp, Artificial Sequence
  Antisense compound
aggtatttggacgtacttac

SEQ ID NO: 13240 - DNA, 20 bp, Artificial Sequence
  Antisense compound
taggtatttggacgtactta

SEQ ID NO: 13241 - DNA, 20 bp, Artificial Sequence
  Antisense compound
gtaggtatttggacgtactt

SEQ ID NO: 13242 - DNA, 20 bp, Artificial Sequence
  Antisense compound
ggtaggtatttggacgtact

SEQ ID NO: 13243 - DNA, 20 bp, Artificial Sequence
  Antisense compound
tggtaggtatttggacgtac

SEQ ID NO: 13244 - DNA, 20 bp, Artificial Sequence
  Antisense compound
gtggtaggtatttggacgta

SEQ ID NO: 13245 - DNA, 20 bp, Artificial Sequence
  Antisense compound
agtggtaggtatttggacgt

SEQ ID NO: 13246 - DNA, 20 bp, Artificial Sequence
  Antisense compound
aagtggtaggtatttggacg

SEQ ID NO: 13247 - DNA, 20 bp, Artificial Sequence
  Antisense compound
caagtggtaggtatttggac

SEQ ID NO: 13248 - DNA, 20 bp, Artificial Sequence
  Antisense compound
acaagtggtaggtatttgga

SEQ ID NO: 13249 - DNA, 20 bp, Artificial Sequence
  Antisense compound
cacaagtggtaggtatttgg

SEQ ID NO: 13250 - DNA, 20 bp, Artificial Sequence
  Antisense compound
gcacaagtggtaggtatttg

SEQ ID NO: 13251 - DNA, 20 bp, Artificial Sequence
  Antisense compound
agcacaagtggtaggtattt

SEQ ID NO: 13252 - DNA, 20 bp, Artificial Sequence
  Antisense compound
tagcacaagtggtaggtatt

SEQ ID NO: 13253 - DNA, 20 bp, Artificial Sequence
  Antisense compound
ttagcacaagtggtaggtat

SEQ ID NO: 13254 - DNA, 20 bp, Artificial Sequence
  Antisense compound
attagcacaagtggtaggta

SEQ ID NO: 13255 - DNA, 20 bp, Artificial Sequence
  Antisense compound
cattagcacaagtggtaggt

SEQ ID NO: 13256 - DNA, 20 bp, Artificial Sequence
  Antisense compound
tcattagcacaagtggtagg

SEQ ID NO: 13257 - DNA, 20 bp, Artificial Sequence
  Antisense compound
gtcattagcacaagtggtag

SEQ ID NO: 13258 - DNA, 20 bp, Artificial Sequence
  Antisense compound
ggtcattagcacaagtggta

SEQ ID NO: 13259 - DNA, 20 bp, Artificial Sequence
  Antisense compound
gggtcattagcacaagtggt

SEQ ID NO: 13260 - DNA, 20 bp, Artificial Sequence
  Antisense compound
tgggtcattagcacaagtgg

SEQ ID NO: 13261 - DNA, 20 bp, Artificial Sequence
  Antisense compound
ctgggtcattagcacaagtg

SEQ ID NO: 13262 - DNA, 20 bp, Artificial Sequence
  Antisense compound
actgggtcattagcacaagt

SEQ ID NO: 13263 - DNA, 20 bp, Artificial Sequence
  Antisense compound
cactgggtcattagcacaag

SEQ ID NO: 13264 - DNA, 20 bp, Artificial Sequence
  Antisense compound
ccactgggtcattagcacaa

SEQ ID NO: 13265 - DNA, 20 bp, Artificial Sequence
  Antisense compound
cccactgggtcattagcaca

SEQ ID NO: 13266 - DNA, 20 bp, Artificial Sequence
  Antisense compound
acccactgggtcattagcac

SEQ ID NO: 13267 - DNA, 20 bp, Artificial Sequence
  Antisense compound
aacccactgggtcattagca

SEQ ID NO: 13268 - DNA, 20 bp, Artificial Sequence
  Antisense compound
aaacccactgggtcattagc

SEQ ID NO: 13269 - DNA, 20 bp, Artificial Sequence
  Antisense compound
aaaacccactgggtcattag

SEQ ID NO: 13270 - DNA, 20 bp, Artificial Sequence
  Antisense compound
taaaacccactgggtcatta

SEQ ID NO: 13271 - DNA, 20 bp, Artificial Sequence
  Antisense compound
gtaaaacccactgggtcatt

SEQ ID NO: 13272 - DNA, 20 bp, Artificial Sequence
  Antisense compound
tgtaaaacccactgggtcat

SEQ ID NO: 13273 - DNA, 20 bp, Artificial Sequence
  Antisense compound
gtgtaaaacccactgggtca

SEQ ID NO: 13274 - DNA, 20 bp, Artificial Sequence
  Antisense compound
agtgtaaaacccactgggtc

SEQ ID NO: 13275 - DNA, 20 bp, Artificial Sequence
  Antisense compound
aagtgtaaaacccactgggt

SEQ ID NO: 13276 - DNA, 20 bp, Artificial Sequence
  Antisense compound
taagtgtaaaacccactggg

SEQ ID NO: 13277 - DNA, 20 bp, Artificial Sequence
  Antisense compound
ctaagtgtaaaacccactgg

SEQ ID NO: 13278 - DNA, 20 bp, Artificial Sequence
  Antisense compound
tctaagtgtaaaacccactg

SEQ ID NO: 13279 - DNA, 20 bp, Artificial Sequence
  Antisense compound
ttctaagtgtaaaacccact

SEQ ID NO: 13280 - DNA, 20 bp, Artificial Sequence
  Antisense compound
tttctaagtgtaaaacccac

SEQ ID NO: 13281 - DNA, 20 bp, Artificial Sequence
  Antisense compound
gtttctaagtgtaaaaccca

SEQ ID NO: 13282 - DNA, 20 bp, Artificial Sequence
  Antisense compound
tgtttctaagtgtaaaaccc

SEQ ID NO: 13283 - DNA, 20 bp, Artificial Sequence
  Antisense compound
gtgtttctaagtgtaaaacc

SEQ ID NO: 13284 - DNA, 20 bp, Artificial Sequence
  Antisense compound
tgtgtttctaagtgtaaaac

SEQ ID NO: 13285 - DNA, 20 bp, Artificial Sequence
  Antisense compound
ctgtgtttctaagtgtaaaa

SEQ ID NO: 13286 - DNA, 20 bp, Artificial Sequence
  Antisense compound
actgtgtttctaagtgtaaa

SEQ ID NO: 13287 - DNA, 20 bp, Artificial Sequence
  Antisense compound
gactgtgtttctaagtgtaa

SEQ ID NO: 13288 - DNA, 20 bp, Artificial Sequence
  Antisense compound
agactgtgtttctaagtgta

SEQ ID NO: 13289 - DNA, 20 bp, Artificial Sequence
  Antisense compound
cagactgtgtttctaagtgt

SEQ ID NO: 13290 - DNA, 20 bp, Artificial Sequence
  Antisense compound
acagactgtgtttctaagtg

SEQ ID NO: 13291 - DNA, 20 bp, Artificial Sequence
  Antisense compound
tacagactgtgtttctaagt

SEQ ID NO: 13292 - DNA, 20 bp, Artificial Sequence
  Antisense compound
gtacagactgtgtttctaag

SEQ ID NO: 13293 - DNA, 20 bp, Artificial Sequence
  Antisense compound
ggtacagactgtgtttctaa

SEQ ID NO: 13294 - DNA, 20 bp, Artificial Sequence
  Antisense compound
cggtacagactgtgtttcta

SEQ ID NO: 13295 - DNA, 20 bp, Artificial Sequence
  Antisense compound
acggtacagactgtgtttct

SEQ ID NO: 13296 - DNA, 20 bp, Artificial Sequence
  Antisense compound
gacggtacagactgtgtttc

SEQ ID NO: 13297 - DNA, 20 bp, Artificial Sequence
  Antisense compound
agacggtacagactgtgttt

SEQ ID NO: 13298 - DNA, 20 bp, Artificial Sequence
  Antisense compound
cagacggtacagactgtgtt

SEQ ID NO: 13299 - DNA, 20 bp, Artificial Sequence
  Antisense compound
gcagacggtacagactgtgt

SEQ ID NO: 13300 - DNA, 20 bp, Artificial Sequence
  Antisense compound
cgcagacggtacagactgtg

SEQ ID NO: 13301 - DNA, 20 bp, Artificial Sequence
  Antisense compound
ccgcagacggtacagactgt

SEQ ID NO: 13302 - DNA, 20 bp, Artificial Sequence
  Antisense compound
tccgcagacggtacagactg

SEQ ID NO: 13303 - DNA, 20 bp, Artificial Sequence
  Antisense compound
ttccgcagacggtacagact

SEQ ID NO: 13304 - DNA, 20 bp, Artificial Sequence
  Antisense compound
attccgcagacggtacagac

SEQ ID NO: 13305 - DNA, 20 bp, Artificial Sequence
  Antisense compound
cattccgcagacggtacaga

SEQ ID NO: 13306 - DNA, 20 bp, Artificial Sequence
  Antisense compound
acattccgcagacggtacag

SEQ ID NO: 13307 - DNA, 20 bp, Artificial Sequence
  Antisense compound
cacattccgcagacggtaca

SEQ ID NO: 13308 - DNA, 20 bp, Artificial Sequence
  Antisense compound
ccacattccgcagacggtac

SEQ ID NO: 13309 - DNA, 20 bp, Artificial Sequence
  Antisense compound
tccacattccgcagacggta

SEQ ID NO: 13310 - DNA, 20 bp, Artificial Sequence
  Antisense compound
ttccacattccgcagacggt

SEQ ID NO: 13311 - DNA, 20 bp, Artificial Sequence
  Antisense compound
tttccacattccgcagacgg

SEQ ID NO: 13312 - DNA, 20 bp, Artificial Sequence
  Antisense compound
ctttccacattccgcagacg

SEQ ID NO: 13313 - DNA, 20 bp, Artificial Sequence
  Antisense compound
cctttccacattccgcagac

SEQ ID NO: 13314 - DNA, 20 bp, Artificial Sequence
  Antisense compound
acctttccacattccgcaga

SEQ ID NO: 13315 - DNA, 20 bp, Artificial Sequence
  Antisense compound
aacctttccacattccgcag

SEQ ID NO: 13316 - DNA, 20 bp, Artificial Sequence
  Antisense compound
taacctttccacattccgca

SEQ ID NO: 13317 - DNA, 20 bp, Artificial Sequence
  Antisense compound
ataacctttccacattccgc

SEQ ID NO: 13318 - DNA, 20 bp, Artificial Sequence
  Antisense compound
cataacctttccacattccg

SEQ ID NO: 13319 - DNA, 20 bp, Artificial Sequence
  Antisense compound
ccataacctttccacattcc

SEQ ID NO: 13320 - DNA, 20 bp, Artificial Sequence
  Antisense compound
gccataacctttccacattc

SEQ ID NO: 13321 - DNA, 20 bp, Artificial Sequence
  Antisense compound
agccataacctttccacatt

SEQ ID NO: 13322 - DNA, 20 bp, Artificial Sequence
  Antisense compound
cagccataacctttccacat

SEQ ID NO: 13323 - DNA, 20 bp, Artificial Sequence
  Antisense compound
acagccataacctttccaca

SEQ ID NO: 13324 - DNA, 20 bp, Artificial Sequence
  Antisense compound
tacagccataacctttccac

SEQ ID NO: 13325 - DNA, 20 bp, Artificial Sequence
  Antisense compound
ctacagccataacctttcca

SEQ ID NO: 13326 - DNA, 20 bp, Artificial Sequence
  Antisense compound
actacagccataacctttcc

SEQ ID NO: 13327 - DNA, 20 bp, Artificial Sequence
  Antisense compound
aactacagccataacctttc

SEQ ID NO: 13328 - DNA, 20 bp, Artificial Sequence
  Antisense compound
caactacagccataaccttt

SEQ ID NO: 13329 - DNA, 20 bp, Artificial Sequence
  Antisense compound
acaactacagccataacctt

SEQ ID NO: 13330 - DNA, 20 bp, Artificial Sequence
  Antisense compound
cacaactacagccataacct

SEQ ID NO: 13331 - DNA, 20 bp, Artificial Sequence
  Antisense compound
tcacaactacagccataacc

SEQ ID NO: 13332 - DNA, 20 bp, Artificial Sequence
  Antisense compound
gtcacaactacagccataac

SEQ ID NO: 13333 - DNA, 20 bp, Artificial Sequence
  Antisense compound
ggtcacaactacagccataa

SEQ ID NO: 13334 - DNA, 20 bp, Artificial Sequence
  Antisense compound
tggtcacaactacagccata

SEQ ID NO: 13335 - DNA, 20 bp, Artificial Sequence
  Antisense compound
ttggtcacaactacagccat

SEQ ID NO: 13336 - DNA, 20 bp, Artificial Sequence
  Antisense compound
gttggtcacaactacagcca

SEQ ID NO: 13337 - DNA, 20 bp, Artificial Sequence
  Antisense compound
agttggtcacaactacagcc

SEQ ID NO: 13338 - DNA, 20 bp, Artificial Sequence
  Antisense compound
gagttggtcacaactacagc

SEQ ID NO: 13339 - DNA, 20 bp, Artificial Sequence
  Antisense compound
ggagttggtcacaactacag

SEQ ID NO: 13340 - DNA, 20 bp, Artificial Sequence
  Antisense compound
cggagttggtcacaactaca

SEQ ID NO: 13341 - DNA, 20 bp, Artificial Sequence
  Antisense compound
gcggagttggtcacaactac

SEQ ID NO: 13342 - DNA, 20 bp, Artificial Sequence
  Antisense compound
cgcggagttggtcacaacta

SEQ ID NO: 13343 - DNA, 20 bp, Artificial Sequence
  Antisense compound
tcgcggagttggtcacaact

SEQ ID NO: 13344 - DNA, 20 bp, Artificial Sequence
  Antisense compound
ttcgcggagttggtcacaac

SEQ ID NO: 13345 - DNA, 20 bp, Artificial Sequence
  Antisense compound
gttcgcggagttggtcacaa

SEQ ID NO: 13346 - DNA, 20 bp, Artificial Sequence
  Antisense compound
ggttcgcggagttggtcaca

SEQ ID NO: 13347 - DNA, 20 bp, Artificial Sequence
  Antisense compound
gggttcgcggagttggtcac

SEQ ID NO: 13348 - DNA, 20 bp, Artificial Sequence
  Antisense compound
agggttcgcggagttggtca

SEQ ID NO: 13349 - DNA, 20 bp, Artificial Sequence
  Antisense compound
aagggttcgcggagttggtc

SEQ ID NO: 13350 - DNA, 20 bp, Artificial Sequence
  Antisense compound
caagggttcgcggagttggt

SEQ ID NO: 13351 - DNA, 20 bp, Artificial Sequence
  Antisense compound
tcaagggttcgcggagttgg

SEQ ID NO: 13352 - DNA, 20 bp, Artificial Sequence
  Antisense compound
atcaagggttcgcggagttg

SEQ ID NO: 13353 - DNA, 20 bp, Artificial Sequence
  Antisense compound
catcaagggttcgcggagtt

SEQ ID NO: 13354 - DNA, 20 bp, Artificial Sequence
  Antisense compound
gcatcaagggttcgcggagt

SEQ ID NO: 13355 - DNA, 20 bp, Artificial Sequence
  Antisense compound
tgcatcaagggttcgcggag

SEQ ID NO: 13356 - DNA, 20 bp, Artificial Sequence
  Antisense compound
ctgcatcaagggttcgcgga

SEQ ID NO: 13357 - DNA, 20 bp, Artificial Sequence
  Antisense compound
actgcatcaagggttcgcgg

SEQ ID NO: 13358 - DNA, 20 bp, Artificial Sequence
  Antisense compound
gactgcatcaagggttcgcg

SEQ ID NO: 13359 - DNA, 20 bp, Artificial Sequence
  Antisense compound
agactgcatcaagggttcgc

SEQ ID NO: 13360 - DNA, 20 bp, Artificial Sequence
  Antisense compound
cagactgcatcaagggttcg

SEQ ID NO: 13361 - DNA, 20 bp, Artificial Sequence
  Antisense compound
gcagactgcatcaagggttc

SEQ ID NO: 13362 - DNA, 20 bp, Artificial Sequence
  Antisense compound
cgcagactgcatcaagggtt

SEQ ID NO: 13363 - DNA, 20 bp, Artificial Sequence
  Antisense compound
ccgcagactgcatcaagggt

SEQ ID NO: 13364 - DNA, 20 bp, Artificial Sequence
  Antisense compound
tccgcagactgcatcaaggg

SEQ ID NO: 13365 - DNA, 20 bp, Artificial Sequence
  Antisense compound
atccgcagactgcatcaagg

SEQ ID NO: 13366 - DNA, 20 bp, Artificial Sequence
  Antisense compound
catccgcagactgcatcaag

SEQ ID NO: 13367 - DNA, 20 bp, Artificial Sequence
  Antisense compound
gcatccgcagactgcatcaa

SEQ ID NO: 13368 - DNA, 20 bp, Artificial Sequence
  Antisense compound
tgcatccgcagactgcatca

SEQ ID NO: 13369 - DNA, 20 bp, Artificial Sequence
  Antisense compound
atgcatccgcagactgcatc

SEQ ID NO: 13370 - DNA, 20 bp, Artificial Sequence
  Antisense compound
gatgcatccgcagactgcat

SEQ ID NO: 13371 - DNA, 20 bp, Artificial Sequence
  Antisense compound
tgatgcatccgcagactgca

SEQ ID NO: 13372 - DNA, 20 bp, Artificial Sequence
  Antisense compound
ttgatgcatccgcagactgc

SEQ ID NO: 13373 - DNA, 20 bp, Artificial Sequence
  Antisense compound
gttgatgcatccgcagactg

SEQ ID NO: 13374 - DNA, 20 bp, Artificial Sequence
  Antisense compound
cgttgatgcatccgcagact

SEQ ID NO: 13375 - DNA, 20 bp, Artificial Sequence
  Antisense compound
acgttgatgcatccgcagac

SEQ ID NO: 13376 - DNA, 20 bp, Artificial Sequence
  Antisense compound
aacgttgatgcatccgcaga

SEQ ID NO: 13377 - DNA, 20 bp, Artificial Sequence
  Antisense compound
aaacgttgatgcatccgcag

SEQ ID NO: 13378 - DNA, 20 bp, Artificial Sequence
  Antisense compound
aaaacgttgatgcatccgca

SEQ ID NO: 13379 - DNA, 20 bp, Artificial Sequence
  Antisense compound
aaaaacgttgatgcatccgc

SEQ ID NO: 13380 - DNA, 20 bp, Artificial Sequence
  Antisense compound
taaaaacgttgatgcatccg

SEQ ID NO: 13381 - DNA, 20 bp, Artificial Sequence
  Antisense compound
ttaaaaacgttgatgcatcc

SEQ ID NO: 13382 - DNA, 20 bp, Artificial Sequence
  Antisense compound
tttaaaaacgttgatgcatc

SEQ ID NO: 13383 - DNA, 20 bp, Artificial Sequence
  Antisense compound
gtttaaaaacgttgatgcat

SEQ ID NO: 13384 - DNA, 20 bp, Artificial Sequence
  Antisense compound
cgtttaaaaacgttgatgca

SEQ ID NO: 13385 - DNA, 20 bp, Artificial Sequence
  Antisense compound
ccgtttaaaaacgttgatgc

SEQ ID NO: 13386 - DNA, 20 bp, Artificial Sequence
  Antisense compound
cccgtttaaaaacgttgatg

SEQ ID NO: 13387 - DNA, 20 bp, Artificial Sequence
  Antisense compound
acccgtttaaaaacgttgat

SEQ ID NO: 13388 - DNA, 20 bp, Artificial Sequence
  Antisense compound
aacccgtttaaaaacgttga

SEQ ID NO: 13389 - DNA, 20 bp, Artificial Sequence
  Antisense compound
aaacccgtttaaaaacgttg

SEQ ID NO: 13390 - DNA, 20 bp, Artificial Sequence
  Antisense compound
caaacccgtttaaaaacgtt

SEQ ID NO: 13391 - DNA, 20 bp, Artificial Sequence
  Antisense compound
gcaaacccgtttaaaaacgt

SEQ ID NO: 13392 - DNA, 20 bp, Artificial Sequence
  Antisense compound
cgcaaacccgtttaaaaacg

SEQ ID NO: 13393 - DNA, 20 bp, Artificial Sequence
  Antisense compound
ccgcaaacccgtttaaaaac

SEQ ID NO: 13394 - DNA, 20 bp, Artificial Sequence
  Antisense compound
accgcaaacccgtttaaaaa

SEQ ID NO: 13395 - DNA, 20 bp, Artificial Sequence
  Antisense compound
caccgcaaacccgtttaaaa

SEQ ID NO: 13396 - DNA, 20 bp, Artificial Sequence
  Antisense compound
acaccgcaaacccgtttaaa

SEQ ID NO: 13397 - DNA, 20 bp, Artificial Sequence
  Antisense compound
tacaccgcaaacccgtttaa

SEQ ID NO: 13398 - DNA, 20 bp, Artificial Sequence
  Antisense compound
ttacaccgcaaacccgttta

SEQ ID NO: 13399 - DNA, 20 bp, Artificial Sequence
  Antisense compound
cttacaccgcaaacccgttt

SEQ ID NO: 13400 - DNA, 20 bp, Artificial Sequence
  Antisense compound
acttacaccgcaaacccgtt

SEQ ID NO: 13401 - DNA, 20 bp, Artificial Sequence
  Antisense compound
cacttacaccgcaaacccgt

SEQ ID NO: 13402 - DNA, 20 bp, Artificial Sequence
  Antisense compound
gcacttacaccgcaaacccg

SEQ ID NO: 13403 - DNA, 20 bp, Artificial Sequence
  Antisense compound
tgcacttacaccgcaaaccc

SEQ ID NO: 13404 - DNA, 20 bp, Artificial Sequence
  Antisense compound
ctgcacttacaccgcaaacc

SEQ ID NO: 13405 - DNA, 20 bp, Artificial Sequence
  Antisense compound
gctgcacttacaccgcaaac

SEQ ID NO: 13406 - DNA, 20 bp, Artificial Sequence
  Antisense compound
ggctgcacttacaccgcaaa

SEQ ID NO: 13407 - DNA, 20 bp, Artificial Sequence
  Antisense compound
gggctgcacttacaccgcaa

SEQ ID NO: 13408 - DNA, 20 bp, Artificial Sequence
  Antisense compound
cgggctgcacttacaccgca

SEQ ID NO: 13409 - DNA, 20 bp, Artificial Sequence
  Antisense compound
acgggctgcacttacaccgc

SEQ ID NO: 13410 - DNA, 20 bp, Artificial Sequence
  Antisense compound
gacgggctgcacttacaccg

SEQ ID NO: 13411 - DNA, 20 bp, Artificial Sequence
  Antisense compound
agacgggctgcacttacacc

SEQ ID NO: 13412 - DNA, 20 bp, Artificial Sequence
  Antisense compound
aagacgggctgcacttacac

SEQ ID NO: 13413 - DNA, 20 bp, Artificial Sequence
  Antisense compound
taagacgggctgcacttaca

SEQ ID NO: 13414 - DNA, 20 bp, Artificial Sequence
  Antisense compound
gtaagacgggctgcacttac

SEQ ID NO: 13415 - DNA, 20 bp, Artificial Sequence
  Antisense compound
tgtaagacgggctgcactta

SEQ ID NO: 13416 - DNA, 20 bp, Artificial Sequence
  Antisense compound
gtgtaagacgggctgcactt

SEQ ID NO: 13417 - DNA, 20 bp, Artificial Sequence
  Antisense compound
ggtgtaagacgggctgcact

SEQ ID NO: 13418 - DNA, 20 bp, Artificial Sequence
  Antisense compound
cggtgtaagacgggctgcac

SEQ ID NO: 13419 - DNA, 20 bp, Artificial Sequence
  Antisense compound
acggtgtaagacgggctgca

SEQ ID NO: 13420 - DNA, 20 bp, Artificial Sequence
  Antisense compound
cacggtgtaagacgggctgc

SEQ ID NO: 13421 - DNA, 20 bp, Artificial Sequence
  Antisense compound
gcacggtgtaagacgggctg

SEQ ID NO: 13422 - DNA, 20 bp, Artificial Sequence
  Antisense compound
cgcacggtgtaagacgggct

SEQ ID NO: 13423 - DNA, 20 bp, Artificial Sequence
  Antisense compound
ccgcacggtgtaagacgggc

SEQ ID NO: 13424 - DNA, 20 bp, Artificial Sequence
  Antisense compound
gccgcacggtgtaagacggg

SEQ ID NO: 13425 - DNA, 20 bp, Artificial Sequence
  Antisense compound
tgccgcacggtgtaagacgg

SEQ ID NO: 13426 - DNA, 20 bp, Artificial Sequence
  Antisense compound
gtgccgcacggtgtaagacg

SEQ ID NO: 13427 - DNA, 20 bp, Artificial Sequence
  Antisense compound
tgtgccgcacggtgtaagac

SEQ ID NO: 13428 - DNA, 20 bp, Artificial Sequence
  Antisense compound
ctgtgccgcacggtgtaaga

SEQ ID NO: 13429 - DNA, 20 bp, Artificial Sequence
  Antisense compound
cctgtgccgcacggtgtaag

SEQ ID NO: 13430 - DNA, 20 bp, Artificial Sequence
  Antisense compound
gcctgtgccgcacggtgtaa

SEQ ID NO: 13431 - DNA, 20 bp, Artificial Sequence
  Antisense compound
tgcctgtgccgcacggtgta

SEQ ID NO: 13432 - DNA, 20 bp, Artificial Sequence
  Antisense compound
gtgcctgtgccgcacggtgt

SEQ ID NO: 13433 - DNA, 20 bp, Artificial Sequence
  Antisense compound
agtgcctgtgccgcacggtg

SEQ ID NO: 13434 - DNA, 20 bp, Artificial Sequence
  Antisense compound
tagtgcctgtgccgcacggt

SEQ ID NO: 13435 - DNA, 20 bp, Artificial Sequence
  Antisense compound
ctagtgcctgtgccgcacgg

SEQ ID NO: 13436 - DNA, 20 bp, Artificial Sequence
  Antisense compound
actagtgcctgtgccgcacg

SEQ ID NO: 13437 - DNA, 20 bp, Artificial Sequence
  Antisense compound
tactagtgcctgtgccgcac

SEQ ID NO: 13438 - DNA, 20 bp, Artificial Sequence
  Antisense compound
gtactagtgcctgtgccgca

SEQ ID NO: 13439 - DNA, 20 bp, Artificial Sequence
  Antisense compound
agtactagtgcctgtgccgc

SEQ ID NO: 13440 - DNA, 20 bp, Artificial Sequence
  Antisense compound
cagtactagtgcctgtgccg

SEQ ID NO: 13441 - DNA, 20 bp, Artificial Sequence
  Antisense compound
tcagtactagtgcctgtgcc

SEQ ID NO: 13442 - DNA, 20 bp, Artificial Sequence
  Antisense compound
atcagtactagtgcctgtgc

SEQ ID NO: 13443 - DNA, 20 bp, Artificial Sequence
  Antisense compound
catcagtactagtgcctgtg

SEQ ID NO: 13444 - DNA, 20 bp, Artificial Sequence
  Antisense compound
acatcagtactagtgcctgt

SEQ ID NO: 13445 - DNA, 20 bp, Artificial Sequence
  Antisense compound
gacatcagtactagtgcctg

SEQ ID NO: 13446 - DNA, 20 bp, Artificial Sequence
  Antisense compound
cgacatcagtactagtgcct

SEQ ID NO: 13447 - DNA, 20 bp, Artificial Sequence
  Antisense compound
acgacatcagtactagtgcc

SEQ ID NO: 13448 - DNA, 20 bp, Artificial Sequence
  Antisense compound
gacgacatcagtactagtgc

SEQ ID NO: 13449 - DNA, 20 bp, Artificial Sequence
  Antisense compound
agacgacatcagtactagtg

SEQ ID NO: 13450 - DNA, 20 bp, Artificial Sequence
  Antisense compound
tagacgacatcagtactagt

SEQ ID NO: 13451 - DNA, 20 bp, Artificial Sequence
  Antisense compound
gtagacgacatcagtactag

SEQ ID NO: 13452 - DNA, 20 bp, Artificial Sequence
  Antisense compound
tgtagacgacatcagtacta

SEQ ID NO: 13453 - DNA, 20 bp, Artificial Sequence
  Antisense compound
ctgtagacgacatcagtact

SEQ ID NO: 13454 - DNA, 20 bp, Artificial Sequence
  Antisense compound
cctgtagacgacatcagtac

SEQ ID NO: 13455 - DNA, 20 bp, Artificial Sequence
  Antisense compound
ccctgtagacgacatcagta

SEQ ID NO: 13456 - DNA, 20 bp, Artificial Sequence
  Antisense compound
gccctgtagacgacatcagt

SEQ ID NO: 13457 - DNA, 20 bp, Artificial Sequence
  Antisense compound
agccctgtagacgacatcag

SEQ ID NO: 13458 - DNA, 20 bp, Artificial Sequence
  Antisense compound
aagccctgtagacgacatca

SEQ ID NO: 13459 - DNA, 20 bp, Artificial Sequence
  Antisense compound
aaagccctgtagacgacatc

SEQ ID NO: 13460 - DNA, 20 bp, Artificial Sequence
  Antisense compound
aaaagccctgtagacgacat

SEQ ID NO: 13461 - DNA, 20 bp, Artificial Sequence
  Antisense compound
caaaagccctgtagacgaca

SEQ ID NO: 13462 - DNA, 20 bp, Artificial Sequence
  Antisense compound
tcaaaagccctgtagacgac

SEQ ID NO: 13463 - DNA, 20 bp, Artificial Sequence
  Antisense compound
atcaaaagccctgtagacga

SEQ ID NO: 13464 - DNA, 20 bp, Artificial Sequence
  Antisense compound
tatcaaaagccctgtagacg

SEQ ID NO: 13465 - DNA, 20 bp, Artificial Sequence
  Antisense compound
atatcaaaagccctgtagac

SEQ ID NO: 13466 - DNA, 20 bp, Artificial Sequence
  Antisense compound
aatatcaaaagccctgtaga

SEQ ID NO: 13467 - DNA, 20 bp, Artificial Sequence
  Antisense compound
aaatatcaaaagccctgtag

SEQ ID NO: 13468 - DNA, 20 bp, Artificial Sequence
  Antisense compound
taaatatcaaaagccctgta

SEQ ID NO: 13469 - DNA, 20 bp, Artificial Sequence
  Antisense compound
gtaaatatcaaaagccctgt

SEQ ID NO: 13470 - DNA, 20 bp, Artificial Sequence
  Antisense compound
tgtaaatatcaaaagccctg

SEQ ID NO: 13471 - DNA, 20 bp, Artificial Sequence
  Antisense compound
ttgtaaatatcaaaagccct

SEQ ID NO: 13472 - DNA, 20 bp, Artificial Sequence
  Antisense compound
gttgtaaatatcaaaagccc

SEQ ID NO: 13473 - DNA, 20 bp, Artificial Sequence
  Antisense compound
cgttgtaaatatcaaaagcc

SEQ ID NO: 13474 - DNA, 20 bp, Artificial Sequence
  Antisense compound
tcgttgtaaatatcaaaagc

SEQ ID NO: 13475 - DNA, 20 bp, Artificial Sequence
  Antisense compound
ttcgttgtaaatatcaaaag

SEQ ID NO: 13476 - DNA, 20 bp, Artificial Sequence
  Antisense compound
tttcgttgtaaatatcaaaa

SEQ ID NO: 13477 - DNA, 20 bp, Artificial Sequence
  Antisense compound
ttttcgttgtaaatatcaaa

SEQ ID NO: 13478 - DNA, 20 bp, Artificial Sequence
  Antisense compound
tttttcgttgtaaatatcaa

SEQ ID NO: 13479 - DNA, 20 bp, Artificial Sequence
  Antisense compound
ctttttcgttgtaaatatca

SEQ ID NO: 13480 - DNA, 20 bp, Artificial Sequence
  Antisense compound
actttttcgttgtaaatatc

SEQ ID NO: 13481 - DNA, 20 bp, Artificial Sequence
  Antisense compound
aactttttcgttgtaaatat

SEQ ID NO: 13482 - DNA, 20 bp, Artificial Sequence
  Antisense compound
caactttttcgttgtaaata

SEQ ID NO: 13483 - DNA, 20 bp, Artificial Sequence
  Antisense compound
gcaactttttcgttgtaaat

SEQ ID NO: 13484 - DNA, 20 bp, Artificial Sequence
  Antisense compound
agcaactttttcgttgtaaa

SEQ ID NO: 13485 - DNA, 20 bp, Artificial Sequence
  Antisense compound
cagcaactttttcgttgtaa

SEQ ID NO: 13486 - DNA, 20 bp, Artificial Sequence
  Antisense compound
ccagcaactttttcgttgta

SEQ ID NO: 13487 - DNA, 20 bp, Artificial Sequence
  Antisense compound
accagcaactttttcgttgt

SEQ ID NO: 13488 - DNA, 20 bp, Artificial Sequence
  Antisense compound
aaccagcaactttttcgttg

SEQ ID NO: 13489 - DNA, 20 bp, Artificial Sequence
  Antisense compound
aaaccagcaactttttcgtt

SEQ ID NO: 13490 - DNA, 20 bp, Artificial Sequence
  Antisense compound
aaaaccagcaactttttcgt

SEQ ID NO: 13491 - DNA, 20 bp, Artificial Sequence
  Antisense compound
caaaaccagcaactttttcg

SEQ ID NO: 13492 - DNA, 20 bp, Artificial Sequence
  Antisense compound
gcaaaaccagcaactttttc

SEQ ID NO: 13493 - DNA, 20 bp, Artificial Sequence
  Antisense compound
tgcaaaaccagcaacttttt

SEQ ID NO: 13494 - DNA, 20 bp, Artificial Sequence
  Antisense compound
ttgcaaaaccagcaactttt

SEQ ID NO: 13495 - DNA, 20 bp, Artificial Sequence
  Antisense compound
tttgcaaaaccagcaacttt

SEQ ID NO: 13496 - DNA, 20 bp, Artificial Sequence
  Antisense compound
ctttgcaaaaccagcaactt

SEQ ID NO: 13497 - DNA, 20 bp, Artificial Sequence
  Antisense compound
actttgcaaaaccagcaact

SEQ ID NO: 13498 - DNA, 20 bp, Artificial Sequence
  Antisense compound
aactttgcaaaaccagcaac

SEQ ID NO: 13499 - DNA, 20 bp, Artificial Sequence
  Antisense compound
gaactttgcaaaaccagcaa

SEQ ID NO: 13500 - DNA, 20 bp, Artificial Sequence
  Antisense compound
ggaactttgcaaaaccagca

SEQ ID NO: 13501 - DNA, 20 bp, Artificial Sequence
  Antisense compound
aggaactttgcaaaaccagc

SEQ ID NO: 13502 - DNA, 20 bp, Artificial Sequence
  Antisense compound
taggaactttgcaaaaccag

SEQ ID NO: 13503 - DNA, 20 bp, Artificial Sequence
  Antisense compound
ttaggaactttgcaaaacca

SEQ ID NO: 13504 - DNA, 20 bp, Artificial Sequence
  Antisense compound
tttaggaactttgcaaaacc

SEQ ID NO: 13505 - DNA, 20 bp, Artificial Sequence
  Antisense compound
ttttaggaactttgcaaaac

SEQ ID NO: 13506 - DNA, 20 bp, Artificial Sequence
  Antisense compound
tttttaggaactttgcaaaa

SEQ ID NO: 13507 - DNA, 20 bp, Artificial Sequence
  Antisense compound
gtttttaggaactttgcaaa

SEQ ID NO: 13508 - DNA, 20 bp, Artificial Sequence
  Antisense compound
agtttttaggaactttgcaa

SEQ ID NO: 13509 - DNA, 20 bp, Artificial Sequence
  Antisense compound
tagtttttaggaactttgca

SEQ ID NO: 13510 - DNA, 20 bp, Artificial Sequence
  Antisense compound
ttagtttttaggaactttgc

SEQ ID NO: 13511 - DNA, 20 bp, Artificial Sequence
  Antisense compound
attagtttttaggaactttg

SEQ ID NO: 13512 - DNA, 20 bp, Artificial Sequence
  Antisense compound
aattagtttttaggaacttt

SEQ ID NO: 13513 - DNA, 20 bp, Artificial Sequence
  Antisense compound
caattagtttttaggaactt

SEQ ID NO: 13514 - DNA, 20 bp, Artificial Sequence
  Antisense compound
gcaattagtttttaggaact

SEQ ID NO: 13515 - DNA, 20 bp, Artificial Sequence
  Antisense compound
agcaattagtttttaggaac

SEQ ID NO: 13516 - DNA, 20 bp, Artificial Sequence
  Antisense compound
cagcaattagtttttaggaa

SEQ ID NO: 13517 - DNA, 20 bp, Artificial Sequence
  Antisense compound
acagcaattagtttttagga

SEQ ID NO: 13518 - DNA, 20 bp, Artificial Sequence
  Antisense compound
gacagcaattagtttttagg

SEQ ID NO: 13519 - DNA, 20 bp, Artificial Sequence
  Antisense compound
cgacagcaattagtttttag

SEQ ID NO: 13520 - DNA, 20 bp, Artificial Sequence
  Antisense compound
gcgacagcaattagttttta

SEQ ID NO: 13521 - DNA, 20 bp, Artificial Sequence
  Antisense compound
agcgacagcaattagttttt

SEQ ID NO: 13522 - DNA, 20 bp, Artificial Sequence
  Antisense compound
aagcgacagcaattagtttt

SEQ ID NO: 13523 - DNA, 20 bp, Artificial Sequence
  Antisense compound
gaagcgacagcaattagttt

SEQ ID NO: 13524 - DNA, 20 bp, Artificial Sequence
  Antisense compound
ggaagcgacagcaattagtt

SEQ ID NO: 13525 - DNA, 20 bp, Artificial Sequence
  Antisense compound
tggaagcgacagcaattagt

SEQ ID NO: 13526 - DNA, 20 bp, Artificial Sequence
  Antisense compound
ctggaagcgacagcaattag

SEQ ID NO: 13527 - DNA, 20 bp, Artificial Sequence
  Antisense compound
cctggaagcgacagcaatta

SEQ ID NO: 13528 - DNA, 20 bp, Artificial Sequence
  Antisense compound
tcctggaagcgacagcaatt

SEQ ID NO: 13529 - DNA, 20 bp, Artificial Sequence
  Antisense compound
ctcctggaagcgacagcaat

SEQ ID NO: 13530 - DNA, 20 bp, Artificial Sequence
  Antisense compound
tctcctggaagcgacagcaa

SEQ ID NO: 13531 - DNA, 20 bp, Artificial Sequence
  Antisense compound
ttctcctggaagcgacagca

SEQ ID NO: 13532 - DNA, 20 bp, Artificial Sequence
  Antisense compound
cttctcctggaagcgacagc

SEQ ID NO: 13533 - DNA, 20 bp, Artificial Sequence
  Antisense compound
ccttctcctggaagcgacag

SEQ ID NO: 13534 - DNA, 20 bp, Artificial Sequence
  Antisense compound
tccttctcctggaagcgaca

SEQ ID NO: 13535 - DNA, 20 bp, Artificial Sequence
  Antisense compound
atccttctcctggaagcgac

SEQ ID NO: 13536 - DNA, 20 bp, Artificial Sequence
  Antisense compound
catccttctcctggaagcga

SEQ ID NO: 13537 - DNA, 20 bp, Artificial Sequence
  Antisense compound
tcatccttctcctggaagcg

SEQ ID NO: 13538 - DNA, 20 bp, Artificial Sequence
  Antisense compound
ctcatccttctcctggaagc

SEQ ID NO: 13539 - DNA, 20 bp, Artificial Sequence
  Antisense compound
cctcatccttctcctggaag

SEQ ID NO: 13540 - DNA, 20 bp, Artificial Sequence
  Antisense compound
tcctcatccttctcctggaa

SEQ ID NO: 13541 - DNA, 20 bp, Artificial Sequence
  Antisense compound
ttcctcatccttctcctgga

SEQ ID NO: 13542 - DNA, 20 bp, Artificial Sequence
  Antisense compound
cttcctcatccttctcctgg

SEQ ID NO: 13543 - DNA, 20 bp, Artificial Sequence
  Antisense compound
ccttcctcatccttctcctg

SEQ ID NO: 13544 - DNA, 20 bp, Artificial Sequence
  Antisense compound
gccttcctcatccttctcct

SEQ ID NO: 13545 - DNA, 20 bp, Artificial Sequence
  Antisense compound
tgccttcctcatccttctcc

SEQ ID NO: 13546 - DNA, 20 bp, Artificial Sequence
  Antisense compound
ttgccttcctcatccttctc

SEQ ID NO: 13547 - DNA, 20 bp, Artificial Sequence
  Antisense compound
attgccttcctcatccttct

SEQ ID NO: 13548 - DNA, 20 bp, Artificial Sequence
  Antisense compound
aattgccttcctcatccttc

SEQ ID NO: 13549 - DNA, 20 bp, Artificial Sequence
  Antisense compound
aaattgccttcctcatcctt

SEQ ID NO: 13550 - DNA, 20 bp, Artificial Sequence
  Antisense compound
taaattgccttcctcatcct

SEQ ID NO: 13551 - DNA, 20 bp, Artificial Sequence
  Antisense compound
ataaattgccttcctcatcc

SEQ ID NO: 13552 - DNA, 20 bp, Artificial Sequence
  Antisense compound
aataaattgccttcctcatc

SEQ ID NO: 13553 - DNA, 20 bp, Artificial Sequence
  Antisense compound
taataaattgccttcctcat

SEQ ID NO: 13554 - DNA, 20 bp, Artificial Sequence
  Antisense compound
ctaataaattgccttcctca

SEQ ID NO: 13555 - DNA, 20 bp, Artificial Sequence
  Antisense compound
tctaataaattgccttcctc

SEQ ID NO: 13556 - DNA, 20 bp, Artificial Sequence
  Antisense compound
gtctaataaattgccttcct

SEQ ID NO: 13557 - DNA, 20 bp, Artificial Sequence
  Antisense compound
agtctaataaattgccttcc

SEQ ID NO: 13558 - DNA, 20 bp, Artificial Sequence
  Antisense compound
gagtctaataaattgccttc

SEQ ID NO: 13559 - DNA, 20 bp, Artificial Sequence
  Antisense compound
agagtctaataaattgcctt

SEQ ID NO: 13560 - DNA, 20 bp, Artificial Sequence
  Antisense compound
aagagtctaataaattgcct

SEQ ID NO: 13561 - DNA, 20 bp, Artificial Sequence
  Antisense compound
taagagtctaataaattgcc

SEQ ID NO: 13562 - DNA, 20 bp, Artificial Sequence
  Antisense compound
gtaagagtctaataaattgc

SEQ ID NO: 13563 - DNA, 20 bp, Artificial Sequence
  Antisense compound
agtaagagtctaataaattg

SEQ ID NO: 13564 - DNA, 20 bp, Artificial Sequence
  Antisense compound
aagtaagagtctaataaatt

SEQ ID NO: 13565 - DNA, 20 bp, Artificial Sequence
  Antisense compound
aaagtaagagtctaataaat

SEQ ID NO: 13566 - DNA, 20 bp, Artificial Sequence
  Antisense compound
caaagtaagagtctaataaa

SEQ ID NO: 13567 - DNA, 20 bp, Artificial Sequence
  Antisense compound
acaaagtaagagtctaataa

SEQ ID NO: 13568 - DNA, 20 bp, Artificial Sequence
  Antisense compound
tacaaagtaagagtctaata

SEQ ID NO: 13569 - DNA, 20 bp, Artificial Sequence
  Antisense compound
ctacaaagtaagagtctaat

SEQ ID NO: 13570 - DNA, 20 bp, Artificial Sequence
  Antisense compound
actacaaagtaagagtctaa

SEQ ID NO: 13571 - DNA, 20 bp, Artificial Sequence
  Antisense compound
aactacaaagtaagagtcta

SEQ ID NO: 13572 - DNA, 20 bp, Artificial Sequence
  Antisense compound
taactacaaagtaagagtct

SEQ ID NO: 13573 - DNA, 20 bp, Artificial Sequence
  Antisense compound
ttaactacaaagtaagagtc

SEQ ID NO: 13574 - DNA, 20 bp, Artificial Sequence
  Antisense compound
cttaactacaaagtaagagt

SEQ ID NO: 13575 - DNA, 20 bp, Artificial Sequence
  Antisense compound
tcttaactacaaagtaagag

SEQ ID NO: 13576 - DNA, 20 bp, Artificial Sequence
  Antisense compound
ctcttaactacaaagtaaga

SEQ ID NO: 13577 - DNA, 20 bp, Artificial Sequence
  Antisense compound
cctcttaactacaaagtaag

SEQ ID NO: 13578 - DNA, 20 bp, Artificial Sequence
  Antisense compound
gcctcttaactacaaagtaa

SEQ ID NO: 13579 - DNA, 20 bp, Artificial Sequence
  Antisense compound
tgcctcttaactacaaagta

SEQ ID NO: 13580 - DNA, 20 bp, Artificial Sequence
  Antisense compound
atgcctcttaactacaaagt

SEQ ID NO: 13581 - DNA, 20 bp, Artificial Sequence
  Antisense compound
tatgcctcttaactacaaag

SEQ ID NO: 13582 - DNA, 20 bp, Artificial Sequence
  Antisense compound
gtatgcctcttaactacaaa

SEQ ID NO: 13583 - DNA, 20 bp, Artificial Sequence
  Antisense compound
agtatgcctcttaactacaa

SEQ ID NO: 13584 - DNA, 20 bp, Artificial Sequence
  Antisense compound
tagtatgcctcttaactaca

SEQ ID NO: 13585 - DNA, 20 bp, Artificial Sequence
  Antisense compound
atagtatgcctcttaactac

SEQ ID NO: 13586 - DNA, 20 bp, Artificial Sequence
  Antisense compound
catagtatgcctcttaacta

SEQ ID NO: 13587 - DNA, 20 bp, Artificial Sequence
  Antisense compound
acatagtatgcctcttaact

SEQ ID NO: 13588 - DNA, 20 bp, Artificial Sequence
  Antisense compound
gacatagtatgcctcttaac

SEQ ID NO: 13589 - DNA, 20 bp, Artificial Sequence
  Antisense compound
agacatagtatgcctcttaa

SEQ ID NO: 13590 - DNA, 20 bp, Artificial Sequence
  Antisense compound
tagacatagtatgcctctta

SEQ ID NO: 13591 - DNA, 20 bp, Artificial Sequence
  Antisense compound
ttagacatagtatgcctctt

SEQ ID NO: 13592 - DNA, 20 bp, Artificial Sequence
  Antisense compound
gttagacatagtatgcctct

SEQ ID NO: 13593 - DNA, 20 bp, Artificial Sequence
  Antisense compound
agttagacatagtatgcctc

SEQ ID NO: 13594 - DNA, 20 bp, Artificial Sequence
  Antisense compound
tagttagacatagtatgcct

SEQ ID NO: 13595 - DNA, 20 bp, Artificial Sequence
  Antisense compound
gtagttagacatagtatgcc

SEQ ID NO: 13596 - DNA, 20 bp, Artificial Sequence
  Antisense compound
ggtagttagacatagtatgc

SEQ ID NO: 13597 - DNA, 20 bp, Artificial Sequence
  Antisense compound
tggtagttagacatagtatg

SEQ ID NO: 13598 - DNA, 20 bp, Artificial Sequence
  Antisense compound
ttggtagttagacatagtat

SEQ ID NO: 13599 - DNA, 20 bp, Artificial Sequence
  Antisense compound
gttggtagttagacatagta

SEQ ID NO: 13600 - DNA, 20 bp, Artificial Sequence
  Antisense compound
tgttggtagttagacatagt

SEQ ID NO: 13601 - DNA, 20 bp, Artificial Sequence
  Antisense compound
atgttggtagttagacatag

SEQ ID NO: 13602 - DNA, 20 bp, Artificial Sequence
  Antisense compound
catgttggtagttagacata

SEQ ID NO: 13603 - DNA, 20 bp, Artificial Sequence
  Antisense compound
tcatgttggtagttagacat

SEQ ID NO: 13604 - DNA, 20 bp, Artificial Sequence
  Antisense compound
ttcatgttggtagttagaca

SEQ ID NO: 13605 - DNA, 20 bp, Artificial Sequence
  Antisense compound
cttcatgttggtagttagac

SEQ ID NO: 13606 - DNA, 20 bp, Artificial Sequence
  Antisense compound
tcttcatgttggtagttaga

SEQ ID NO: 13607 - DNA, 20 bp, Artificial Sequence
  Antisense compound
ctcttcatgttggtagttag

SEQ ID NO: 13608 - DNA, 20 bp, Artificial Sequence
  Antisense compound
tctcttcatgttggtagtta

SEQ ID NO: 13609 - DNA, 20 bp, Artificial Sequence
  Antisense compound
gtctcttcatgttggtagtt

SEQ ID NO: 13610 - DNA, 20 bp, Artificial Sequence
  Antisense compound
agtctcttcatgttggtagt

SEQ ID NO: 13611 - DNA, 20 bp, Artificial Sequence
  Antisense compound
tagtctcttcatgttggtag

SEQ ID NO: 13612 - DNA, 20 bp, Artificial Sequence
  Antisense compound
atagtctcttcatgttggta

SEQ ID NO: 13613 - DNA, 20 bp, Artificial Sequence
  Antisense compound
aatagtctcttcatgttggt

SEQ ID NO: 13614 - DNA, 20 bp, Artificial Sequence
  Antisense compound
aaatagtctcttcatgttgg

SEQ ID NO: 13615 - DNA, 20 bp, Artificial Sequence
  Antisense compound
taaatagtctcttcatgttg

SEQ ID NO: 13616 - DNA, 20 bp, Artificial Sequence
  Antisense compound
ataaatagtctcttcatgtt

SEQ ID NO: 13617 - DNA, 20 bp, Artificial Sequence
  Antisense compound
tataaatagtctcttcatgt

SEQ ID NO: 13618 - DNA, 20 bp, Artificial Sequence
  Antisense compound
ttataaatagtctcttcatg

SEQ ID NO: 13619 - DNA, 20 bp, Artificial Sequence
  Antisense compound
gttataaatagtctcttcat

SEQ ID NO: 13620 - DNA, 20 bp, Artificial Sequence
  Antisense compound
agttataaatagtctcttca

SEQ ID NO: 13621 - DNA, 20 bp, Artificial Sequence
  Antisense compound
aagttataaatagtctcttc

SEQ ID NO: 13622 - DNA, 20 bp, Artificial Sequence
  Antisense compound
caagttataaatagtctctt

SEQ ID NO: 13623 - DNA, 20 bp, Artificial Sequence
  Antisense compound
ccaagttataaatagtctct

SEQ ID NO: 13624 - DNA, 20 bp, Artificial Sequence
  Antisense compound
accaagttataaatagtctc

SEQ ID NO: 13625 - DNA, 20 bp, Artificial Sequence
  Antisense compound
aaccaagttataaatagtct

SEQ ID NO: 13626 - DNA, 20 bp, Artificial Sequence
  Antisense compound
taaccaagttataaatagtc

SEQ ID NO: 13627 - DNA, 20 bp, Artificial Sequence
  Antisense compound
ttaaccaagttataaatagt

SEQ ID NO: 13628 - DNA, 20 bp, Artificial Sequence
  Antisense compound
tttaaccaagttataaatag

SEQ ID NO: 13629 - DNA, 20 bp, Artificial Sequence
  Antisense compound
ctttaaccaagttataaata

SEQ ID NO: 13630 - DNA, 20 bp, Artificial Sequence
  Antisense compound
tctttaaccaagttataaat

SEQ ID NO: 13631 - DNA, 20 bp, Artificial Sequence
  Antisense compound
atctttaaccaagttataaa

SEQ ID NO: 13632 - DNA, 20 bp, Artificial Sequence
  Antisense compound
aatctttaaccaagttataa

SEQ ID NO: 13633 - DNA, 20 bp, Artificial Sequence
  Antisense compound
caatctttaaccaagttata

SEQ ID NO: 13634 - DNA, 20 bp, Artificial Sequence
  Antisense compound
acaatctttaaccaagttat

SEQ ID NO: 13635 - DNA, 20 bp, Artificial Sequence
  Antisense compound
gacaatctttaaccaagtta

SEQ ID NO: 13636 - DNA, 20 bp, Artificial Sequence
  Antisense compound
ggacaatctttaaccaagtt

SEQ ID NO: 13637 - DNA, 20 bp, Artificial Sequence
  Antisense compound
tggacaatctttaaccaagt

SEQ ID NO: 13638 - DNA, 20 bp, Artificial Sequence
  Antisense compound
ctggacaatctttaaccaag

SEQ ID NO: 13639 - DNA, 20 bp, Artificial Sequence
  Antisense compound
gctggacaatctttaaccaa

SEQ ID NO: 13640 - DNA, 20 bp, Artificial Sequence
  Antisense compound
cgctggacaatctttaacca

SEQ ID NO: 13641 - DNA, 20 bp, Artificial Sequence
  Antisense compound
ccgctggacaatctttaacc

SEQ ID NO: 13642 - DNA, 20 bp, Artificial Sequence
  Antisense compound
accgctggacaatctttaac

SEQ ID NO: 13643 - DNA, 20 bp, Artificial Sequence
  Antisense compound
aaccgctggacaatctttaa

SEQ ID NO: 13644 - DNA, 20 bp, Artificial Sequence
  Antisense compound
caaccgctggacaatcttta

SEQ ID NO: 13645 - DNA, 20 bp, Artificial Sequence
  Antisense compound
gcaaccgctggacaatcttt

SEQ ID NO: 13646 - DNA, 20 bp, Artificial Sequence
  Antisense compound
agcaaccgctggacaatctt

SEQ ID NO: 13647 - DNA, 20 bp, Artificial Sequence
  Antisense compound
cagcaaccgctggacaatct

SEQ ID NO: 13648 - DNA, 20 bp, Artificial Sequence
  Antisense compound
acagcaaccgctggacaatc

SEQ ID NO: 13649 - DNA, 20 bp, Artificial Sequence
  Antisense compound
gacagcaaccgctggacaat

SEQ ID NO: 13650 - DNA, 20 bp, Artificial Sequence
  Antisense compound
ggacagcaaccgctggacaa

SEQ ID NO: 13651 - DNA, 20 bp, Artificial Sequence
  Antisense compound
tggacagcaaccgctggaca

SEQ ID NO: 13652 - DNA, 20 bp, Artificial Sequence
  Antisense compound
atggacagcaaccgctggac

SEQ ID NO: 13653 - DNA, 20 bp, Artificial Sequence
  Antisense compound
catggacagcaaccgctgga

SEQ ID NO: 13654 - DNA, 20 bp, Artificial Sequence
  Antisense compound
tcatggacagcaaccgctgg

SEQ ID NO: 13655 - DNA, 20 bp, Artificial Sequence
  Antisense compound
gtcatggacagcaaccgctg

SEQ ID NO: 13656 - DNA, 20 bp, Artificial Sequence
  Antisense compound
agtcatggacagcaaccgct

SEQ ID NO: 13657 - DNA, 20 bp, Artificial Sequence
  Antisense compound
aagtcatggacagcaaccgc

SEQ ID NO: 13658 - DNA, 20 bp, Artificial Sequence
  Antisense compound
aaagtcatggacagcaaccg

SEQ ID NO: 13659 - DNA, 20 bp, Artificial Sequence
  Antisense compound
aaaagtcatggacagcaacc

SEQ ID NO: 13660 - DNA, 20 bp, Artificial Sequence
  Antisense compound
aaaaagtcatggacagcaac

SEQ ID NO: 13661 - DNA, 20 bp, Artificial Sequence
  Antisense compound
gaaaaagtcatggacagcaa

SEQ ID NO: 13662 - DNA, 20 bp, Artificial Sequence
  Antisense compound
tgaaaaagtcatggacagca

SEQ ID NO: 13663 - DNA, 20 bp, Artificial Sequence
  Antisense compound
ttgaaaaagtcatggacagc

SEQ ID NO: 13664 - DNA, 20 bp, Artificial Sequence
  Antisense compound
cttgaaaaagtcatggacag

SEQ ID NO: 13665 - DNA, 20 bp, Artificial Sequence
  Antisense compound
acttgaaaaagtcatggaca

SEQ ID NO: 13666 - DNA, 20 bp, Artificial Sequence
  Antisense compound
aacttgaaaaagtcatggac

SEQ ID NO: 13667 - DNA, 20 bp, Artificial Sequence
  Antisense compound
aaacttgaaaaagtcatgga

SEQ ID NO: 13668 - DNA, 20 bp, Artificial Sequence
  Antisense compound
taaacttgaaaaagtcatgg

SEQ ID NO: 13669 - DNA, 20 bp, Artificial Sequence
  Antisense compound
ctaaacttgaaaaagtcatg

SEQ ID NO: 13670 - DNA, 20 bp, Artificial Sequence
  Antisense compound
tctaaacttgaaaaagtcat

SEQ ID NO: 13671 - DNA, 20 bp, Artificial Sequence
  Antisense compound
ctctaaacttgaaaaagtca

SEQ ID NO: 13672 - DNA, 20 bp, Artificial Sequence
  Antisense compound
actctaaacttgaaaaagtc

SEQ ID NO: 13673 - DNA, 20 bp, Artificial Sequence
  Antisense compound
tactctaaacttgaaaaagt

SEQ ID NO: 13674 - DNA, 20 bp, Artificial Sequence
  Antisense compound
ctactctaaacttgaaaaag

SEQ ID NO: 13675 - DNA, 20 bp, Artificial Sequence
  Antisense compound
tctactctaaacttgaaaaa

SEQ ID NO: 13676 - DNA, 20 bp, Artificial Sequence
  Antisense compound
atctactctaaacttgaaaa

SEQ ID NO: 13677 - DNA, 20 bp, Artificial Sequence
  Antisense compound
catctactctaaacttgaaa

SEQ ID NO: 13678 - DNA, 20 bp, Artificial Sequence
  Antisense compound
ccatctactctaaacttgaa

SEQ ID NO: 13679 - DNA, 20 bp, Artificial Sequence
  Antisense compound
accatctactctaaacttga

SEQ ID NO: 13680 - DNA, 20 bp, Artificial Sequence
  Antisense compound
caccatctactctaaacttg

SEQ ID NO: 13681 - DNA, 20 bp, Artificial Sequence
  Antisense compound
tcaccatctactctaaactt

SEQ ID NO: 13682 - DNA, 20 bp, Artificial Sequence
  Antisense compound
gtcaccatctactctaaact

SEQ ID NO: 13683 - DNA, 20 bp, Artificial Sequence
  Antisense compound
tgtcaccatctactctaaac

SEQ ID NO: 13684 - DNA, 20 bp, Artificial Sequence
  Antisense compound
atgtcaccatctactctaaa

SEQ ID NO: 13685 - DNA, 20 bp, Artificial Sequence
  Antisense compound
catgtcaccatctactctaa

SEQ ID NO: 13686 - DNA, 20 bp, Artificial Sequence
  Antisense compound
ccatgtcaccatctactcta

SEQ ID NO: 13687 - DNA, 20 bp, Artificial Sequence
  Antisense compound
accatgtcaccatctactct

SEQ ID NO: 13688 - DNA, 20 bp, Artificial Sequence
  Antisense compound
taccatgtcaccatctactc

SEQ ID NO: 13689 - DNA, 20 bp, Artificial Sequence
  Antisense compound
gtaccatgtcaccatctact

SEQ ID NO: 13690 - DNA, 20 bp, Artificial Sequence
  Antisense compound
ggtaccatgtcaccatctac

SEQ ID NO: 13691 - DNA, 20 bp, Artificial Sequence
  Antisense compound
tggtaccatgtcaccatcta

SEQ ID NO: 13692 - DNA, 20 bp, Artificial Sequence
  Antisense compound
gtggtaccatgtcaccatct

SEQ ID NO: 13693 - DNA, 20 bp, Artificial Sequence
  Antisense compound
tgtggtaccatgtcaccatc

SEQ ID NO: 13694 - DNA, 20 bp, Artificial Sequence
  Antisense compound
atgtggtaccatgtcaccat

SEQ ID NO: 13695 - DNA, 20 bp, Artificial Sequence
  Antisense compound
tatgtggtaccatgtcacca

SEQ ID NO: 13696 - DNA, 20 bp, Artificial Sequence
  Antisense compound
atatgtggtaccatgtcacc

SEQ ID NO: 13697 - DNA, 20 bp, Artificial Sequence
  Antisense compound
tatatgtggtaccatgtcac

SEQ ID NO: 13698 - DNA, 20 bp, Artificial Sequence
  Antisense compound
atatatgtggtaccatgtca

SEQ ID NO: 13699 - DNA, 20 bp, Artificial Sequence
  Antisense compound
gatatatgtggtaccatgtc

SEQ ID NO: 13700 - DNA, 20 bp, Artificial Sequence
  Antisense compound
tgatatatgtggtaccatgt

SEQ ID NO: 13701 - DNA, 20 bp, Artificial Sequence
  Antisense compound
gtgatatatgtggtaccatg

SEQ ID NO: 13702 - DNA, 20 bp, Artificial Sequence
  Antisense compound
cgtgatatatgtggtaccat

SEQ ID NO: 13703 - DNA, 20 bp, Artificial Sequence
  Antisense compound
acgtgatatatgtggtacca

SEQ ID NO: 13704 - DNA, 20 bp, Artificial Sequence
  Antisense compound
gacgtgatatatgtggtacc

SEQ ID NO: 13705 - DNA, 20 bp, Artificial Sequence
  Antisense compound
tgacgtgatatatgtggtac

SEQ ID NO: 13706 - DNA, 20 bp, Artificial Sequence
  Antisense compound
ctgacgtgatatatgtggta

SEQ ID NO: 13707 - DNA, 20 bp, Artificial Sequence
  Antisense compound
gctgacgtgatatatgtggt

SEQ ID NO: 13708 - DNA, 20 bp, Artificial Sequence
  Antisense compound
cgctgacgtgatatatgtgg

SEQ ID NO: 13709 - DNA, 20 bp, Artificial Sequence
  Antisense compound
acgctgacgtgatatatgtg

SEQ ID NO: 13710 - DNA, 20 bp, Artificial Sequence
  Antisense compound
gacgctgacgtgatatatgt

SEQ ID NO: 13711 - DNA, 20 bp, Artificial Sequence
  Antisense compound
agacgctgacgtgatatatg

SEQ ID NO: 13712 - DNA, 20 bp, Artificial Sequence
  Antisense compound
tagacgctgacgtgatatat

SEQ ID NO: 13713 - DNA, 20 bp, Artificial Sequence
  Antisense compound
ttagacgctgacgtgatata

SEQ ID NO: 13714 - DNA, 20 bp, Artificial Sequence
  Antisense compound
gttagacgctgacgtgatat

SEQ ID NO: 13715 - DNA, 20 bp, Artificial Sequence
  Antisense compound
agttagacgctgacgtgata

SEQ ID NO: 13716 - DNA, 20 bp, Artificial Sequence
  Antisense compound
tagttagacgctgacgtgat

SEQ ID NO: 13717 - DNA, 20 bp, Artificial Sequence
  Antisense compound
ttagttagacgctgacgtga

SEQ ID NO: 13718 - DNA, 20 bp, Artificial Sequence
  Antisense compound
tttagttagacgctgacgtg

SEQ ID NO: 13719 - DNA, 20 bp, Artificial Sequence
  Antisense compound
atttagttagacgctgacgt

SEQ ID NO: 13720 - DNA, 20 bp, Artificial Sequence
  Antisense compound
tatttagttagacgctgacg

SEQ ID NO: 13721 - DNA, 20 bp, Artificial Sequence
  Antisense compound
gtatttagttagacgctgac

SEQ ID NO: 13722 - DNA, 20 bp, Artificial Sequence
  Antisense compound
tgtatttagttagacgctga

SEQ ID NO: 13723 - DNA, 20 bp, Artificial Sequence
  Antisense compound
gtgtatttagttagacgctg

SEQ ID NO: 13724 - DNA, 20 bp, Artificial Sequence
  Antisense compound
tgtgtatttagttagacgct

SEQ ID NO: 13725 - DNA, 20 bp, Artificial Sequence
  Antisense compound
ttgtgtatttagttagacgc

SEQ ID NO: 13726 - DNA, 20 bp, Artificial Sequence
  Antisense compound
attgtgtatttagttagacg

SEQ ID NO: 13727 - DNA, 20 bp, Artificial Sequence
  Antisense compound
cattgtgtatttagttagac

SEQ ID NO: 13728 - DNA, 20 bp, Artificial Sequence
  Antisense compound
ccattgtgtatttagttaga

SEQ ID NO: 13729 - DNA, 20 bp, Artificial Sequence
  Antisense compound
gccattgtgtatttagttag

SEQ ID NO: 13730 - DNA, 20 bp, Artificial Sequence
  Antisense compound
agccattgtgtatttagtta

SEQ ID NO: 13731 - DNA, 20 bp, Artificial Sequence
  Antisense compound
cagccattgtgtatttagtt

SEQ ID NO: 13732 - DNA, 20 bp, Artificial Sequence
  Antisense compound
tcagccattgtgtatttagt

SEQ ID NO: 13733 - DNA, 20 bp, Artificial Sequence
  Antisense compound
atcagccattgtgtatttag

SEQ ID NO: 13734 - DNA, 20 bp, Artificial Sequence
  Antisense compound
aatcagccattgtgtattta

SEQ ID NO: 13735 - DNA, 20 bp, Artificial Sequence
  Antisense compound
aaatcagccattgtgtattt

SEQ ID NO: 13736 - DNA, 20 bp, Artificial Sequence
  Antisense compound
taaatcagccattgtgtatt

SEQ ID NO: 13737 - DNA, 20 bp, Artificial Sequence
  Antisense compound
ctaaatcagccattgtgtat

SEQ ID NO: 13738 - DNA, 20 bp, Artificial Sequence
  Antisense compound
actaaatcagccattgtgta

SEQ ID NO: 13739 - DNA, 20 bp, Artificial Sequence
  Antisense compound
gactaaatcagccattgtgt

SEQ ID NO: 13740 - DNA, 20 bp, Artificial Sequence
  Antisense compound
agactaaatcagccattgtg

SEQ ID NO: 13741 - DNA, 20 bp, Artificial Sequence
  Antisense compound
tagactaaatcagccattgt

SEQ ID NO: 13742 - DNA, 20 bp, Artificial Sequence
  Antisense compound
atagactaaatcagccattg

SEQ ID NO: 13743 - DNA, 20 bp, Artificial Sequence
  Antisense compound
catagactaaatcagccatt

SEQ ID NO: 13744 - DNA, 20 bp, Artificial Sequence
  Antisense compound
gcatagactaaatcagccat

SEQ ID NO: 13745 - DNA, 20 bp, Artificial Sequence
  Antisense compound
agcatagactaaatcagcca

SEQ ID NO: 13746 - DNA, 20 bp, Artificial Sequence
  Antisense compound
gagcatagactaaatcagcc

SEQ ID NO: 13747 - DNA, 20 bp, Artificial Sequence
  Antisense compound
agagcatagactaaatcagc

SEQ ID NO: 13748 - DNA, 20 bp, Artificial Sequence
  Antisense compound
tagagcatagactaaatcag

SEQ ID NO: 13749 - DNA, 20 bp, Artificial Sequence
  Antisense compound
gtagagcatagactaaatca

SEQ ID NO: 13750 - DNA, 20 bp, Artificial Sequence
  Antisense compound
cgtagagcatagactaaatc

SEQ ID NO: 13751 - DNA, 20 bp, Artificial Sequence
  Antisense compound
acgtagagcatagactaaat

SEQ ID NO: 13752 - DNA, 20 bp, Artificial Sequence
  Antisense compound
gacgtagagcatagactaaa

SEQ ID NO: 13753 - DNA, 20 bp, Artificial Sequence
  Antisense compound
tgacgtagagcatagactaa

SEQ ID NO: 13754 - DNA, 20 bp, Artificial Sequence
  Antisense compound
atgacgtagagcatagacta

SEQ ID NO: 13755 - DNA, 20 bp, Artificial Sequence
  Antisense compound
aatgacgtagagcatagact

SEQ ID NO: 13756 - DNA, 20 bp, Artificial Sequence
  Antisense compound
aaatgacgtagagcatagac

SEQ ID NO: 13757 - DNA, 20 bp, Artificial Sequence
  Antisense compound
aaaatgacgtagagcataga

SEQ ID NO: 13758 - DNA, 20 bp, Artificial Sequence
  Antisense compound
caaaatgacgtagagcatag

SEQ ID NO: 13759 - DNA, 20 bp, Artificial Sequence
  Antisense compound
tcaaaatgacgtagagcata

SEQ ID NO: 13760 - DNA, 20 bp, Artificial Sequence
  Antisense compound
atcaaaatgacgtagagcat

SEQ ID NO: 13761 - DNA, 20 bp, Artificial Sequence
  Antisense compound
catcaaaatgacgtagagca

SEQ ID NO: 13762 - DNA, 20 bp, Artificial Sequence
  Antisense compound
tcatcaaaatgacgtagagc

SEQ ID NO: 13763 - DNA, 20 bp, Artificial Sequence
  Antisense compound
ctcatcaaaatgacgtagag

SEQ ID NO: 13764 - DNA, 20 bp, Artificial Sequence
  Antisense compound
cctcatcaaaatgacgtaga

SEQ ID NO: 13765 - DNA, 20 bp, Artificial Sequence
  Antisense compound
ccctcatcaaaatgacgtag

SEQ ID NO: 13766 - DNA, 20 bp, Artificial Sequence
  Antisense compound
accctcatcaaaatgacgta

SEQ ID NO: 13767 - DNA, 20 bp, Artificial Sequence
  Antisense compound
taccctcatcaaaatgacgt

SEQ ID NO: 13768 - DNA, 20 bp, Artificial Sequence
  Antisense compound
ttaccctcatcaaaatgacg

SEQ ID NO: 13769 - DNA, 20 bp, Artificial Sequence
  Antisense compound
attaccctcatcaaaatgac

SEQ ID NO: 13770 - DNA, 20 bp, Artificial Sequence
  Antisense compound
aattaccctcatcaaaatga

SEQ ID NO: 13771 - DNA, 20 bp, Artificial Sequence
  Antisense compound
caattaccctcatcaaaatg

SEQ ID NO: 13772 - DNA, 20 bp, Artificial Sequence
  Antisense compound
acaattaccctcatcaaaat

SEQ ID NO: 13773 - DNA, 20 bp, Artificial Sequence
  Antisense compound
cacaattaccctcatcaaaa

SEQ ID NO: 13774 - DNA, 20 bp, Artificial Sequence
  Antisense compound
tcacaattaccctcatcaaa

SEQ ID NO: 13775 - DNA, 20 bp, Artificial Sequence
  Antisense compound
atcacaattaccctcatcaa

SEQ ID NO: 13776 - DNA, 20 bp, Artificial Sequence
  Antisense compound
tatcacaattaccctcatca

SEQ ID NO: 13777 - DNA, 20 bp, Artificial Sequence
  Antisense compound
gtatcacaattaccctcatc

SEQ ID NO: 13778 - DNA, 20 bp, Artificial Sequence
  Antisense compound
tgtatcacaattaccctcat

SEQ ID NO: 13779 - DNA, 20 bp, Artificial Sequence
  Antisense compound
atgtatcacaattaccctca

SEQ ID NO: 13780 - DNA, 20 bp, Artificial Sequence
  Antisense compound
aatgtatcacaattaccctc

SEQ ID NO: 13781 - DNA, 20 bp, Artificial Sequence
  Antisense compound
taatgtatcacaattaccct

SEQ ID NO: 13782 - DNA, 20 bp, Artificial Sequence
  Antisense compound
ttaatgtatcacaattaccc

SEQ ID NO: 13783 - DNA, 20 bp, Artificial Sequence
  Antisense compound
tttaatgtatcacaattacc

SEQ ID NO: 13784 - DNA, 20 bp, Artificial Sequence
  Antisense compound
ttttaatgtatcacaattac

SEQ ID NO: 13785 - DNA, 20 bp, Artificial Sequence
  Antisense compound
cttttaatgtatcacaatta

SEQ ID NO: 13786 - DNA, 20 bp, Artificial Sequence
  Antisense compound
tcttttaatgtatcacaatt

SEQ ID NO: 13787 - DNA, 20 bp, Artificial Sequence
  Antisense compound
ttcttttaatgtatcacaat

SEQ ID NO: 13788 - DNA, 20 bp, Artificial Sequence
  Antisense compound
tttcttttaatgtatcacaa

SEQ ID NO: 13789 - DNA, 20 bp, Artificial Sequence
  Antisense compound
atttcttttaatgtatcaca

SEQ ID NO: 13790 - DNA, 20 bp, Artificial Sequence
  Antisense compound
tatttcttttaatgtatcac

SEQ ID NO: 13791 - DNA, 20 bp, Artificial Sequence
  Antisense compound
gtatttcttttaatgtatca

SEQ ID NO: 13792 - DNA, 20 bp, Artificial Sequence
  Antisense compound
agtatttcttttaatgtatc

SEQ ID NO: 13793 - DNA, 20 bp, Artificial Sequence
  Antisense compound
gagtatttcttttaatgtat

SEQ ID NO: 13794 - DNA, 20 bp, Artificial Sequence
  Antisense compound
cgagtatttcttttaatgta

SEQ ID NO: 13795 - DNA, 20 bp, Artificial Sequence
  Antisense compound
acgagtatttcttttaatgt

SEQ ID NO: 13796 - DNA, 20 bp, Artificial Sequence
  Antisense compound
gacgagtatttcttttaatg

SEQ ID NO: 13797 - DNA, 20 bp, Artificial Sequence
  Antisense compound
tgacgagtatttcttttaat

SEQ ID NO: 13798 - DNA, 20 bp, Artificial Sequence
  Antisense compound
gtgacgagtatttcttttaa

SEQ ID NO: 13799 - DNA, 20 bp, Artificial Sequence
  Antisense compound
tgtgacgagtatttctttta

SEQ ID NO: 13800 - DNA, 20 bp, Artificial Sequence
  Antisense compound
atgtgacgagtatttctttt

SEQ ID NO: 13801 - DNA, 20 bp, Artificial Sequence
  Antisense compound
tatgtgacgagtatttcttt

SEQ ID NO: 13802 - DNA, 20 bp, Artificial Sequence
  Antisense compound
gtatgtgacgagtatttctt

SEQ ID NO: 13803 - DNA, 20 bp, Artificial Sequence
  Antisense compound
tgtatgtgacgagtatttct

SEQ ID NO: 13804 - DNA, 20 bp, Artificial Sequence
  Antisense compound
ttgtatgtgacgagtatttc

SEQ ID NO: 13805 - DNA, 20 bp, Artificial Sequence
  Antisense compound
attgtatgtgacgagtattt

SEQ ID NO: 13806 - DNA, 20 bp, Artificial Sequence
  Antisense compound
aattgtatgtgacgagtatt

SEQ ID NO: 13807 - DNA, 20 bp, Artificial Sequence
  Antisense compound
caattgtatgtgacgagtat

SEQ ID NO: 13808 - DNA, 20 bp, Artificial Sequence
  Antisense compound
gcaattgtatgtgacgagta

SEQ ID NO: 13809 - DNA, 20 bp, Artificial Sequence
  Antisense compound
agcaattgtatgtgacgagt

SEQ ID NO: 13810 - DNA, 20 bp, Artificial Sequence
  Antisense compound
cagcaattgtatgtgacgag

SEQ ID NO: 13811 - DNA, 20 bp, Artificial Sequence
  Antisense compound
acagcaattgtatgtgacga

SEQ ID NO: 13812 - DNA, 20 bp, Artificial Sequence
  Antisense compound
cacagcaattgtatgtgacg

SEQ ID NO: 13813 - DNA, 20 bp, Artificial Sequence
  Antisense compound
tcacagcaattgtatgtgac

SEQ ID NO: 13814 - DNA, 20 bp, Artificial Sequence
  Antisense compound
atcacagcaattgtatgtga

SEQ ID NO: 13815 - DNA, 20 bp, Artificial Sequence
  Antisense compound
catcacagcaattgtatgtg

SEQ ID NO: 13816 - DNA, 20 bp, Artificial Sequence
  Antisense compound
tcatcacagcaattgtatgt

SEQ ID NO: 13817 - DNA, 20 bp, Artificial Sequence
  Antisense compound
atcatcacagcaattgtatg

SEQ ID NO: 13818 - DNA, 20 bp, Artificial Sequence
  Antisense compound
catcatcacagcaattgtat

SEQ ID NO: 13819 - DNA, 20 bp, Artificial Sequence
  Antisense compound
tcatcatcacagcaattgta

SEQ ID NO: 13820 - DNA, 20 bp, Artificial Sequence
  Antisense compound
atcatcatcacagcaattgt

SEQ ID NO: 13821 - DNA, 20 bp, Artificial Sequence
  Antisense compound
aatcatcatcacagcaattg

SEQ ID NO: 13822 - DNA, 20 bp, Artificial Sequence
  Antisense compound
taatcatcatcacagcaatt

SEQ ID NO: 13823 - DNA, 20 bp, Artificial Sequence
  Antisense compound
ataatcatcatcacagcaat

SEQ ID NO: 13824 - DNA, 20 bp, Artificial Sequence
  Antisense compound
aataatcatcatcacagcaa

SEQ ID NO: 13825 - DNA, 20 bp, Artificial Sequence
  Antisense compound
aaataatcatcatcacagca

SEQ ID NO: 13826 - DNA, 20 bp, Artificial Sequence
  Antisense compound
gaaataatcatcatcacagc

SEQ ID NO: 13827 - DNA, 20 bp, Artificial Sequence
  Antisense compound
tgaaataatcatcatcacag

SEQ ID NO: 13828 - DNA, 20 bp, Artificial Sequence
  Antisense compound
ttgaaataatcatcatcaca

SEQ ID NO: 13829 - DNA, 20 bp, Artificial Sequence
  Antisense compound
attgaaataatcatcatcac

SEQ ID NO: 13830 - DNA, 20 bp, Artificial Sequence
  Antisense compound
tattgaaataatcatcatca

SEQ ID NO: 13831 - DNA, 20 bp, Artificial Sequence
  Antisense compound
ttattgaaataatcatcatc

SEQ ID NO: 13832 - DNA, 20 bp, Artificial Sequence
  Antisense compound
cttattgaaataatcatcat

SEQ ID NO: 13833 - DNA, 20 bp, Artificial Sequence
  Antisense compound
tcttattgaaataatcatca

SEQ ID NO: 13834 - DNA, 20 bp, Artificial Sequence
  Antisense compound
ttcttattgaaataatcatc

SEQ ID NO: 13835 - DNA, 20 bp, Artificial Sequence
  Antisense compound
cttcttattgaaataatcat

SEQ ID NO: 13836 - DNA, 20 bp, Artificial Sequence
  Antisense compound
ccttcttattgaaataatca

SEQ ID NO: 13837 - DNA, 20 bp, Artificial Sequence
  Antisense compound
tccttcttattgaaataatc

SEQ ID NO: 13838 - DNA, 20 bp, Artificial Sequence
  Antisense compound
atccttcttattgaaataat

SEQ ID NO: 13839 - DNA, 20 bp, Artificial Sequence
  Antisense compound
aatccttcttattgaaataa

SEQ ID NO: 13840 - DNA, 20 bp, Artificial Sequence
  Antisense compound
caatccttcttattgaaata

SEQ ID NO: 13841 - DNA, 20 bp, Artificial Sequence
  Antisense compound
ccaatccttcttattgaaat

SEQ ID NO: 13842 - DNA, 20 bp, Artificial Sequence
  Antisense compound
accaatccttcttattgaaa

SEQ ID NO: 13843 - DNA, 20 bp, Artificial Sequence
  Antisense compound
taccaatccttcttattgaa

SEQ ID NO: 13844 - DNA, 20 bp, Artificial Sequence
  Antisense compound
ataccaatccttcttattga

SEQ ID NO: 13845 - DNA, 20 bp, Artificial Sequence
  Antisense compound
cataccaatccttcttattg

SEQ ID NO: 13846 - DNA, 20 bp, Artificial Sequence
  Antisense compound
tcataccaatccttcttatt

SEQ ID NO: 13847 - DNA, 20 bp, Artificial Sequence
  Antisense compound
gtcataccaatccttcttat

SEQ ID NO: 13848 - DNA, 20 bp, Artificial Sequence
  Antisense compound
agtcataccaatccttctta

SEQ ID NO: 13849 - DNA, 20 bp, Artificial Sequence
  Antisense compound
aagtcataccaatccttctt

SEQ ID NO: 13850 - DNA, 20 bp, Artificial Sequence
  Antisense compound
gaagtcataccaatccttct

SEQ ID NO: 13851 - DNA, 20 bp, Artificial Sequence
  Antisense compound
cgaagtcataccaatccttc

SEQ ID NO: 13852 - DNA, 20 bp, Artificial Sequence
  Antisense compound
acgaagtcataccaatcctt

SEQ ID NO: 13853 - DNA, 20 bp, Artificial Sequence
  Antisense compound
tacgaagtcataccaatcct

SEQ ID NO: 13854 - DNA, 20 bp, Artificial Sequence
  Antisense compound
ctacgaagtcataccaatcc

SEQ ID NO: 13855 - DNA, 20 bp, Artificial Sequence
  Antisense compound
tctacgaagtcataccaatc

SEQ ID NO: 13856 - DNA, 20 bp, Artificial Sequence
  Antisense compound
ctctacgaagtcataccaat

SEQ ID NO: 13857 - DNA, 20 bp, Artificial Sequence
  Antisense compound
tctctacgaagtcataccaa

SEQ ID NO: 13858 - DNA, 20 bp, Artificial Sequence
  Antisense compound
ttctctacgaagtcatacca

SEQ ID NO: 13859 - DNA, 20 bp, Artificial Sequence
  Antisense compound
attctctacgaagtcatacc

SEQ ID NO: 13860 - DNA, 20 bp, Artificial Sequence
  Antisense compound
gattctctacgaagtcatac

SEQ ID NO: 13861 - DNA, 20 bp, Artificial Sequence
  Antisense compound
ggattctctacgaagtcata

SEQ ID NO: 13862 - DNA, 20 bp, Artificial Sequence
  Antisense compound
aggattctctacgaagtcat

SEQ ID NO: 13863 - DNA, 20 bp, Artificial Sequence
  Antisense compound
caggattctctacgaagtca

SEQ ID NO: 13864 - DNA, 20 bp, Artificial Sequence
  Antisense compound
tcaggattctctacgaagtc

SEQ ID NO: 13865 - DNA, 20 bp, Artificial Sequence
  Antisense compound
gtcaggattctctacgaagt

SEQ ID NO: 13866 - DNA, 20 bp, Artificial Sequence
  Antisense compound
tgtcaggattctctacgaag

SEQ ID NO: 13867 - DNA, 20 bp, Artificial Sequence
  Antisense compound
atgtcaggattctctacgaa

SEQ ID NO: 13868 - DNA, 20 bp, Artificial Sequence
  Antisense compound
gatgtcaggattctctacga

SEQ ID NO: 13869 - DNA, 20 bp, Artificial Sequence
  Antisense compound
agatgtcaggattctctacg

SEQ ID NO: 13870 - DNA, 20 bp, Artificial Sequence
  Antisense compound
aagatgtcaggattctctac

SEQ ID NO: 13871 - DNA, 20 bp, Artificial Sequence
  Antisense compound
taagatgtcaggattctcta

SEQ ID NO: 13872 - DNA, 20 bp, Artificial Sequence
  Antisense compound
gtaagatgtcaggattctct

SEQ ID NO: 13873 - DNA, 20 bp, Artificial Sequence
  Antisense compound
cgtaagatgtcaggattctc

SEQ ID NO: 13874 - DNA, 20 bp, Artificial Sequence
  Antisense compound
gcgtaagatgtcaggattct

SEQ ID NO: 13875 - DNA, 20 bp, Artificial Sequence
  Antisense compound
cgcgtaagatgtcaggattc

SEQ ID NO: 13876 - DNA, 20 bp, Artificial Sequence
  Antisense compound
acgcgtaagatgtcaggatt

SEQ ID NO: 13877 - DNA, 20 bp, Artificial Sequence
  Antisense compound
tacgcgtaagatgtcaggat

SEQ ID NO: 13878 - DNA, 20 bp, Artificial Sequence
  Antisense compound
atacgcgtaagatgtcagga

SEQ ID NO: 13879 - DNA, 20 bp, Artificial Sequence
  Antisense compound
tatacgcgtaagatgtcagg

SEQ ID NO: 13880 - DNA, 20 bp, Artificial Sequence
  Antisense compound
atatacgcgtaagatgtcag

SEQ ID NO: 13881 - DNA, 20 bp, Artificial Sequence
  Antisense compound
catatacgcgtaagatgtca

SEQ ID NO: 13882 - DNA, 20 bp, Artificial Sequence
  Antisense compound
gcatatacgcgtaagatgtc

SEQ ID NO: 13883 - DNA, 20 bp, Artificial Sequence
  Antisense compound
agcatatacgcgtaagatgt

SEQ ID NO: 13884 - DNA, 20 bp, Artificial Sequence
  Antisense compound
tagcatatacgcgtaagatg

SEQ ID NO: 13885 - DNA, 20 bp, Artificial Sequence
  Antisense compound
ttagcatatacgcgtaagat

SEQ ID NO: 13886 - DNA, 20 bp, Artificial Sequence
  Antisense compound
gttagcatatacgcgtaaga

SEQ ID NO: 13887 - DNA, 20 bp, Artificial Sequence
  Antisense compound
agttagcatatacgcgtaag

SEQ ID NO: 13888 - DNA, 20 bp, Artificial Sequence
  Antisense compound
aagttagcatatacgcgtaa

SEQ ID NO: 13889 - DNA, 20 bp, Artificial Sequence
  Antisense compound
taagttagcatatacgcgta

SEQ ID NO: 13890 - DNA, 20 bp, Artificial Sequence
  Antisense compound
ctaagttagcatatacgcgt

SEQ ID NO: 13891 - DNA, 20 bp, Artificial Sequence
  Antisense compound
cctaagttagcatatacgcg

SEQ ID NO: 13892 - DNA, 20 bp, Artificial Sequence
  Antisense compound
acctaagttagcatatacgc

SEQ ID NO: 13893 - DNA, 20 bp, Artificial Sequence
  Antisense compound
cacctaagttagcatatacg

SEQ ID NO: 13894 - DNA, 20 bp, Artificial Sequence
  Antisense compound
tcacctaagttagcatatac

SEQ ID NO: 13895 - DNA, 20 bp, Artificial Sequence
  Antisense compound
ctcacctaagttagcatata

SEQ ID NO: 13896 - DNA, 20 bp, Artificial Sequence
  Antisense compound
gctcacctaagttagcatat

SEQ ID NO: 13897 - DNA, 20 bp, Artificial Sequence
  Antisense compound
cgctcacctaagttagcata

SEQ ID NO: 13898 - DNA, 20 bp, Artificial Sequence
  Antisense compound
acgctcacctaagttagcat

SEQ ID NO: 13899 - DNA, 20 bp, Artificial Sequence
  Antisense compound
cacgctcacctaagttagca

SEQ ID NO: 13900 - DNA, 20 bp, Artificial Sequence
  Antisense compound
acacgctcacctaagttagc

SEQ ID NO: 13901 - DNA, 20 bp, Artificial Sequence
  Antisense compound
tacacgctcacctaagttag

SEQ ID NO: 13902 - DNA, 20 bp, Artificial Sequence
  Antisense compound
gtacacgctcacctaagtta

SEQ ID NO: 13903 - DNA, 20 bp, Artificial Sequence
  Antisense compound
cgtacacgctcacctaagtt

SEQ ID NO: 13904 - DNA, 20 bp, Artificial Sequence
  Antisense compound
gcgtacacgctcacctaagt

SEQ ID NO: 13905 - DNA, 20 bp, Artificial Sequence
  Antisense compound
ggcgtacacgctcacctaag

SEQ ID NO: 13906 - DNA, 20 bp, Artificial Sequence
  Antisense compound
tggcgtacacgctcacctaa

SEQ ID NO: 13907 - DNA, 20 bp, Artificial Sequence
  Antisense compound
ttggcgtacacgctcaccta

SEQ ID NO: 13908 - DNA, 20 bp, Artificial Sequence
  Antisense compound
attggcgtacacgctcacct

SEQ ID NO: 13909 - DNA, 20 bp, Artificial Sequence
  Antisense compound
gattggcgtacacgctcacc

SEQ ID NO: 13910 - DNA, 20 bp, Artificial Sequence
  Antisense compound
tgattggcgtacacgctcac

SEQ ID NO: 13911 - DNA, 20 bp, Artificial Sequence
  Antisense compound
atgattggcgtacacgctca

SEQ ID NO: 13912 - DNA, 20 bp, Artificial Sequence
  Antisense compound
aatgattggcgtacacgctc

SEQ ID NO: 13913 - DNA, 20 bp, Artificial Sequence
  Antisense compound
taatgattggcgtacacgct

SEQ ID NO: 13914 - DNA, 20 bp, Artificial Sequence
  Antisense compound
ataatgattggcgtacacgc

SEQ ID NO: 13915 - DNA, 20 bp, Artificial Sequence
  Antisense compound
aataatgattggcgtacacg

SEQ ID NO: 13916 - DNA, 20 bp, Artificial Sequence
  Antisense compound
taataatgattggcgtacac

SEQ ID NO: 13917 - DNA, 20 bp, Artificial Sequence
  Antisense compound
ttaataatgattggcgtaca

SEQ ID NO: 13918 - DNA, 20 bp, Artificial Sequence
  Antisense compound
tttaataatgattggcgtac

SEQ ID NO: 13919 - DNA, 20 bp, Artificial Sequence
  Antisense compound
ctttaataatgattggcgta

SEQ ID NO: 13920 - DNA, 20 bp, Artificial Sequence
  Antisense compound
tctttaataatgattggcgt

SEQ ID NO: 13921 - DNA, 20 bp, Artificial Sequence
  Antisense compound
gtctttaataatgattggcg

SEQ ID NO: 13922 - DNA, 20 bp, Artificial Sequence
  Antisense compound
agtctttaataatgattggc

SEQ ID NO: 13923 - DNA, 20 bp, Artificial Sequence
  Antisense compound
cagtctttaataatgattgg

SEQ ID NO: 13924 - DNA, 20 bp, Artificial Sequence
  Antisense compound
acagtctttaataatgattg

SEQ ID NO: 13925 - DNA, 20 bp, Artificial Sequence
  Antisense compound
tacagtctttaataatgatt

SEQ ID NO: 13926 - DNA, 20 bp, Artificial Sequence
  Antisense compound
gtacagtctttaataatgat

SEQ ID NO: 13927 - DNA, 20 bp, Artificial Sequence
  Antisense compound
tgtacagtctttaataatga

SEQ ID NO: 13928 - DNA, 20 bp, Artificial Sequence
  Antisense compound
ttgtacagtctttaataatg

SEQ ID NO: 13929 - DNA, 20 bp, Artificial Sequence
  Antisense compound
attgtacagtctttaataat

SEQ ID NO: 13930 - DNA, 20 bp, Artificial Sequence
  Antisense compound
aattgtacagtctttaataa

SEQ ID NO: 13931 - DNA, 20 bp, Artificial Sequence
  Antisense compound
gaattgtacagtctttaata

SEQ ID NO: 13932 - DNA, 20 bp, Artificial Sequence
  Antisense compound
agaattgtacagtctttaat

SEQ ID NO: 13933 - DNA, 20 bp, Artificial Sequence
  Antisense compound
cagaattgtacagtctttaa

SEQ ID NO: 13934 - DNA, 20 bp, Artificial Sequence
  Antisense compound
gcagaattgtacagtcttta

SEQ ID NO: 13935 - DNA, 20 bp, Artificial Sequence
  Antisense compound
cgcagaattgtacagtcttt

SEQ ID NO: 13936 - DNA, 20 bp, Artificial Sequence
  Antisense compound
tcgcagaattgtacagtctt

SEQ ID NO: 13937 - DNA, 20 bp, Artificial Sequence
  Antisense compound
atcgcagaattgtacagtct

SEQ ID NO: 13938 - DNA, 20 bp, Artificial Sequence
  Antisense compound
catcgcagaattgtacagtc

SEQ ID NO: 13939 - DNA, 20 bp, Artificial Sequence
  Antisense compound
gcatcgcagaattgtacagt

SEQ ID NO: 13940 - DNA, 20 bp, Artificial Sequence
  Antisense compound
agcatcgcagaattgtacag

SEQ ID NO: 13941 - DNA, 20 bp, Artificial Sequence
  Antisense compound
tagcatcgcagaattgtaca

SEQ ID NO: 13942 - DNA, 20 bp, Artificial Sequence
  Antisense compound
atagcatcgcagaattgtac

SEQ ID NO: 13943 - DNA, 20 bp, Artificial Sequence
  Antisense compound
catagcatcgcagaattgta

SEQ ID NO: 13944 - DNA, 20 bp, Artificial Sequence
  Antisense compound
gcatagcatcgcagaattgt

SEQ ID NO: 13945 - DNA, 20 bp, Artificial Sequence
  Antisense compound
cgcatagcatcgcagaattg

SEQ ID NO: 13946 - DNA, 20 bp, Artificial Sequence
  Antisense compound
acgcatagcatcgcagaatt

SEQ ID NO: 13947 - DNA, 20 bp, Artificial Sequence
  Antisense compound
cacgcatagcatcgcagaat

SEQ ID NO: 13948 - DNA, 20 bp, Artificial Sequence
  Antisense compound
tcacgcatagcatcgcagaa

SEQ ID NO: 13949 - DNA, 20 bp, Artificial Sequence
  Antisense compound
atcacgcatagcatcgcaga

SEQ ID NO: 13950 - DNA, 20 bp, Artificial Sequence
  Antisense compound
catcacgcatagcatcgcag

SEQ ID NO: 13951 - DNA, 20 bp, Artificial Sequence
  Antisense compound
gcatcacgcatagcatcgca

SEQ ID NO: 13952 - DNA, 20 bp, Artificial Sequence
  Antisense compound
tgcatcacgcatagcatcgc

SEQ ID NO: 13953 - DNA, 20 bp, Artificial Sequence
  Antisense compound
ctgcatcacgcatagcatcg

SEQ ID NO: 13954 - DNA, 20 bp, Artificial Sequence
  Antisense compound
cctgcatcacgcatagcatc

SEQ ID NO: 13955 - DNA, 20 bp, Artificial Sequence
  Antisense compound
gcctgcatcacgcatagcat

SEQ ID NO: 13956 - DNA, 20 bp, Artificial Sequence
  Antisense compound
tgcctgcatcacgcatagca

SEQ ID NO: 13957 - DNA, 20 bp, Artificial Sequence
  Antisense compound
atgcctgcatcacgcatagc

SEQ ID NO: 13958 - DNA, 20 bp, Artificial Sequence
  Antisense compound
aatgcctgcatcacgcatag

SEQ ID NO: 13959 - DNA, 20 bp, Artificial Sequence
  Antisense compound
caatgcctgcatcacgcata

SEQ ID NO: 13960 - DNA, 20 bp, Artificial Sequence
  Antisense compound
acaatgcctgcatcacgcat

SEQ ID NO: 13961 - DNA, 20 bp, Artificial Sequence
  Antisense compound
tacaatgcctgcatcacgca

SEQ ID NO: 13962 - DNA, 20 bp, Artificial Sequence
  Antisense compound
ctacaatgcctgcatcacgc

SEQ ID NO: 13963 - DNA, 20 bp, Artificial Sequence
  Antisense compound
cctacaatgcctgcatcacg

SEQ ID NO: 13964 - DNA, 20 bp, Artificial Sequence
  Antisense compound
gcctacaatgcctgcatcac

SEQ ID NO: 13965 - DNA, 20 bp, Artificial Sequence
  Antisense compound
cgcctacaatgcctgcatca

SEQ ID NO: 13966 - DNA, 20 bp, Artificial Sequence
  Antisense compound
acgcctacaatgcctgcatc

SEQ ID NO: 13967 - DNA, 20 bp, Artificial Sequence
  Antisense compound
tacgcctacaatgcctgcat

SEQ ID NO: 13968 - DNA, 20 bp, Artificial Sequence
  Antisense compound
gtacgcctacaatgcctgca

SEQ ID NO: 13969 - DNA, 20 bp, Artificial Sequence
  Antisense compound
agtacgcctacaatgcctgc

SEQ ID NO: 13970 - DNA, 20 bp, Artificial Sequence
  Antisense compound
cagtacgcctacaatgcctg

SEQ ID NO: 13971 - DNA, 20 bp, Artificial Sequence
  Antisense compound
tcagtacgcctacaatgcct

SEQ ID NO: 13972 - DNA, 20 bp, Artificial Sequence
  Antisense compound
gtcagtacgcctacaatgcc

SEQ ID NO: 13973 - DNA, 20 bp, Artificial Sequence
  Antisense compound
tgtcagtacgcctacaatgc

SEQ ID NO: 13974 - DNA, 20 bp, Artificial Sequence
  Antisense compound
atgtcagtacgcctacaatg

SEQ ID NO: 13975 - DNA, 20 bp, Artificial Sequence
  Antisense compound
aatgtcagtacgcctacaat

SEQ ID NO: 13976 - DNA, 20 bp, Artificial Sequence
  Antisense compound
taatgtcagtacgcctacaa

SEQ ID NO: 13977 - DNA, 20 bp, Artificial Sequence
  Antisense compound
ctaatgtcagtacgcctaca

SEQ ID NO: 13978 - DNA, 20 bp, Artificial Sequence
  Antisense compound
tctaatgtcagtacgcctac

SEQ ID NO: 13979 - DNA, 20 bp, Artificial Sequence
  Antisense compound
atctaatgtcagtacgccta

SEQ ID NO: 13980 - DNA, 20 bp, Artificial Sequence
  Antisense compound
tatctaatgtcagtacgcct

SEQ ID NO: 13981 - DNA, 20 bp, Artificial Sequence
  Antisense compound
ttatctaatgtcagtacgcc

SEQ ID NO: 13982 - DNA, 20 bp, Artificial Sequence
  Antisense compound
attatctaatgtcagtacgc

SEQ ID NO: 13983 - DNA, 20 bp, Artificial Sequence
  Antisense compound
gattatctaatgtcagtacg

SEQ ID NO: 13984 - DNA, 20 bp, Artificial Sequence
  Antisense compound
tgattatctaatgtcagtac

SEQ ID NO: 13985 - DNA, 20 bp, Artificial Sequence
  Antisense compound
ctgattatctaatgtcagta

SEQ ID NO: 13986 - DNA, 20 bp, Artificial Sequence
  Antisense compound
cctgattatctaatgtcagt

SEQ ID NO: 13987 - DNA, 20 bp, Artificial Sequence
  Antisense compound
tcctgattatctaatgtcag

SEQ ID NO: 13988 - DNA, 20 bp, Artificial Sequence
  Antisense compound
atcctgattatctaatgtca

SEQ ID NO: 13989 - DNA, 20 bp, Artificial Sequence
  Antisense compound
gatcctgattatctaatgtc

SEQ ID NO: 13990 - DNA, 20 bp, Artificial Sequence
  Antisense compound
agatcctgattatctaatgt

SEQ ID NO: 13991 - DNA, 20 bp, Artificial Sequence
  Antisense compound
aagatcctgattatctaatg

SEQ ID NO: 13992 - DNA, 20 bp, Artificial Sequence
  Antisense compound
taagatcctgattatctaat

SEQ ID NO: 13993 - DNA, 20 bp, Artificial Sequence
  Antisense compound
ttaagatcctgattatctaa

SEQ ID NO: 13994 - DNA, 20 bp, Artificial Sequence
  Antisense compound
attaagatcctgattatcta

SEQ ID NO: 13995 - DNA, 20 bp, Artificial Sequence
  Antisense compound
cattaagatcctgattatct

SEQ ID NO: 13996 - DNA, 20 bp, Artificial Sequence
  Antisense compound
ccattaagatcctgattatc

SEQ ID NO: 13997 - DNA, 20 bp, Artificial Sequence
  Antisense compound
cccattaagatcctgattat

SEQ ID NO: 13998 - DNA, 20 bp, Artificial Sequence
  Antisense compound
tcccattaagatcctgatta

SEQ ID NO: 13999 - DNA, 20 bp, Artificial Sequence
  Antisense compound
ttcccattaagatcctgatt

SEQ ID NO: 14000 - DNA, 20 bp, Artificial Sequence
  Antisense compound
gttcccattaagatcctgat

SEQ ID NO: 14001 - DNA, 20 bp, Artificial Sequence
  Antisense compound
agttcccattaagatcctga

SEQ ID NO: 14002 - DNA, 20 bp, Artificial Sequence
  Antisense compound
cagttcccattaagatcctg

SEQ ID NO: 14003 - DNA, 20 bp, Artificial Sequence
  Antisense compound
ccagttcccattaagatcct

SEQ ID NO: 14004 - DNA, 20 bp, Artificial Sequence
  Antisense compound
accagttcccattaagatcc

SEQ ID NO: 14005 - DNA, 20 bp, Artificial Sequence
  Antisense compound
taccagttcccattaagatc

SEQ ID NO: 14006 - DNA, 20 bp, Artificial Sequence
  Antisense compound
gtaccagttcccattaagat

SEQ ID NO: 14007 - DNA, 20 bp, Artificial Sequence
  Antisense compound
cgtaccagttcccattaaga

SEQ ID NO: 14008 - DNA, 20 bp, Artificial Sequence
  Antisense compound
tcgtaccagttcccattaag

SEQ ID NO: 14009 - DNA, 20 bp, Artificial Sequence
  Antisense compound
atcgtaccagttcccattaa

SEQ ID NO: 14010 - DNA, 20 bp, Artificial Sequence
  Antisense compound
aatcgtaccagttcccatta

SEQ ID NO: 14011 - DNA, 20 bp, Artificial Sequence
  Antisense compound
aaatcgtaccagttcccatt

SEQ ID NO: 14012 - DNA, 20 bp, Artificial Sequence
  Antisense compound
gaaatcgtaccagttcccat

SEQ ID NO: 14013 - DNA, 20 bp, Artificial Sequence
  Antisense compound
cgaaatcgtaccagttccca

SEQ ID NO: 14014 - DNA, 20 bp, Artificial Sequence
  Antisense compound
ccgaaatcgtaccagttccc

SEQ ID NO: 14015 - DNA, 20 bp, Artificial Sequence
  Antisense compound
accgaaatcgtaccagttcc

SEQ ID NO: 14016 - DNA, 20 bp, Artificial Sequence
  Antisense compound
caccgaaatcgtaccagttc

SEQ ID NO: 14017 - DNA, 20 bp, Artificial Sequence
  Antisense compound
tcaccgaaatcgtaccagtt

SEQ ID NO: 14018 - DNA, 20 bp, Artificial Sequence
  Antisense compound
atcaccgaaatcgtaccagt

SEQ ID NO: 14019 - DNA, 20 bp, Artificial Sequence
  Antisense compound
aatcaccgaaatcgtaccag

SEQ ID NO: 14020 - DNA, 20 bp, Artificial Sequence
  Antisense compound
aaatcaccgaaatcgtacca

SEQ ID NO: 14021 - DNA, 20 bp, Artificial Sequence
  Antisense compound
gaaatcaccgaaatcgtacc

SEQ ID NO: 14022 - DNA, 20 bp, Artificial Sequence
  Antisense compound
cgaaatcaccgaaatcgtac

SEQ ID NO: 14023 - DNA, 20 bp, Artificial Sequence
  Antisense compound
acgaaatcaccgaaatcgta

SEQ ID NO: 14024 - DNA, 20 bp, Artificial Sequence
  Antisense compound
tacgaaatcaccgaaatcgt

SEQ ID NO: 14025 - DNA, 20 bp, Artificial Sequence
  Antisense compound
gtacgaaatcaccgaaatcg

SEQ ID NO: 14026 - DNA, 20 bp, Artificial Sequence
  Antisense compound
tgtacgaaatcaccgaaatc

SEQ ID NO: 14027 - DNA, 20 bp, Artificial Sequence
  Antisense compound
ttgtacgaaatcaccgaaat

SEQ ID NO: 14028 - DNA, 20 bp, Artificial Sequence
  Antisense compound
cttgtacgaaatcaccgaaa

SEQ ID NO: 14029 - DNA, 20 bp, Artificial Sequence
  Antisense compound
acttgtacgaaatcaccgaa

SEQ ID NO: 14030 - DNA, 20 bp, Artificial Sequence
  Antisense compound
tacttgtacgaaatcaccga

SEQ ID NO: 14031 - DNA, 20 bp, Artificial Sequence
  Antisense compound
ctacttgtacgaaatcaccg

SEQ ID NO: 14032 - DNA, 20 bp, Artificial Sequence
  Antisense compound
gctacttgtacgaaatcacc

SEQ ID NO: 14033 - DNA, 20 bp, Artificial Sequence
  Antisense compound
tgctacttgtacgaaatcac

SEQ ID NO: 14034 - DNA, 20 bp, Artificial Sequence
  Antisense compound
gtgctacttgtacgaaatca

SEQ ID NO: 14035 - DNA, 20 bp, Artificial Sequence
  Antisense compound
ggtgctacttgtacgaaatc

SEQ ID NO: 14036 - DNA, 20 bp, Artificial Sequence
  Antisense compound
tggtgctacttgtacgaaat

SEQ ID NO: 14037 - DNA, 20 bp, Artificial Sequence
  Antisense compound
ctggtgctacttgtacgaaa

SEQ ID NO: 14038 - DNA, 20 bp, Artificial Sequence
  Antisense compound
cctggtgctacttgtacgaa

SEQ ID NO: 14039 - DNA, 20 bp, Artificial Sequence
  Antisense compound
gcctggtgctacttgtacga

SEQ ID NO: 14040 - DNA, 20 bp, Artificial Sequence
  Antisense compound
agcctggtgctacttgtacg

SEQ ID NO: 14041 - DNA, 20 bp, Artificial Sequence
  Antisense compound
cagcctggtgctacttgtac

SEQ ID NO: 14042 - DNA, 20 bp, Artificial Sequence
  Antisense compound
gcagcctggtgctacttgta

SEQ ID NO: 14043 - DNA, 20 bp, Artificial Sequence
  Antisense compound
cgcagcctggtgctacttgt

SEQ ID NO: 14044 - DNA, 20 bp, Artificial Sequence
  Antisense compound
ccgcagcctggtgctacttg

SEQ ID NO: 14045 - DNA, 20 bp, Artificial Sequence
  Antisense compound
tccgcagcctggtgctactt

SEQ ID NO: 14046 - DNA, 20 bp, Artificial Sequence
  Antisense compound
ctccgcagcctggtgctact

SEQ ID NO: 14047 - DNA, 20 bp, Artificial Sequence
  Antisense compound
actccgcagcctggtgctac

SEQ ID NO: 14048 - DNA, 20 bp, Artificial Sequence
  Antisense compound
aactccgcagcctggtgcta

SEQ ID NO: 14049 - DNA, 20 bp, Artificial Sequence
  Antisense compound
gaactccgcagcctggtgct

SEQ ID NO: 14050 - DNA, 20 bp, Artificial Sequence
  Antisense compound
ggaactccgcagcctggtgc

SEQ ID NO: 14051 - DNA, 20 bp, Artificial Sequence
  Antisense compound
aggaactccgcagcctggtg

SEQ ID NO: 14052 - DNA, 20 bp, Artificial Sequence
  Antisense compound
taggaactccgcagcctggt

SEQ ID NO: 14053 - DNA, 20 bp, Artificial Sequence
  Antisense compound
ataggaactccgcagcctgg

SEQ ID NO: 14054 - DNA, 20 bp, Artificial Sequence
  Antisense compound
aataggaactccgcagcctg

SEQ ID NO: 14055 - DNA, 20 bp, Artificial Sequence
  Antisense compound
caataggaactccgcagcct

SEQ ID NO: 14056 - DNA, 20 bp, Artificial Sequence
  Antisense compound
acaataggaactccgcagcc

SEQ ID NO: 14057 - DNA, 20 bp, Artificial Sequence
  Antisense compound
cacaataggaactccgcagc

SEQ ID NO: 14058 - DNA, 20 bp, Artificial Sequence
  Antisense compound
ccacaataggaactccgcag

SEQ ID NO: 14059 - DNA, 20 bp, Artificial Sequence
  Antisense compound
tccacaataggaactccgca

SEQ ID NO: 14060 - DNA, 20 bp, Artificial Sequence
  Antisense compound
atccacaataggaactccgc

SEQ ID NO: 14061 - DNA, 20 bp, Artificial Sequence
  Antisense compound
aatccacaataggaactccg

SEQ ID NO: 14062 - DNA, 20 bp, Artificial Sequence
  Antisense compound
gaatccacaataggaactcc

SEQ ID NO: 14063 - DNA, 20 bp, Artificial Sequence
  Antisense compound
tgaatccacaataggaactc

SEQ ID NO: 14064 - DNA, 20 bp, Artificial Sequence
  Antisense compound
atgaatccacaataggaact

SEQ ID NO: 14065 - DNA, 20 bp, Artificial Sequence
  Antisense compound
tatgaatccacaataggaac

SEQ ID NO: 14066 - DNA, 20 bp, Artificial Sequence
  Antisense compound
atatgaatccacaataggaa

SEQ ID NO: 14067 - DNA, 20 bp, Artificial Sequence
  Antisense compound
aatatgaatccacaatagga

SEQ ID NO: 14068 - DNA, 20 bp, Artificial Sequence
  Antisense compound
taatatgaatccacaatagg

SEQ ID NO: 14069 - DNA, 20 bp, Artificial Sequence
  Antisense compound
gtaatatgaatccacaatag

SEQ ID NO: 14070 - DNA, 20 bp, Artificial Sequence
  Antisense compound
agtaatatgaatccacaata

SEQ ID NO: 14071 - DNA, 20 bp, Artificial Sequence
  Antisense compound
gagtaatatgaatccacaat

SEQ ID NO: 14072 - DNA, 20 bp, Artificial Sequence
  Antisense compound
tgagtaatatgaatccacaa

SEQ ID NO: 14073 - DNA, 20 bp, Artificial Sequence
  Antisense compound
atgagtaatatgaatccaca

SEQ ID NO: 14074 - DNA, 20 bp, Artificial Sequence
  Antisense compound
aatgagtaatatgaatccac

SEQ ID NO: 14075 - DNA, 20 bp, Artificial Sequence
  Antisense compound
caatgagtaatatgaatcca

SEQ ID NO: 14076 - DNA, 20 bp, Artificial Sequence
  Antisense compound
gcaatgagtaatatgaatcc

SEQ ID NO: 14077 - DNA, 20 bp, Artificial Sequence
  Antisense compound
agcaatgagtaatatgaatc

SEQ ID NO: 14078 - DNA, 20 bp, Artificial Sequence
  Antisense compound
cagcaatgagtaatatgaat

SEQ ID NO: 14079 - DNA, 20 bp, Artificial Sequence
  Antisense compound
tcagcaatgagtaatatgaa

SEQ ID NO: 14080 - DNA, 20 bp, Artificial Sequence
  Antisense compound
atcagcaatgagtaatatga

SEQ ID NO: 14081 - DNA, 20 bp, Artificial Sequence
  Antisense compound
catcagcaatgagtaatatg

SEQ ID NO: 14082 - DNA, 20 bp, Artificial Sequence
  Antisense compound
gcatcagcaatgagtaatat

SEQ ID NO: 14083 - DNA, 20 bp, Artificial Sequence
  Antisense compound
ggcatcagcaatgagtaata

SEQ ID NO: 14084 - DNA, 20 bp, Artificial Sequence
  Antisense compound
gggcatcagcaatgagtaat

SEQ ID NO: 14085 - DNA, 20 bp, Artificial Sequence
  Antisense compound
tgggcatcagcaatgagtaa

SEQ ID NO: 14086 - DNA, 20 bp, Artificial Sequence
  Antisense compound
atgggcatcagcaatgagta

SEQ ID NO: 14087 - DNA, 20 bp, Artificial Sequence
  Antisense compound
gatgggcatcagcaatgagt

SEQ ID NO: 14088 - DNA, 20 bp, Artificial Sequence
  Antisense compound
ggatgggcatcagcaatgag

SEQ ID NO: 14089 - DNA, 20 bp, Artificial Sequence
  Antisense compound
aggatgggcatcagcaatga

SEQ ID NO: 14090 - DNA, 20 bp, Artificial Sequence
  Antisense compound
gaggatgggcatcagcaatg

SEQ ID NO: 14091 - DNA, 20 bp, Artificial Sequence
  Antisense compound
tgaggatgggcatcagcaat

SEQ ID NO: 14092 - DNA, 20 bp, Artificial Sequence
  Antisense compound
gtgaggatgggcatcagcaa

SEQ ID NO: 14093 - DNA, 20 bp, Artificial Sequence
  Antisense compound
agtgaggatgggcatcagca

SEQ ID NO: 14094 - DNA, 20 bp, Artificial Sequence
  Antisense compound
aagtgaggatgggcatcagc

SEQ ID NO: 14095 - DNA, 20 bp, Artificial Sequence
  Antisense compound
aaagtgaggatgggcatcag

SEQ ID NO: 14096 - DNA, 20 bp, Artificial Sequence
  Antisense compound
caaagtgaggatgggcatca

SEQ ID NO: 14097 - DNA, 20 bp, Artificial Sequence
  Antisense compound
tcaaagtgaggatgggcatc

SEQ ID NO: 14098 - DNA, 20 bp, Artificial Sequence
  Antisense compound
gtcaaagtgaggatgggcat

SEQ ID NO: 14099 - DNA, 20 bp, Artificial Sequence
  Antisense compound
agtcaaagtgaggatgggca

SEQ ID NO: 14100 - DNA, 20 bp, Artificial Sequence
  Antisense compound
tagtcaaagtgaggatgggc

SEQ ID NO: 14101 - DNA, 20 bp, Artificial Sequence
  Antisense compound
ctagtcaaagtgaggatggg

SEQ ID NO: 14102 - DNA, 20 bp, Artificial Sequence
  Antisense compound
cctagtcaaagtgaggatgg

SEQ ID NO: 14103 - DNA, 20 bp, Artificial Sequence
  Antisense compound
ccctagtcaaagtgaggatg

SEQ ID NO: 14104 - DNA, 20 bp, Artificial Sequence
  Antisense compound
gccctagtcaaagtgaggat

SEQ ID NO: 14105 - DNA, 20 bp, Artificial Sequence
  Antisense compound
tgccctagtcaaagtgagga

SEQ ID NO: 14106 - DNA, 20 bp, Artificial Sequence
  Antisense compound
atgccctagtcaaagtgagg

SEQ ID NO: 14107 - DNA, 20 bp, Artificial Sequence
  Antisense compound
aatgccctagtcaaagtgag

SEQ ID NO: 14108 - DNA, 20 bp, Artificial Sequence
  Antisense compound
caatgccctagtcaaagtga

SEQ ID NO: 14109 - DNA, 20 bp, Artificial Sequence
  Antisense compound
ccaatgccctagtcaaagtg

SEQ ID NO: 14110 - DNA, 20 bp, Artificial Sequence
  Antisense compound
gccaatgccctagtcaaagt

SEQ ID NO: 14111 - DNA, 20 bp, Artificial Sequence
  Antisense compound
agccaatgccctagtcaaag

SEQ ID NO: 14112 - DNA, 20 bp, Artificial Sequence
  Antisense compound
cagccaatgccctagtcaaa

SEQ ID NO: 14113 - DNA, 20 bp, Artificial Sequence
  Antisense compound
gcagccaatgccctagtcaa

SEQ ID NO: 14114 - DNA, 20 bp, Artificial Sequence
  Antisense compound
agcagccaatgccctagtca

SEQ ID NO: 14115 - DNA, 20 bp, Artificial Sequence
  Antisense compound
cagcagccaatgccctagtc

SEQ ID NO: 14116 - DNA, 20 bp, Artificial Sequence
  Antisense compound
tcagcagccaatgccctagt

SEQ ID NO: 14117 - DNA, 20 bp, Artificial Sequence
  Antisense compound
ctcagcagccaatgccctag

SEQ ID NO: 14118 - DNA, 20 bp, Artificial Sequence
  Antisense compound
actcagcagccaatgcccta

SEQ ID NO: 14119 - DNA, 20 bp, Artificial Sequence
  Antisense compound
gactcagcagccaatgccct

SEQ ID NO: 14120 - DNA, 20 bp, Artificial Sequence
  Antisense compound
ggactcagcagccaatgccc

SEQ ID NO: 14121 - DNA, 20 bp, Artificial Sequence
  Antisense compound
gggactcagcagccaatgcc

SEQ ID NO: 14122 - DNA, 20 bp, Artificial Sequence
  Antisense compound
tgggactcagcagccaatgc

SEQ ID NO: 14123 - DNA, 20 bp, Artificial Sequence
  Antisense compound
atgggactcagcagccaatg

SEQ ID NO: 14124 - DNA, 20 bp, Artificial Sequence
  Antisense compound
tatgggactcagcagccaat

SEQ ID NO: 14125 - DNA, 20 bp, Artificial Sequence
  Antisense compound
atatgggactcagcagccaa

SEQ ID NO: 14126 - DNA, 20 bp, Artificial Sequence
  Antisense compound
catatgggactcagcagcca

SEQ ID NO: 14127 - DNA, 20 bp, Artificial Sequence
  Antisense compound
ccatatgggactcagcagcc

SEQ ID NO: 14128 - DNA, 20 bp, Artificial Sequence
  Antisense compound
tccatatgggactcagcagc

SEQ ID NO: 14129 - DNA, 20 bp, Artificial Sequence
  Antisense compound
atccatatgggactcagcag

SEQ ID NO: 14130 - DNA, 20 bp, Artificial Sequence
  Antisense compound
catccatatgggactcagca

SEQ ID NO: 14131 - DNA, 20 bp, Artificial Sequence
  Antisense compound
gcatccatatgggactcagc

SEQ ID NO: 14132 - DNA, 20 bp, Artificial Sequence
  Antisense compound
agcatccatatgggactcag

SEQ ID NO: 14133 - DNA, 20 bp, Artificial Sequence
  Antisense compound
cagcatccatatgggactca

SEQ ID NO: 14134 - DNA, 20 bp, Artificial Sequence
  Antisense compound
tcagcatccatatgggactc

SEQ ID NO: 14135 - DNA, 20 bp, Artificial Sequence
  Antisense compound
atcagcatccatatgggact

SEQ ID NO: 14136 - DNA, 20 bp, Artificial Sequence
  Antisense compound
gatcagcatccatatgggac

SEQ ID NO: 14137 - DNA, 20 bp, Artificial Sequence
  Antisense compound
agatcagcatccatatggga

SEQ ID NO: 14138 - DNA, 20 bp, Artificial Sequence
  Antisense compound
gagatcagcatccatatggg

SEQ ID NO: 14139 - DNA, 20 bp, Artificial Sequence
  Antisense compound
cgagatcagcatccatatgg

SEQ ID NO: 14140 - DNA, 20 bp, Artificial Sequence
  Antisense compound
gcgagatcagcatccatatg

SEQ ID NO: 14141 - DNA, 20 bp, Artificial Sequence
  Antisense compound
tgcgagatcagcatccatat

SEQ ID NO: 14142 - DNA, 20 bp, Artificial Sequence
  Antisense compound
ttgcgagatcagcatccata

SEQ ID NO: 14143 - DNA, 20 bp, Artificial Sequence
  Antisense compound
tttgcgagatcagcatccat

SEQ ID NO: 14144 - DNA, 20 bp, Artificial Sequence
  Antisense compound
ttttgcgagatcagcatcca

SEQ ID NO: 14145 - DNA, 20 bp, Artificial Sequence
  Antisense compound
gttttgcgagatcagcatcc

SEQ ID NO: 14146 - DNA, 20 bp, Artificial Sequence
  Antisense compound
ggttttgcgagatcagcatc

SEQ ID NO: 14147 - DNA, 20 bp, Artificial Sequence
  Antisense compound
tggttttgcgagatcagcat

SEQ ID NO: 14148 - DNA, 20 bp, Artificial Sequence
  Antisense compound
gtggttttgcgagatcagca

SEQ ID NO: 14149 - DNA, 20 bp, Artificial Sequence
  Antisense compound
agtggttttgcgagatcagc

SEQ ID NO: 14150 - DNA, 20 bp, Artificial Sequence
  Antisense compound
aagtggttttgcgagatcag

SEQ ID NO: 14151 - DNA, 20 bp, Artificial Sequence
  Antisense compound
taagtggttttgcgagatca

SEQ ID NO: 14152 - DNA, 20 bp, Artificial Sequence
  Antisense compound
ataagtggttttgcgagatc

SEQ ID NO: 14153 - DNA, 20 bp, Artificial Sequence
  Antisense compound
aataagtggttttgcgagat

SEQ ID NO: 14154 - DNA, 20 bp, Artificial Sequence
  Antisense compound
taataagtggttttgcgaga

SEQ ID NO: 14155 - DNA, 20 bp, Artificial Sequence
  Antisense compound
ttaataagtggttttgcgag

SEQ ID NO: 14156 - DNA, 20 bp, Artificial Sequence
  Antisense compound
cttaataagtggttttgcga

SEQ ID NO: 14157 - DNA, 20 bp, Artificial Sequence
  Antisense compound
acttaataagtggttttgcg

SEQ ID NO: 14158 - DNA, 20 bp, Artificial Sequence
  Antisense compound
cacttaataagtggttttgc

SEQ ID NO: 14159 - DNA, 20 bp, Artificial Sequence
  Antisense compound
ccacttaataagtggttttg

SEQ ID NO: 14160 - DNA, 20 bp, Artificial Sequence
  Antisense compound
cccacttaataagtggtttt

SEQ ID NO: 14161 - DNA, 20 bp, Artificial Sequence
  Antisense compound
tcccacttaataagtggttt

SEQ ID NO: 14162 - DNA, 20 bp, Artificial Sequence
  Antisense compound
atcccacttaataagtggtt

SEQ ID NO: 14163 - DNA, 20 bp, Artificial Sequence
  Antisense compound
aatcccacttaataagtggt

SEQ ID NO: 14164 - DNA, 20 bp, Artificial Sequence
  Antisense compound
aaatcccacttaataagtgg

SEQ ID NO: 14165 - DNA, 20 bp, Artificial Sequence
  Antisense compound
caaatcccacttaataagtg

SEQ ID NO: 14166 - DNA, 20 bp, Artificial Sequence
  Antisense compound
gcaaatcccacttaataagt

SEQ ID NO: 14167 - DNA, 20 bp, Artificial Sequence
  Antisense compound
agcaaatcccacttaataag

SEQ ID NO: 14168 - DNA, 20 bp, Artificial Sequence
  Antisense compound
cagcaaatcccacttaataa

SEQ ID NO: 14169 - DNA, 20 bp, Artificial Sequence
  Antisense compound
tcagcaaatcccacttaata

SEQ ID NO: 14170 - DNA, 20 bp, Artificial Sequence
  Antisense compound
ttcagcaaatcccacttaat

SEQ ID NO: 14171 - DNA, 20 bp, Artificial Sequence
  Antisense compound
tttcagcaaatcccacttaa

SEQ ID NO: 14172 - DNA, 20 bp, Artificial Sequence
  Antisense compound
atttcagcaaatcccactta

SEQ ID NO: 14173 - DNA, 20 bp, Artificial Sequence
  Antisense compound
tatttcagcaaatcccactt

SEQ ID NO: 14174 - DNA, 20 bp, Artificial Sequence
  Antisense compound
atatttcagcaaatcccact

SEQ ID NO: 14175 - DNA, 20 bp, Artificial Sequence
  Antisense compound
catatttcagcaaatcccac

SEQ ID NO: 14176 - DNA, 20 bp, Artificial Sequence
  Antisense compound
tcatatttcagcaaatccca

SEQ ID NO: 14177 - DNA, 20 bp, Artificial Sequence
  Antisense compound
atcatatttcagcaaatccc

SEQ ID NO: 14178 - DNA, 20 bp, Artificial Sequence
  Antisense compound
aatcatatttcagcaaatcc

SEQ ID NO: 14179 - DNA, 20 bp, Artificial Sequence
  Antisense compound
aaatcatatttcagcaaatc

SEQ ID NO: 14180 - DNA, 20 bp, Artificial Sequence
  Antisense compound
aaaatcatatttcagcaaat

SEQ ID NO: 14181 - DNA, 20 bp, Artificial Sequence
  Antisense compound
taaaatcatatttcagcaaa

SEQ ID NO: 14182 - DNA, 20 bp, Artificial Sequence
  Antisense compound
gtaaaatcatatttcagcaa

SEQ ID NO: 14183 - DNA, 20 bp, Artificial Sequence
  Antisense compound
cgtaaaatcatatttcagca

SEQ ID NO: 14184 - DNA, 20 bp, Artificial Sequence
  Antisense compound
ccgtaaaatcatatttcagc

SEQ ID NO: 14185 - DNA, 20 bp, Artificial Sequence
  Antisense compound
tccgtaaaatcatatttcag

SEQ ID NO: 14186 - DNA, 20 bp, Artificial Sequence
  Antisense compound
ttccgtaaaatcatatttca

SEQ ID NO: 14187 - DNA, 20 bp, Artificial Sequence
  Antisense compound
cttccgtaaaatcatatttc

SEQ ID NO: 14188 - DNA, 20 bp, Artificial Sequence
  Antisense compound
tcttccgtaaaatcatattt

SEQ ID NO: 14189 - DNA, 20 bp, Artificial Sequence
  Antisense compound
ctcttccgtaaaatcatatt

SEQ ID NO: 14190 - DNA, 20 bp, Artificial Sequence
  Antisense compound
tctcttccgtaaaatcatat

SEQ ID NO: 14191 - DNA, 20 bp, Artificial Sequence
  Antisense compound
ctctcttccgtaaaatcata

SEQ ID NO: 14192 - DNA, 20 bp, Artificial Sequence
  Antisense compound
tctctcttccgtaaaatcat

SEQ ID NO: 14193 - DNA, 20 bp, Artificial Sequence
  Antisense compound
gtctctcttccgtaaaatca

SEQ ID NO: 14194 - DNA, 20 bp, Artificial Sequence
  Antisense compound
agtctctcttccgtaaaatc

SEQ ID NO: 14195 - DNA, 20 bp, Artificial Sequence
  Antisense compound
aagtctctcttccgtaaaat

SEQ ID NO: 14196 - DNA, 20 bp, Artificial Sequence
  Antisense compound
aaagtctctcttccgtaaaa

SEQ ID NO: 14197 - DNA, 20 bp, Artificial Sequence
  Antisense compound
caaagtctctcttccgtaaa

SEQ ID NO: 14198 - DNA, 20 bp, Artificial Sequence
  Antisense compound
acaaagtctctcttccgtaa

SEQ ID NO: 14199 - DNA, 20 bp, Artificial Sequence
  Antisense compound
gacaaagtctctcttccgta

SEQ ID NO: 14200 - DNA, 20 bp, Artificial Sequence
  Antisense compound
agacaaagtctctcttccgt

SEQ ID NO: 14201 - DNA, 20 bp, Artificial Sequence
  Antisense compound
gagacaaagtctctcttccg

SEQ ID NO: 14202 - DNA, 20 bp, Artificial Sequence
  Antisense compound
agagacaaagtctctcttcc

SEQ ID NO: 14203 - DNA, 20 bp, Artificial Sequence
  Antisense compound
aagagacaaagtctctcttc

SEQ ID NO: 14204 - DNA, 20 bp, Artificial Sequence
  Antisense compound
gaagagacaaagtctctctt

SEQ ID NO: 14205 - DNA, 20 bp, Artificial Sequence
  Antisense compound
cgaagagacaaagtctctct

SEQ ID NO: 14206 - DNA, 20 bp, Artificial Sequence
  Antisense compound
tcgaagagacaaagtctctc

SEQ ID NO: 14207 - DNA, 20 bp, Artificial Sequence
  Antisense compound
gtcgaagagacaaagtctct

SEQ ID NO: 14208 - DNA, 20 bp, Artificial Sequence
  Antisense compound
ggtcgaagagacaaagtctc

SEQ ID NO: 14209 - DNA, 20 bp, Artificial Sequence
  Antisense compound
cggtcgaagagacaaagtct

SEQ ID NO: 14210 - DNA, 20 bp, Artificial Sequence
  Antisense compound
acggtcgaagagacaaagtc

SEQ ID NO: 14211 - DNA, 20 bp, Artificial Sequence
  Antisense compound
aacggtcgaagagacaaagt

SEQ ID NO: 14212 - DNA, 20 bp, Artificial Sequence
  Antisense compound
taacggtcgaagagacaaag

SEQ ID NO: 14213 - DNA, 20 bp, Artificial Sequence
  Antisense compound
ataacggtcgaagagacaaa

SEQ ID NO: 14214 - DNA, 20 bp, Artificial Sequence
  Antisense compound
aataacggtcgaagagacaa

SEQ ID NO: 14215 - DNA, 20 bp, Artificial Sequence
  Antisense compound
aaataacggtcgaagagaca

SEQ ID NO: 14216 - DNA, 20 bp, Artificial Sequence
  Antisense compound
aaaataacggtcgaagagac

SEQ ID NO: 14217 - DNA, 20 bp, Artificial Sequence
  Antisense compound
taaaataacggtcgaagaga

SEQ ID NO: 14218 - DNA, 20 bp, Artificial Sequence
  Antisense compound
ttaaaataacggtcgaagag

SEQ ID NO: 14219 - DNA, 20 bp, Artificial Sequence
  Antisense compound
tttaaaataacggtcgaaga

SEQ ID NO: 14220 - DNA, 20 bp, Artificial Sequence
  Antisense compound
atttaaaataacggtcgaag

SEQ ID NO: 14221 - DNA, 20 bp, Artificial Sequence
  Antisense compound
tatttaaaataacggtcgaa

SEQ ID NO: 14222 - DNA, 20 bp, Artificial Sequence
  Antisense compound
atatttaaaataacggtcga

SEQ ID NO: 14223 - DNA, 20 bp, Artificial Sequence
  Antisense compound
aatatttaaaataacggtcg

SEQ ID NO: 14224 - DNA, 20 bp, Artificial Sequence
  Antisense compound
caatatttaaaataacggtc

SEQ ID NO: 14225 - DNA, 20 bp, Artificial Sequence
  Antisense compound
ccaatatttaaaataacggt

SEQ ID NO: 14226 - DNA, 20 bp, Artificial Sequence
  Antisense compound
cccaatatttaaaataacgg

SEQ ID NO: 14227 - DNA, 20 bp, Artificial Sequence
  Antisense compound
tcccaatatttaaaataacg

SEQ ID NO: 14228 - DNA, 20 bp, Artificial Sequence
  Antisense compound
gtcccaatatttaaaataac

SEQ ID NO: 14229 - DNA, 20 bp, Artificial Sequence
  Antisense compound
ggtcccaatatttaaaataa

SEQ ID NO: 14230 - DNA, 20 bp, Artificial Sequence
  Antisense compound
tggtcccaatatttaaaata

SEQ ID NO: 14231 - DNA, 20 bp, Artificial Sequence
  Antisense compound
ctggtcccaatatttaaaat

SEQ ID NO: 14232 - DNA, 20 bp, Artificial Sequence
  Antisense compound
tctggtcccaatatttaaaa

SEQ ID NO: 14233 - DNA, 20 bp, Artificial Sequence
  Antisense compound
gtctggtcccaatatttaaa

SEQ ID NO: 14234 - DNA, 20 bp, Artificial Sequence
  Antisense compound
tgtctggtcccaatatttaa

SEQ ID NO: 14235 - DNA, 20 bp, Artificial Sequence
  Antisense compound
atgtctggtcccaatattta

SEQ ID NO: 14236 - DNA, 20 bp, Artificial Sequence
  Antisense compound
tatgtctggtcccaatattt

SEQ ID NO: 14237 - DNA, 20 bp, Artificial Sequence
  Antisense compound
gtatgtctggtcccaatatt

SEQ ID NO: 14238 - DNA, 20 bp, Artificial Sequence
  Antisense compound
ggtatgtctggtcccaatat

SEQ ID NO: 14239 - DNA, 20 bp, Artificial Sequence
  Antisense compound
tggtatgtctggtcccaata

SEQ ID NO: 14240 - DNA, 20 bp, Artificial Sequence
  Antisense compound
atggtatgtctggtcccaat

SEQ ID NO: 14241 - DNA, 20 bp, Artificial Sequence
  Antisense compound
gatggtatgtctggtcccaa

SEQ ID NO: 14242 - DNA, 20 bp, Artificial Sequence
  Antisense compound
ggatggtatgtctggtccca

SEQ ID NO: 14243 - DNA, 20 bp, Artificial Sequence
  Antisense compound
gggatggtatgtctggtccc

SEQ ID NO: 14244 - DNA, 20 bp, Artificial Sequence
  Antisense compound
tgggatggtatgtctggtcc

SEQ ID NO: 14245 - DNA, 20 bp, Artificial Sequence
  Antisense compound
ttgggatggtatgtctggtc

SEQ ID NO: 14246 - DNA, 20 bp, Artificial Sequence
  Antisense compound
attgggatggtatgtctggt

SEQ ID NO: 14247 - DNA, 20 bp, Artificial Sequence
  Antisense compound
aattgggatggtatgtctgg

SEQ ID NO: 14248 - DNA, 20 bp, Artificial Sequence
  Antisense compound
caattgggatggtatgtctg

SEQ ID NO: 14249 - DNA, 20 bp, Artificial Sequence
  Antisense compound
acaattgggatggtatgtct

SEQ ID NO: 14250 - DNA, 20 bp, Artificial Sequence
  Antisense compound
tacaattgggatggtatgtc

SEQ ID NO: 14251 - DNA, 20 bp, Artificial Sequence
  Antisense compound
atacaattgggatggtatgt

SEQ ID NO: 14252 - DNA, 20 bp, Artificial Sequence
  Antisense compound
aatacaattgggatggtatg

SEQ ID NO: 14253 - DNA, 20 bp, Artificial Sequence
  Antisense compound
taatacaattgggatggtat

SEQ ID NO: 14254 - DNA, 20 bp, Artificial Sequence
  Antisense compound
ttaatacaattgggatggta

SEQ ID NO: 14255 - DNA, 20 bp, Artificial Sequence
  Antisense compound
gttaatacaattgggatggt

SEQ ID NO: 14256 - DNA, 20 bp, Artificial Sequence
  Antisense compound
agttaatacaattgggatgg

SEQ ID NO: 14257 - DNA, 20 bp, Artificial Sequence
  Antisense compound
cagttaatacaattgggatg

SEQ ID NO: 14258 - DNA, 20 bp, Artificial Sequence
  Antisense compound
acagttaatacaattgggat

SEQ ID NO: 14259 - DNA, 20 bp, Artificial Sequence
  Antisense compound
aacagttaatacaattggga

SEQ ID NO: 14260 - DNA, 20 bp, Artificial Sequence
  Antisense compound
aaacagttaatacaattggg

SEQ ID NO: 14261 - DNA, 20 bp, Artificial Sequence
  Antisense compound
caaacagttaatacaattgg

SEQ ID NO: 14262 - DNA, 20 bp, Artificial Sequence
  Antisense compound
ccaaacagttaatacaattg

SEQ ID NO: 14263 - DNA, 20 bp, Artificial Sequence
  Antisense compound
tccaaacagttaatacaatt

SEQ ID NO: 14264 - DNA, 20 bp, Artificial Sequence
  Antisense compound
atccaaacagttaatacaat

SEQ ID NO: 14265 - DNA, 20 bp, Artificial Sequence
  Antisense compound
catccaaacagttaatacaa

SEQ ID NO: 14266 - DNA, 20 bp, Artificial Sequence
  Antisense compound
tcatccaaacagttaataca

SEQ ID NO: 14267 - DNA, 20 bp, Artificial Sequence
  Antisense compound
atcatccaaacagttaatac

SEQ ID NO: 14268 - DNA, 20 bp, Artificial Sequence
  Antisense compound
tatcatccaaacagttaata

SEQ ID NO: 14269 - DNA, 20 bp, Artificial Sequence
  Antisense compound
ctatcatccaaacagttaat

SEQ ID NO: 14270 - DNA, 20 bp, Artificial Sequence
  Antisense compound
cctatcatccaaacagttaa

SEQ ID NO: 14271 - DNA, 20 bp, Artificial Sequence
  Antisense compound
acctatcatccaaacagtta

SEQ ID NO: 14272 - DNA, 20 bp, Artificial Sequence
  Antisense compound
cacctatcatccaaacagtt

SEQ ID NO: 14273 - DNA, 20 bp, Artificial Sequence
  Antisense compound
acacctatcatccaaacagt

SEQ ID NO: 14274 - DNA, 20 bp, Artificial Sequence
  Antisense compound
tacacctatcatccaaacag

SEQ ID NO: 14275 - DNA, 20 bp, Artificial Sequence
  Antisense compound
atacacctatcatccaaaca

SEQ ID NO: 14276 - DNA, 20 bp, Artificial Sequence
  Antisense compound
gatacacctatcatccaaac

SEQ ID NO: 14277 - DNA, 20 bp, Artificial Sequence
  Antisense compound
ggatacacctatcatccaaa

SEQ ID NO: 14278 - DNA, 20 bp, Artificial Sequence
  Antisense compound
aggatacacctatcatccaa

SEQ ID NO: 14279 - DNA, 20 bp, Artificial Sequence
  Antisense compound
aaggatacacctatcatcca

SEQ ID NO: 14280 - DNA, 20 bp, Artificial Sequence
  Antisense compound
gaaggatacacctatcatcc

SEQ ID NO: 14281 - DNA, 20 bp, Artificial Sequence
  Antisense compound
tgaaggatacacctatcatc

SEQ ID NO: 14282 - DNA, 20 bp, Artificial Sequence
  Antisense compound
atgaaggatacacctatcat

SEQ ID NO: 14283 - DNA, 20 bp, Artificial Sequence
  Antisense compound
aatgaaggatacacctatca

SEQ ID NO: 14284 - DNA, 20 bp, Artificial Sequence
  Antisense compound
caatgaaggatacacctatc

SEQ ID NO: 14285 - DNA, 20 bp, Artificial Sequence
  Antisense compound
acaatgaaggatacacctat

SEQ ID NO: 14286 - DNA, 20 bp, Artificial Sequence
  Antisense compound
cacaatgaaggatacaccta

SEQ ID NO: 14287 - DNA, 20 bp, Artificial Sequence
  Antisense compound
gcacaatgaaggatacacct

SEQ ID NO: 14288 - DNA, 20 bp, Artificial Sequence
  Antisense compound
tgcacaatgaaggatacacc

SEQ ID NO: 14289 - DNA, 20 bp, Artificial Sequence
  Antisense compound
ttgcacaatgaaggatacac

SEQ ID NO: 14290 - DNA, 20 bp, Artificial Sequence
  Antisense compound
tttgcacaatgaaggataca

SEQ ID NO: 14291 - DNA, 20 bp, Artificial Sequence
  Antisense compound
gtttgcacaatgaaggatac

SEQ ID NO: 14292 - DNA, 20 bp, Artificial Sequence
  Antisense compound
agtttgcacaatgaaggata

SEQ ID NO: 14293 - DNA, 20 bp, Artificial Sequence
  Antisense compound
aagtttgcacaatgaaggat

SEQ ID NO: 14294 - DNA, 20 bp, Artificial Sequence
  Antisense compound
aaagtttgcacaatgaagga

SEQ ID NO: 14295 - DNA, 20 bp, Artificial Sequence
  Antisense compound
taaagtttgcacaatgaagg

SEQ ID NO: 14296 - DNA, 20 bp, Artificial Sequence
  Antisense compound
ttaaagtttgcacaatgaag

SEQ ID NO: 14297 - DNA, 20 bp, Artificial Sequence
  Antisense compound
attaaagtttgcacaatgaa

SEQ ID NO: 14298 - DNA, 20 bp, Artificial Sequence
  Antisense compound
cattaaagtttgcacaatga

SEQ ID NO: 14299 - DNA, 20 bp, Artificial Sequence
  Antisense compound
acattaaagtttgcacaatg

SEQ ID NO: 14300 - DNA, 20 bp, Artificial Sequence
  Antisense compound
cacattaaagtttgcacaat

SEQ ID NO: 14301 - DNA, 20 bp, Artificial Sequence
  Antisense compound
acacattaaagtttgcacaa

SEQ ID NO: 14302 - DNA, 20 bp, Artificial Sequence
  Antisense compound
aacacattaaagtttgcaca

SEQ ID NO: 14303 - DNA, 20 bp, Artificial Sequence
  Antisense compound
taacacattaaagtttgcac

SEQ ID NO: 14304 - DNA, 20 bp, Artificial Sequence
  Antisense compound
ataacacattaaagtttgca

SEQ ID NO: 14305 - DNA, 20 bp, Artificial Sequence
  Antisense compound
aataacacattaaagtttgc

SEQ ID NO: 14306 - DNA, 20 bp, Artificial Sequence
  Antisense compound
aaataacacattaaagtttg

SEQ ID NO: 14307 - DNA, 20 bp, Artificial Sequence
  Antisense compound
aaaataacacattaaagttt

SEQ ID NO: 14308 - DNA, 20 bp, Artificial Sequence
  Antisense compound
gaaaataacacattaaagtt

SEQ ID NO: 14309 - DNA, 20 bp, Artificial Sequence
  Antisense compound
agaaaataacacattaaagt

SEQ ID NO: 14310 - DNA, 20 bp, Artificial Sequence
  Antisense compound
tagaaaataacacattaaag

SEQ ID NO: 14311 - DNA, 20 bp, Artificial Sequence
  Antisense compound
gtagaaaataacacattaaa

SEQ ID NO: 14312 - DNA, 20 bp, Artificial Sequence
  Antisense compound
agtagaaaataacacattaa

SEQ ID NO: 14313 - DNA, 20 bp, Artificial Sequence
  Antisense compound
cagtagaaaataacacatta

SEQ ID NO: 14314 - DNA, 20 bp, Artificial Sequence
  Antisense compound
acagtagaaaataacacatt

SEQ ID NO: 14315 - DNA, 20 bp, Artificial Sequence
  Antisense compound
cacagtagaaaataacacat

SEQ ID NO: 14316 - DNA, 20 bp, Artificial Sequence
  Antisense compound
acacagtagaaaataacaca

SEQ ID NO: 14317 - DNA, 20 bp, Artificial Sequence
  Antisense compound
aacacagtagaaaataacac

SEQ ID NO: 14318 - DNA, 20 bp, Artificial Sequence
  Antisense compound
aaacacagtagaaaataaca

SEQ ID NO: 14319 - DNA, 20 bp, Artificial Sequence
  Antisense compound
gaaacacagtagaaaataac

SEQ ID NO: 14320 - DNA, 20 bp, Artificial Sequence
  Antisense compound
ggaaacacagtagaaaataa

SEQ ID NO: 14321 - DNA, 20 bp, Artificial Sequence
  Antisense compound
tggaaacacagtagaaaata

SEQ ID NO: 14322 - DNA, 20 bp, Artificial Sequence
  Antisense compound
gtggaaacacagtagaaaat

SEQ ID NO: 14323 - DNA, 20 bp, Artificial Sequence
  Antisense compound
ggtggaaacacagtagaaaa

SEQ ID NO: 14324 - DNA, 20 bp, Artificial Sequence
  Antisense compound
aggtggaaacacagtagaaa

SEQ ID NO: 14325 - DNA, 20 bp, Artificial Sequence
  Antisense compound
taggtggaaacacagtagaa

SEQ ID NO: 14326 - DNA, 20 bp, Artificial Sequence
  Antisense compound
gtaggtggaaacacagtaga

SEQ ID NO: 14327 - DNA, 20 bp, Artificial Sequence
  Antisense compound
tgtaggtggaaacacagtag

SEQ ID NO: 14328 - DNA, 20 bp, Artificial Sequence
  Antisense compound
ttgtaggtggaaacacagta

SEQ ID NO: 14329 - DNA, 20 bp, Artificial Sequence
  Antisense compound
cttgtaggtggaaacacagt

SEQ ID NO: 14330 - DNA, 20 bp, Artificial Sequence
  Antisense compound
acttgtaggtggaaacacag

SEQ ID NO: 14331 - DNA, 20 bp, Artificial Sequence
  Antisense compound
aacttgtaggtggaaacaca

SEQ ID NO: 14332 - DNA, 20 bp, Artificial Sequence
  Antisense compound
aaacttgtaggtggaaacac

SEQ ID NO: 14333 - DNA, 20 bp, Artificial Sequence
  Antisense compound
aaaacttgtaggtggaaaca

SEQ ID NO: 14334 - DNA, 20 bp, Artificial Sequence
  Antisense compound
caaaacttgtaggtggaaac

SEQ ID NO: 14335 - DNA, 20 bp, Artificial Sequence
  Antisense compound
ccaaaacttgtaggtggaaa

SEQ ID NO: 14336 - DNA, 20 bp, Artificial Sequence
  Antisense compound
tccaaaacttgtaggtggaa

SEQ ID NO: 14337 - DNA, 20 bp, Artificial Sequence
  Antisense compound
gtccaaaacttgtaggtgga

SEQ ID NO: 14338 - DNA, 20 bp, Artificial Sequence
  Antisense compound
ggtccaaaacttgtaggtgg

SEQ ID NO: 14339 - DNA, 20 bp, Artificial Sequence
  Antisense compound
tggtccaaaacttgtaggtg

SEQ ID NO: 14340 - DNA, 20 bp, Artificial Sequence
  Antisense compound
gtggtccaaaacttgtaggt

SEQ ID NO: 14341 - DNA, 20 bp, Artificial Sequence
  Antisense compound
agtggtccaaaacttgtagg

SEQ ID NO: 14342 - DNA, 20 bp, Artificial Sequence
  Antisense compound
tagtggtccaaaacttgtag

SEQ ID NO: 14343 - DNA, 20 bp, Artificial Sequence
  Antisense compound
ctagtggtccaaaacttgta

SEQ ID NO: 14344 - DNA, 20 bp, Artificial Sequence
  Antisense compound
actagtggtccaaaacttgt

SEQ ID NO: 14345 - DNA, 20 bp, Artificial Sequence
  Antisense compound
tactagtggtccaaaacttg

SEQ ID NO: 14346 - DNA, 20 bp, Artificial Sequence
  Antisense compound
ttactagtggtccaaaactt

SEQ ID NO: 14347 - DNA, 20 bp, Artificial Sequence
  Antisense compound
cttactagtggtccaaaact

SEQ ID NO: 14348 - DNA, 20 bp, Artificial Sequence
  Antisense compound
tcttactagtggtccaaaac

SEQ ID NO: 14349 - DNA, 20 bp, Artificial Sequence
  Antisense compound
ttcttactagtggtccaaaa

SEQ ID NO: 14350 - DNA, 20 bp, Artificial Sequence
  Antisense compound
tttcttactagtggtccaaa

SEQ ID NO: 14351 - DNA, 20 bp, Artificial Sequence
  Antisense compound
ttttcttactagtggtccaa

SEQ ID NO: 14352 - DNA, 20 bp, Artificial Sequence
  Antisense compound
tttttcttactagtggtcca

SEQ ID NO: 14353 - DNA, 20 bp, Artificial Sequence
  Antisense compound
atttttcttactagtggtcc

SEQ ID NO: 14354 - DNA, 20 bp, Artificial Sequence
  Antisense compound
tatttttcttactagtggtc

SEQ ID NO: 14355 - DNA, 20 bp, Artificial Sequence
  Antisense compound
atatttttcttactagtggt

SEQ ID NO: 14356 - DNA, 20 bp, Artificial Sequence
  Antisense compound
aatatttttcttactagtgg

SEQ ID NO: 14357 - DNA, 20 bp, Artificial Sequence
  Antisense compound
aaatatttttcttactagtg

SEQ ID NO: 14358 - DNA, 20 bp, Artificial Sequence
  Antisense compound
caaatatttttcttactagt

SEQ ID NO: 14359 - DNA, 20 bp, Artificial Sequence
  Antisense compound
acaaatatttttcttactag

SEQ ID NO: 14360 - DNA, 20 bp, Artificial Sequence
  Antisense compound
tacaaatatttttcttacta

SEQ ID NO: 14361 - DNA, 20 bp, Artificial Sequence
  Antisense compound
ctacaaatatttttcttact

SEQ ID NO: 14362 - DNA, 20 bp, Artificial Sequence
  Antisense compound
tctacaaatatttttcttac

SEQ ID NO: 14363 - DNA, 20 bp, Artificial Sequence
  Antisense compound
atctacaaatatttttctta

SEQ ID NO: 14364 - DNA, 20 bp, Artificial Sequence
  Antisense compound
catctacaaatatttttctt

SEQ ID NO: 14365 - DNA, 20 bp, Artificial Sequence
  Antisense compound
ccatctacaaatatttttct

SEQ ID NO: 14366 - DNA, 20 bp, Artificial Sequence
  Antisense compound
accatctacaaatatttttc

SEQ ID NO: 14367 - DNA, 20 bp, Artificial Sequence
  Antisense compound
caccatctacaaatattttt

SEQ ID NO: 14368 - DNA, 20 bp, Artificial Sequence
  Antisense compound
acaccatctacaaatatttt

SEQ ID NO: 14369 - DNA, 20 bp, Artificial Sequence
  Antisense compound
aacaccatctacaaatattt

SEQ ID NO: 14370 - DNA, 20 bp, Artificial Sequence
  Antisense compound
gaacaccatctacaaatatt

SEQ ID NO: 14371 - DNA, 20 bp, Artificial Sequence
  Antisense compound
ggaacaccatctacaaatat

SEQ ID NO: 14372 - DNA, 20 bp, Artificial Sequence
  Antisense compound
aggaacaccatctacaaata

SEQ ID NO: 14373 - DNA, 20 bp, Artificial Sequence
  Antisense compound
aaggaacaccatctacaaat

SEQ ID NO: 14374 - DNA, 20 bp, Artificial Sequence
  Antisense compound
aaaggaacaccatctacaaa

SEQ ID NO: 14375 - DNA, 20 bp, Artificial Sequence
  Antisense compound
aaaaggaacaccatctacaa

SEQ ID NO: 14376 - DNA, 20 bp, Artificial Sequence
  Antisense compound
caaaaggaacaccatctaca

SEQ ID NO: 14377 - DNA, 20 bp, Artificial Sequence
  Antisense compound
acaaaaggaacaccatctac

SEQ ID NO: 14378 - DNA, 20 bp, Artificial Sequence
  Antisense compound
aacaaaaggaacaccatcta

SEQ ID NO: 14379 - DNA, 20 bp, Artificial Sequence
  Antisense compound
caacaaaaggaacaccatct

SEQ ID NO: 14380 - DNA, 20 bp, Artificial Sequence
  Antisense compound
acaacaaaaggaacaccatc

SEQ ID NO: 14381 - DNA, 20 bp, Artificial Sequence
  Antisense compound
aacaacaaaaggaacaccat

SEQ ID NO: 14382 - DNA, 20 bp, Artificial Sequence
  Antisense compound
aaacaacaaaaggaacacca

SEQ ID NO: 14383 - DNA, 20 bp, Artificial Sequence
  Antisense compound
gaaacaacaaaaggaacacc

SEQ ID NO: 14384 - DNA, 20 bp, Artificial Sequence
  Antisense compound
tgaaacaacaaaaggaacac

SEQ ID NO: 14385 - DNA, 20 bp, Artificial Sequence
  Antisense compound
ttgaaacaacaaaaggaaca

SEQ ID NO: 14386 - DNA, 20 bp, Artificial Sequence
  Antisense compound
gttgaaacaacaaaaggaac

SEQ ID NO: 14387 - DNA, 20 bp, Artificial Sequence
  Antisense compound
agttgaaacaacaaaaggaa

SEQ ID NO: 14388 - DNA, 20 bp, Artificial Sequence
  Antisense compound
cagttgaaacaacaaaagga

SEQ ID NO: 14389 - DNA, 20 bp, Artificial Sequence
  Antisense compound
ccagttgaaacaacaaaagg

SEQ ID NO: 14390 - DNA, 20 bp, Artificial Sequence
  Antisense compound
tccagttgaaacaacaaaag

SEQ ID NO: 14391 - DNA, 20 bp, Artificial Sequence
  Antisense compound
atccagttgaaacaacaaaa

SEQ ID NO: 14392 - DNA, 20 bp, Artificial Sequence
  Antisense compound
tatccagttgaaacaacaaa

SEQ ID NO: 14393 - DNA, 20 bp, Artificial Sequence
  Antisense compound
gtatccagttgaaacaacaa

SEQ ID NO: 14394 - DNA, 20 bp, Artificial Sequence
  Antisense compound
ggtatccagttgaaacaaca

SEQ ID NO: 14395 - DNA, 20 bp, Artificial Sequence
  Antisense compound
tggtatccagttgaaacaac

SEQ ID NO: 14396 - DNA, 20 bp, Artificial Sequence
  Antisense compound
atggtatccagttgaaacaa

SEQ ID NO: 14397 - DNA, 20 bp, Artificial Sequence
  Antisense compound
aatggtatccagttgaaaca

SEQ ID NO: 14398 - DNA, 20 bp, Artificial Sequence
  Antisense compound
aaatggtatccagttgaaac

SEQ ID NO: 14399 - DNA, 20 bp, Artificial Sequence
  Antisense compound
aaaatggtatccagttgaaa

SEQ ID NO: 14400 - DNA, 20 bp, Artificial Sequence
  Antisense compound
gaaaatggtatccagttgaa

SEQ ID NO: 14401 - DNA, 20 bp, Artificial Sequence
  Antisense compound
cgaaaatggtatccagttga

SEQ ID NO: 14402 - DNA, 20 bp, Artificial Sequence
  Antisense compound
acgaaaatggtatccagttg

SEQ ID NO: 14403 - DNA, 20 bp, Artificial Sequence
  Antisense compound
cacgaaaatggtatccagtt

SEQ ID NO: 14404 - DNA, 20 bp, Artificial Sequence
  Antisense compound
tcacgaaaatggtatccagt

SEQ ID NO: 14405 - DNA, 20 bp, Artificial Sequence
  Antisense compound
ctcacgaaaatggtatccag

SEQ ID NO: 14406 - DNA, 20 bp, Artificial Sequence
  Antisense compound
actcacgaaaatggtatcca

SEQ ID NO: 14407 - DNA, 20 bp, Artificial Sequence
  Antisense compound
aactcacgaaaatggtatcc

SEQ ID NO: 14408 - DNA, 20 bp, Artificial Sequence
  Antisense compound
taactcacgaaaatggtatc

SEQ ID NO: 14409 - DNA, 20 bp, Artificial Sequence
  Antisense compound
ctaactcacgaaaatggtat

SEQ ID NO: 14410 - DNA, 20 bp, Artificial Sequence
  Antisense compound
cctaactcacgaaaatggta

SEQ ID NO: 14411 - DNA, 20 bp, Artificial Sequence
  Antisense compound
tcctaactcacgaaaatggt

SEQ ID NO: 14412 - DNA, 20 bp, Artificial Sequence
  Antisense compound
ctcctaactcacgaaaatgg

SEQ ID NO: 14413 - DNA, 20 bp, Artificial Sequence
  Antisense compound
actcctaactcacgaaaatg

SEQ ID NO: 14414 - DNA, 20 bp, Artificial Sequence
  Antisense compound
gactcctaactcacgaaaat

SEQ ID NO: 14415 - DNA, 20 bp, Artificial Sequence
  Antisense compound
cgactcctaactcacgaaaa

SEQ ID NO: 14416 - DNA, 20 bp, Artificial Sequence
  Antisense compound
acgactcctaactcacgaaa

SEQ ID NO: 14417 - DNA, 20 bp, Artificial Sequence
  Antisense compound
tacgactcctaactcacgaa

SEQ ID NO: 14418 - DNA, 20 bp, Artificial Sequence
  Antisense compound
gtacgactcctaactcacga

SEQ ID NO: 14419 - DNA, 20 bp, Artificial Sequence
  Antisense compound
tgtacgactcctaactcacg

SEQ ID NO: 14420 - DNA, 20 bp, Artificial Sequence
  Antisense compound
atgtacgactcctaactcac

SEQ ID NO: 14421 - DNA, 20 bp, Artificial Sequence
  Antisense compound
tatgtacgactcctaactca

SEQ ID NO: 14422 - DNA, 20 bp, Artificial Sequence
  Antisense compound
ttatgtacgactcctaactc

SEQ ID NO: 14423 - DNA, 20 bp, Artificial Sequence
  Antisense compound
attatgtacgactcctaact

SEQ ID NO: 14424 - DNA, 20 bp, Artificial Sequence
  Antisense compound
gattatgtacgactcctaac

SEQ ID NO: 14425 - DNA, 20 bp, Artificial Sequence
  Antisense compound
tgattatgtacgactcctaa

SEQ ID NO: 14426 - DNA, 20 bp, Artificial Sequence
  Antisense compound
ctgattatgtacgactccta

SEQ ID NO: 14427 - DNA, 20 bp, Artificial Sequence
  Antisense compound
cctgattatgtacgactcct

SEQ ID NO: 14428 - DNA, 20 bp, Artificial Sequence
  Antisense compound
tcctgattatgtacgactcc

SEQ ID NO: 14429 - DNA, 20 bp, Artificial Sequence
  Antisense compound
atcctgattatgtacgactc

SEQ ID NO: 14430 - DNA, 20 bp, Artificial Sequence
  Antisense compound
catcctgattatgtacgact

SEQ ID NO: 14431 - DNA, 20 bp, Artificial Sequence
  Antisense compound
acatcctgattatgtacgac

SEQ ID NO: 14432 - DNA, 20 bp, Artificial Sequence
  Antisense compound
tacatcctgattatgtacga

SEQ ID NO: 14433 - DNA, 20 bp, Artificial Sequence
  Antisense compound
ttacatcctgattatgtacg

SEQ ID NO: 14434 - DNA, 20 bp, Artificial Sequence
  Antisense compound
tttacatcctgattatgtac

SEQ ID NO: 14435 - DNA, 20 bp, Artificial Sequence
  Antisense compound
gtttacatcctgattatgta

SEQ ID NO: 14436 - DNA, 20 bp, Artificial Sequence
  Antisense compound
agtttacatcctgattatgt

SEQ ID NO: 14437 - DNA, 20 bp, Artificial Sequence
  Antisense compound
aagtttacatcctgattatg

SEQ ID NO: 14438 - DNA, 20 bp, Artificial Sequence
  Antisense compound
taagtttacatcctgattat

SEQ ID NO: 14439 - DNA, 20 bp, Artificial Sequence
  Antisense compound
gtaagtttacatcctgatta

SEQ ID NO: 14440 - DNA, 20 bp, Artificial Sequence
  Antisense compound
tgtaagtttacatcctgatt

SEQ ID NO: 14441 - DNA, 20 bp, Artificial Sequence
  Antisense compound
atgtaagtttacatcctgat

SEQ ID NO: 14442 - DNA, 20 bp, Artificial Sequence
  Antisense compound
tatgtaagtttacatcctga

SEQ ID NO: 14443 - DNA, 20 bp, Artificial Sequence
  Antisense compound
ctatgtaagtttacatcctg

SEQ ID NO: 14444 - DNA, 20 bp, Artificial Sequence
  Antisense compound
gctatgtaagtttacatcct

SEQ ID NO: 14445 - DNA, 20 bp, Artificial Sequence
  Antisense compound
agctatgtaagtttacatcc

SEQ ID NO: 14446 - DNA, 20 bp, Artificial Sequence
  Antisense compound
gagctatgtaagtttacatc

SEQ ID NO: 14447 - DNA, 20 bp, Artificial Sequence
  Antisense compound
cgagctatgtaagtttacat

SEQ ID NO: 14448 - DNA, 20 bp, Artificial Sequence
  Antisense compound
gcgagctatgtaagtttaca

SEQ ID NO: 14449 - DNA, 20 bp, Artificial Sequence
  Antisense compound
cgcgagctatgtaagtttac

SEQ ID NO: 14450 - DNA, 20 bp, Artificial Sequence
  Antisense compound
acgcgagctatgtaagttta

SEQ ID NO: 14451 - DNA, 20 bp, Artificial Sequence
  Antisense compound
gacgcgagctatgtaagttt

SEQ ID NO: 14452 - DNA, 20 bp, Artificial Sequence
  Antisense compound
agacgcgagctatgtaagtt

SEQ ID NO: 14453 - DNA, 20 bp, Artificial Sequence
  Antisense compound
gagacgcgagctatgtaagt

SEQ ID NO: 14454 - DNA, 20 bp, Artificial Sequence
  Antisense compound
tgagacgcgagctatgtaag

SEQ ID NO: 14455 - DNA, 20 bp, Artificial Sequence
  Antisense compound
ctgagacgcgagctatgtaa

SEQ ID NO: 14456 - DNA, 20 bp, Artificial Sequence
  Antisense compound
actgagacgcgagctatgta

SEQ ID NO: 14457 - DNA, 20 bp, Artificial Sequence
  Antisense compound
aactgagacgcgagctatgt

SEQ ID NO: 14458 - DNA, 20 bp, Artificial Sequence
  Antisense compound
aaactgagacgcgagctatg

SEQ ID NO: 14459 - DNA, 20 bp, Artificial Sequence
  Antisense compound
gaaactgagacgcgagctat

SEQ ID NO: 14460 - DNA, 20 bp, Artificial Sequence
  Antisense compound
tgaaactgagacgcgagcta

SEQ ID NO: 14461 - DNA, 20 bp, Artificial Sequence
  Antisense compound
ttgaaactgagacgcgagct

SEQ ID NO: 14462 - DNA, 20 bp, Artificial Sequence
  Antisense compound
cttgaaactgagacgcgagc

SEQ ID NO: 14463 - DNA, 20 bp, Artificial Sequence
  Antisense compound
ccttgaaactgagacgcgag

SEQ ID NO: 14464 - DNA, 20 bp, Artificial Sequence
  Antisense compound
tccttgaaactgagacgcga

SEQ ID NO: 14465 - DNA, 20 bp, Artificial Sequence
  Antisense compound
ttccttgaaactgagacgcg

SEQ ID NO: 14466 - DNA, 20 bp, Artificial Sequence
  Antisense compound
gttccttgaaactgagacgc

SEQ ID NO: 14467 - DNA, 20 bp, Artificial Sequence
  Antisense compound
agttccttgaaactgagacg

SEQ ID NO: 14468 - DNA, 20 bp, Artificial Sequence
  Antisense compound
aagttccttgaaactgagac

SEQ ID NO: 14469 - DNA, 20 bp, Artificial Sequence
  Antisense compound
aaagttccttgaaactgaga

SEQ ID NO: 14470 - DNA, 20 bp, Artificial Sequence
  Antisense compound
aaaagttccttgaaactgag

SEQ ID NO: 14471 - DNA, 20 bp, Artificial Sequence
  Antisense compound
taaaagttccttgaaactga

SEQ ID NO: 14472 - DNA, 20 bp, Artificial Sequence
  Antisense compound
ctaaaagttccttgaaactg

SEQ ID NO: 14473 - DNA, 20 bp, Artificial Sequence
  Antisense compound
actaaaagttccttgaaact

SEQ ID NO: 14474 - DNA, 20 bp, Artificial Sequence
  Antisense compound
cactaaaagttccttgaaac

SEQ ID NO: 14475 - DNA, 20 bp, Artificial Sequence
  Antisense compound
acactaaaagttccttgaaa

SEQ ID NO: 14476 - DNA, 20 bp, Artificial Sequence
  Antisense compound
tacactaaaagttccttgaa

SEQ ID NO: 14477 - DNA, 20 bp, Artificial Sequence
  Antisense compound
atacactaaaagttccttga

SEQ ID NO: 14478 - DNA, 20 bp, Artificial Sequence
  Antisense compound
catacactaaaagttccttg

SEQ ID NO: 14479 - DNA, 20 bp, Artificial Sequence
  Antisense compound
gcatacactaaaagttcctt

SEQ ID NO: 14480 - DNA, 20 bp, Artificial Sequence
  Antisense compound
agcatacactaaaagttcct

SEQ ID NO: 14481 - DNA, 20 bp, Artificial Sequence
  Antisense compound
cagcatacactaaaagttcc

SEQ ID NO: 14482 - DNA, 20 bp, Artificial Sequence
  Antisense compound
gcagcatacactaaaagttc

SEQ ID NO: 14483 - DNA, 20 bp, Artificial Sequence
  Antisense compound
agcagcatacactaaaagtt

SEQ ID NO: 14484 - DNA, 20 bp, Artificial Sequence
  Antisense compound
cagcagcatacactaaaagt

SEQ ID NO: 14485 - DNA, 20 bp, Artificial Sequence
  Antisense compound
tcagcagcatacactaaaag

SEQ ID NO: 14486 - DNA, 20 bp, Artificial Sequence
  Antisense compound
atcagcagcatacactaaaa

SEQ ID NO: 14487 - DNA, 20 bp, Artificial Sequence
  Antisense compound
gatcagcagcatacactaaa

SEQ ID NO: 14488 - DNA, 20 bp, Artificial Sequence
  Antisense compound
ggatcagcagcatacactaa

SEQ ID NO: 14489 - DNA, 20 bp, Artificial Sequence
  Antisense compound
tggatcagcagcatacacta

SEQ ID NO: 14490 - DNA, 20 bp, Artificial Sequence
  Antisense compound
ctggatcagcagcatacact

SEQ ID NO: 14491 - DNA, 20 bp, Artificial Sequence
  Antisense compound
gctggatcagcagcatacac

SEQ ID NO: 14492 - DNA, 20 bp, Artificial Sequence
  Antisense compound
agctggatcagcagcataca

SEQ ID NO: 14493 - DNA, 20 bp, Artificial Sequence
  Antisense compound
tagctggatcagcagcatac

SEQ ID NO: 14494 - DNA, 20 bp, Artificial Sequence
  Antisense compound
atagctggatcagcagcata

SEQ ID NO: 14495 - DNA, 20 bp, Artificial Sequence
  Antisense compound
catagctggatcagcagcat

SEQ ID NO: 14496 - DNA, 20 bp, Artificial Sequence
  Antisense compound
gcatagctggatcagcagca

SEQ ID NO: 14497 - DNA, 20 bp, Artificial Sequence
  Antisense compound
tgcatagctggatcagcagc

SEQ ID NO: 14498 - DNA, 20 bp, Artificial Sequence
  Antisense compound
atgcatagctggatcagcag

SEQ ID NO: 14499 - DNA, 20 bp, Artificial Sequence
  Antisense compound
catgcatagctggatcagca

SEQ ID NO: 14500 - DNA, 20 bp, Artificial Sequence
  Antisense compound
gcatgcatagctggatcagc

SEQ ID NO: 14501 - DNA, 20 bp, Artificial Sequence
  Antisense compound
tgcatgcatagctggatcag

SEQ ID NO: 14502 - DNA, 20 bp, Artificial Sequence
  Antisense compound
ctgcatgcatagctggatca

SEQ ID NO: 14503 - DNA, 20 bp, Artificial Sequence
  Antisense compound
gctgcatgcatagctggatc

SEQ ID NO: 14504 - DNA, 20 bp, Artificial Sequence
  Antisense compound
agctgcatgcatagctggat

SEQ ID NO: 14505 - DNA, 20 bp, Artificial Sequence
  Antisense compound
aagctgcatgcatagctgga

SEQ ID NO: 14506 - DNA, 20 bp, Artificial Sequence
  Antisense compound
gaagctgcatgcatagctgg

SEQ ID NO: 14507 - DNA, 20 bp, Artificial Sequence
  Antisense compound
agaagctgcatgcatagctg

SEQ ID NO: 14508 - DNA, 20 bp, Artificial Sequence
  Antisense compound
cagaagctgcatgcatagct

SEQ ID NO: 14509 - DNA, 20 bp, Artificial Sequence
  Antisense compound
ccagaagctgcatgcatagc

SEQ ID NO: 14510 - DNA, 20 bp, Artificial Sequence
  Antisense compound
gccagaagctgcatgcatag

SEQ ID NO: 14511 - DNA, 20 bp, Artificial Sequence
  Antisense compound
tgccagaagctgcatgcata

SEQ ID NO: 14512 - DNA, 20 bp, Artificial Sequence
  Antisense compound
ttgccagaagctgcatgcat

SEQ ID NO: 14513 - DNA, 20 bp, Artificial Sequence
  Antisense compound
attgccagaagctgcatgca

SEQ ID NO: 14514 - DNA, 20 bp, Artificial Sequence
  Antisense compound
aattgccagaagctgcatgc

SEQ ID NO: 14515 - DNA, 20 bp, Artificial Sequence
  Antisense compound
aaattgccagaagctgcatg

SEQ ID NO: 14516 - DNA, 20 bp, Artificial Sequence
  Antisense compound
taaattgccagaagctgcat

SEQ ID NO: 14517 - DNA, 20 bp, Artificial Sequence
  Antisense compound
ataaattgccagaagctgca

SEQ ID NO: 14518 - DNA, 20 bp, Artificial Sequence
  Antisense compound
aataaattgccagaagctgc

SEQ ID NO: 14519 - DNA, 20 bp, Artificial Sequence
  Antisense compound
caataaattgccagaagctg

SEQ ID NO: 14520 - DNA, 20 bp, Artificial Sequence
  Antisense compound
gcaataaattgccagaagct

SEQ ID NO: 14521 - DNA, 20 bp, Artificial Sequence
  Antisense compound
agcaataaattgccagaagc

SEQ ID NO: 14522 - DNA, 20 bp, Artificial Sequence
  Antisense compound
tagcaataaattgccagaag

SEQ ID NO: 14523 - DNA, 20 bp, Artificial Sequence
  Antisense compound
ctagcaataaattgccagaa

SEQ ID NO: 14524 - DNA, 20 bp, Artificial Sequence
  Antisense compound
tctagcaataaattgccaga

SEQ ID NO: 14525 - DNA, 20 bp, Artificial Sequence
  Antisense compound
atctagcaataaattgccag

SEQ ID NO: 14526 - DNA, 20 bp, Artificial Sequence
  Antisense compound
tatctagcaataaattgcca

SEQ ID NO: 14527 - DNA, 20 bp, Artificial Sequence
  Antisense compound
ttatctagcaataaattgcc

SEQ ID NO: 14528 - DNA, 20 bp, Artificial Sequence
  Antisense compound
tttatctagcaataaattgc

SEQ ID NO: 14529 - DNA, 20 bp, Artificial Sequence
  Antisense compound
gtttatctagcaataaattg

SEQ ID NO: 14530 - DNA, 20 bp, Artificial Sequence
  Antisense compound
cgtttatctagcaataaatt

SEQ ID NO: 14531 - DNA, 20 bp, Artificial Sequence
  Antisense compound
gcgtttatctagcaataaat

SEQ ID NO: 14532 - DNA, 20 bp, Artificial Sequence
  Antisense compound
tgcgtttatctagcaataaa

SEQ ID NO: 14533 - DNA, 20 bp, Artificial Sequence
  Antisense compound
gtgcgtttatctagcaataa

SEQ ID NO: 14534 - DNA, 20 bp, Artificial Sequence
  Antisense compound
agtgcgtttatctagcaata

SEQ ID NO: 14535 - DNA, 20 bp, Artificial Sequence
  Antisense compound
tagtgcgtttatctagcaat

SEQ ID NO: 14536 - DNA, 20 bp, Artificial Sequence
  Antisense compound
gtagtgcgtttatctagcaa

SEQ ID NO: 14537 - DNA, 20 bp, Artificial Sequence
  Antisense compound
tgtagtgcgtttatctagca

SEQ ID NO: 14538 - DNA, 20 bp, Artificial Sequence
  Antisense compound
atgtagtgcgtttatctagc

SEQ ID NO: 14539 - DNA, 20 bp, Artificial Sequence
  Antisense compound
catgtagtgcgtttatctag

SEQ ID NO: 14540 - DNA, 20 bp, Artificial Sequence
  Antisense compound
gcatgtagtgcgtttatcta

SEQ ID NO: 14541 - DNA, 20 bp, Artificial Sequence
  Antisense compound
agcatgtagtgcgtttatct

SEQ ID NO: 14542 - DNA, 20 bp, Artificial Sequence
  Antisense compound
aagcatgtagtgcgtttatc

SEQ ID NO: 14543 - DNA, 20 bp, Artificial Sequence
  Antisense compound
aaagcatgtagtgcgtttat

SEQ ID NO: 14544 - DNA, 20 bp, Artificial Sequence
  Antisense compound
aaaagcatgtagtgcgttta

SEQ ID NO: 14545 - DNA, 20 bp, Artificial Sequence
  Antisense compound
gaaaagcatgtagtgcgttt

SEQ ID NO: 14546 - DNA, 20 bp, Artificial Sequence
  Antisense compound
tgaaaagcatgtagtgcgtt

SEQ ID NO: 14547 - DNA, 20 bp, Artificial Sequence
  Antisense compound
ctgaaaagcatgtagtgcgt

SEQ ID NO: 14548 - DNA, 20 bp, Artificial Sequence
  Antisense compound
actgaaaagcatgtagtgcg

SEQ ID NO: 14549 - DNA, 20 bp, Artificial Sequence
  Antisense compound
tactgaaaagcatgtagtgc

SEQ ID NO: 14550 - DNA, 20 bp, Artificial Sequence
  Antisense compound
ctactgaaaagcatgtagtg

SEQ ID NO: 14551 - DNA, 20 bp, Artificial Sequence
  Antisense compound
gctactgaaaagcatgtagt

SEQ ID NO: 14552 - DNA, 20 bp, Artificial Sequence
  Antisense compound
agctactgaaaagcatgtag

SEQ ID NO: 14553 - DNA, 20 bp, Artificial Sequence
  Antisense compound
cagctactgaaaagcatgta

SEQ ID NO: 14554 - DNA, 20 bp, Artificial Sequence
  Antisense compound
gcagctactgaaaagcatgt

SEQ ID NO: 14555 - DNA, 20 bp, Artificial Sequence
  Antisense compound
tgcagctactgaaaagcatg

SEQ ID NO: 14556 - DNA, 20 bp, Artificial Sequence
  Antisense compound
gtgcagctactgaaaagcat

SEQ ID NO: 14557 - DNA, 20 bp, Artificial Sequence
  Antisense compound
agtgcagctactgaaaagca

SEQ ID NO: 14558 - DNA, 20 bp, Artificial Sequence
  Antisense compound
tagtgcagctactgaaaagc

SEQ ID NO: 14559 - DNA, 20 bp, Artificial Sequence
  Antisense compound
ttagtgcagctactgaaaag

SEQ ID NO: 14560 - DNA, 20 bp, Artificial Sequence
  Antisense compound
gttagtgcagctactgaaaa

SEQ ID NO: 14561 - DNA, 20 bp, Artificial Sequence
  Antisense compound
tgttagtgcagctactgaaa

SEQ ID NO: 14562 - DNA, 20 bp, Artificial Sequence
  Antisense compound
ttgttagtgcagctactgaa

SEQ ID NO: 14563 - DNA, 20 bp, Artificial Sequence
  Antisense compound
tttgttagtgcagctactga

SEQ ID NO: 14564 - DNA, 20 bp, Artificial Sequence
  Antisense compound
gtttgttagtgcagctactg

SEQ ID NO: 14565 - DNA, 20 bp, Artificial Sequence
  Antisense compound
tgtttgttagtgcagctact

SEQ ID NO: 14566 - DNA, 20 bp, Artificial Sequence
  Antisense compound
ttgtttgttagtgcagctac

SEQ ID NO: 14567 - DNA, 20 bp, Artificial Sequence
  Antisense compound
attgtttgttagtgcagcta

SEQ ID NO: 14568 - DNA, 20 bp, Artificial Sequence
  Antisense compound
cattgtttgttagtgcagct

SEQ ID NO: 14569 - DNA, 20 bp, Artificial Sequence
  Antisense compound
acattgtttgttagtgcagc

SEQ ID NO: 14570 - DNA, 20 bp, Artificial Sequence
  Antisense compound
aacattgtttgttagtgcag

SEQ ID NO: 14571 - DNA, 20 bp, Artificial Sequence
  Antisense compound
caacattgtttgttagtgca

SEQ ID NO: 14572 - DNA, 20 bp, Artificial Sequence
  Antisense compound
gcaacattgtttgttagtgc

SEQ ID NO: 14573 - DNA, 20 bp, Artificial Sequence
  Antisense compound
agcaacattgtttgttagtg

SEQ ID NO: 14574 - DNA, 20 bp, Artificial Sequence
  Antisense compound
aagcaacattgtttgttagt

SEQ ID NO: 14575 - DNA, 20 bp, Artificial Sequence
  Antisense compound
aaagcaacattgtttgttag

SEQ ID NO: 14576 - DNA, 20 bp, Artificial Sequence
  Antisense compound
aaaagcaacattgtttgtta

SEQ ID NO: 14577 - DNA, 20 bp, Artificial Sequence
  Antisense compound
gaaaagcaacattgtttgtt

SEQ ID NO: 14578 - DNA, 20 bp, Artificial Sequence
  Antisense compound
tgaaaagcaacattgtttgt

SEQ ID NO: 14579 - DNA, 20 bp, Artificial Sequence
  Antisense compound
ttgaaaagcaacattgtttg

SEQ ID NO: 14580 - DNA, 20 bp, Artificial Sequence
  Antisense compound
tttgaaaagcaacattgttt

SEQ ID NO: 14581 - DNA, 20 bp, Artificial Sequence
  Antisense compound
gtttgaaaagcaacattgtt

SEQ ID NO: 14582 - DNA, 20 bp, Artificial Sequence
  Antisense compound
agtttgaaaagcaacattgt

SEQ ID NO: 14583 - DNA, 20 bp, Artificial Sequence
  Antisense compound
cagtttgaaaagcaacattg

SEQ ID NO: 14584 - DNA, 20 bp, Artificial Sequence
  Antisense compound
acagtttgaaaagcaacatt

SEQ ID NO: 14585 - DNA, 20 bp, Artificial Sequence
  Antisense compound
gacagtttgaaaagcaacat

SEQ ID NO: 14586 - DNA, 20 bp, Artificial Sequence
  Antisense compound
tgacagtttgaaaagcaaca

SEQ ID NO: 14587 - DNA, 20 bp, Artificial Sequence
  Antisense compound
ttgacagtttgaaaagcaac

SEQ ID NO: 14588 - DNA, 20 bp, Artificial Sequence
  Antisense compound
tttgacagtttgaaaagcaa

SEQ ID NO: 14589 - DNA, 20 bp, Artificial Sequence
  Antisense compound
gtttgacagtttgaaaagca

SEQ ID NO: 14590 - DNA, 20 bp, Artificial Sequence
  Antisense compound
ggtttgacagtttgaaaagc

SEQ ID NO: 14591 - DNA, 20 bp, Artificial Sequence
  Antisense compound
gggtttgacagtttgaaaag

SEQ ID NO: 14592 - DNA, 20 bp, Artificial Sequence
  Antisense compound
cgggtttgacagtttgaaaa

SEQ ID NO: 14593 - DNA, 20 bp, Artificial Sequence
  Antisense compound
ccgggtttgacagtttgaaa

SEQ ID NO: 14594 - DNA, 20 bp, Artificial Sequence
  Antisense compound
accgggtttgacagtttgaa

SEQ ID NO: 14595 - DNA, 20 bp, Artificial Sequence
  Antisense compound
taccgggtttgacagtttga

SEQ ID NO: 14596 - DNA, 20 bp, Artificial Sequence
  Antisense compound
ttaccgggtttgacagtttg

SEQ ID NO: 14597 - DNA, 20 bp, Artificial Sequence
  Antisense compound
attaccgggtttgacagttt

SEQ ID NO: 14598 - DNA, 20 bp, Artificial Sequence
  Antisense compound
aattaccgggtttgacagtt

SEQ ID NO: 14599 - DNA, 20 bp, Artificial Sequence
  Antisense compound
aaattaccgggtttgacagt

SEQ ID NO: 14600 - DNA, 20 bp, Artificial Sequence
  Antisense compound
aaaattaccgggtttgacag

SEQ ID NO: 14601 - DNA, 20 bp, Artificial Sequence
  Antisense compound
taaaattaccgggtttgaca

SEQ ID NO: 14602 - DNA, 20 bp, Artificial Sequence
  Antisense compound
ttaaaattaccgggtttgac

SEQ ID NO: 14603 - DNA, 20 bp, Artificial Sequence
  Antisense compound
attaaaattaccgggtttga

SEQ ID NO: 14604 - DNA, 20 bp, Artificial Sequence
  Antisense compound
tattaaaattaccgggtttg

SEQ ID NO: 14605 - DNA, 20 bp, Artificial Sequence
  Antisense compound
ttattaaaattaccgggttt

SEQ ID NO: 14606 - DNA, 20 bp, Artificial Sequence
  Antisense compound
tttattaaaattaccgggtt

SEQ ID NO: 14607 - DNA, 20 bp, Artificial Sequence
  Antisense compound
ctttattaaaattaccgggt

SEQ ID NO: 14608 - DNA, 20 bp, Artificial Sequence
  Antisense compound
tctttattaaaattaccggg

SEQ ID NO: 14609 - DNA, 20 bp, Artificial Sequence
  Antisense compound
gtctttattaaaattaccgg

SEQ ID NO: 14610 - DNA, 20 bp, Artificial Sequence
  Antisense compound
agtctttattaaaattaccg

SEQ ID NO: 14611 - DNA, 20 bp, Artificial Sequence
  Antisense compound
aagtctttattaaaattacc

SEQ ID NO: 14612 - DNA, 20 bp, Artificial Sequence
  Antisense compound
aaagtctttattaaaattac

SEQ ID NO: 14613 - DNA, 20 bp, Artificial Sequence
  Antisense compound
aaaagtctttattaaaatta

SEQ ID NO: 14614 - DNA, 20 bp, Artificial Sequence
  Antisense compound
taaaagtctttattaaaatt

SEQ ID NO: 14615 - DNA, 20 bp, Artificial Sequence
  Antisense compound
ataaaagtctttattaaaat

SEQ ID NO: 14616 - DNA, 20 bp, Artificial Sequence
  Antisense compound
cataaaagtctttattaaaa

SEQ ID NO: 14617 - DNA, 20 bp, Artificial Sequence
  Antisense compound
tcataaaagtctttattaaa

SEQ ID NO: 14618 - DNA, 20 bp, Artificial Sequence
  Antisense compound
gtcataaaagtctttattaa

SEQ ID NO: 14619 - DNA, 20 bp, Artificial Sequence
  Antisense compound
agtcataaaagtctttatta

SEQ ID NO: 14620 - DNA, 20 bp, Artificial Sequence
  Antisense compound
aagtcataaaagtctttatt

SEQ ID NO: 14621 - DNA, 20 bp, Artificial Sequence
  Antisense compound
aaagtcataaaagtctttat

SEQ ID NO: 14622 - DNA, 20 bp, Artificial Sequence
  Antisense compound
caaagtcataaaagtcttta

SEQ ID NO: 14623 - DNA, 20 bp, Artificial Sequence
  Antisense compound
gcaaagtcataaaagtcttt

SEQ ID NO: 14624 - DNA, 20 bp, Artificial Sequence
  Antisense compound
agcaaagtcataaaagtctt

SEQ ID NO: 14625 - DNA, 20 bp, Artificial Sequence
  Antisense compound
cagcaaagtcataaaagtct

SEQ ID NO: 14626 - DNA, 20 bp, Artificial Sequence
  Antisense compound
acagcaaagtcataaaagtc

SEQ ID NO: 14627 - DNA, 20 bp, Artificial Sequence
  Antisense compound
cacagcaaagtcataaaagt

SEQ ID NO: 14628 - DNA, 20 bp, Artificial Sequence
  Antisense compound
acacagcaaagtcataaaag

SEQ ID NO: 14629 - DNA, 20 bp, Artificial Sequence
  Antisense compound
gacacagcaaagtcataaaa

SEQ ID NO: 14630 - DNA, 20 bp, Artificial Sequence
  Antisense compound
agacacagcaaagtcataaa

SEQ ID NO: 14631 - DNA, 20 bp, Artificial Sequence
  Antisense compound
tagacacagcaaagtcataa

SEQ ID NO: 14632 - DNA, 20 bp, Artificial Sequence
  Antisense compound
ttagacacagcaaagtcata

SEQ ID NO: 14633 - DNA, 20 bp, Artificial Sequence
  Antisense compound
tttagacacagcaaagtcat

SEQ ID NO: 14634 - DNA, 20 bp, Artificial Sequence
  Antisense compound
ctttagacacagcaaagtca

SEQ ID NO: 14635 - DNA, 20 bp, Artificial Sequence
  Antisense compound
cctttagacacagcaaagtc

SEQ ID NO: 14636 - DNA, 20 bp, Artificial Sequence
  Antisense compound
acctttagacacagcaaagt

SEQ ID NO: 14637 - DNA, 20 bp, Artificial Sequence
  Antisense compound
aacctttagacacagcaaag

SEQ ID NO: 14638 - DNA, 20 bp, Artificial Sequence
  Antisense compound
aaacctttagacacagcaaa

SEQ ID NO: 14639 - DNA, 20 bp, Artificial Sequence
  Antisense compound
gaaacctttagacacagcaa

SEQ ID NO: 14640 - DNA, 20 bp, Artificial Sequence
  Antisense compound
agaaacctttagacacagca

SEQ ID NO: 14641 - DNA, 20 bp, Artificial Sequence
  Antisense compound
aagaaacctttagacacagc

SEQ ID NO: 14642 - DNA, 20 bp, Artificial Sequence
  Antisense compound
aaagaaacctttagacacag

SEQ ID NO: 14643 - DNA, 20 bp, Artificial Sequence
  Antisense compound
taaagaaacctttagacaca

SEQ ID NO: 14644 - DNA, 20 bp, Artificial Sequence
  Antisense compound
ttaaagaaacctttagacac

SEQ ID NO: 14645 - DNA, 20 bp, Artificial Sequence
  Antisense compound
cttaaagaaacctttagaca

SEQ ID NO: 14646 - DNA, 20 bp, Artificial Sequence
  Antisense compound
ccttaaagaaacctttagac

SEQ ID NO: 14647 - DNA, 20 bp, Artificial Sequence
  Antisense compound
tccttaaagaaacctttaga

SEQ ID NO: 14648 - DNA, 20 bp, Artificial Sequence
  Antisense compound
ttccttaaagaaacctttag

SEQ ID NO: 14649 - DNA, 20 bp, Artificial Sequence
  Antisense compound
cttccttaaagaaaccttta

SEQ ID NO: 14650 - DNA, 20 bp, Artificial Sequence
  Antisense compound
ccttccttaaagaaaccttt

SEQ ID NO: 14651 - DNA, 20 bp, Artificial Sequence
  Antisense compound
tccttccttaaagaaacctt

SEQ ID NO: 14652 - DNA, 20 bp, Artificial Sequence
  Antisense compound
ttccttccttaaagaaacct

SEQ ID NO: 14653 - DNA, 20 bp, Artificial Sequence
  Antisense compound
cttccttccttaaagaaacc

SEQ ID NO: 14654 - DNA, 20 bp, Artificial Sequence
  Antisense compound
acttccttccttaaagaaac

SEQ ID NO: 14655 - DNA, 20 bp, Artificial Sequence
  Antisense compound
aacttccttccttaaagaaa

SEQ ID NO: 14656 - DNA, 20 bp, Artificial Sequence
  Antisense compound
gaacttccttccttaaagaa

SEQ ID NO: 14657 - DNA, 20 bp, Artificial Sequence
  Antisense compound
agaacttccttccttaaaga

SEQ ID NO: 14658 - DNA, 20 bp, Artificial Sequence
  Antisense compound
cagaacttccttccttaaag

SEQ ID NO: 14659 - DNA, 20 bp, Artificial Sequence
  Antisense compound
acagaacttccttccttaaa

SEQ ID NO: 14660 - DNA, 20 bp, Artificial Sequence
  Antisense compound
aacagaacttccttccttaa

SEQ ID NO: 14661 - DNA, 20 bp, Artificial Sequence
  Antisense compound
caacagaacttccttcctta

SEQ ID NO: 14662 - DNA, 20 bp, Artificial Sequence
  Antisense compound
tcaacagaacttccttcctt

SEQ ID NO: 14663 - DNA, 20 bp, Artificial Sequence
  Antisense compound
ttcaacagaacttccttcct

SEQ ID NO: 14664 - DNA, 20 bp, Artificial Sequence
  Antisense compound
gttcaacagaacttccttcc

SEQ ID NO: 14665 - DNA, 20 bp, Artificial Sequence
  Antisense compound
agttcaacagaacttccttc

SEQ ID NO: 14666 - DNA, 20 bp, Artificial Sequence
  Antisense compound
tagttcaacagaacttcctt

SEQ ID NO: 14667 - DNA, 20 bp, Artificial Sequence
  Antisense compound
ttagttcaacagaacttcct

SEQ ID NO: 14668 - DNA, 20 bp, Artificial Sequence
  Antisense compound
tttagttcaacagaacttcc

SEQ ID NO: 14669 - DNA, 20 bp, Artificial Sequence
  Antisense compound
ttttagttcaacagaacttc

SEQ ID NO: 14670 - DNA, 20 bp, Artificial Sequence
  Antisense compound
gttttagttcaacagaactt

SEQ ID NO: 14671 - DNA, 20 bp, Artificial Sequence
  Antisense compound
tgttttagttcaacagaact

SEQ ID NO: 14672 - DNA, 20 bp, Artificial Sequence
  Antisense compound
gtgttttagttcaacagaac

SEQ ID NO: 14673 - DNA, 20 bp, Artificial Sequence
  Antisense compound
agtgttttagttcaacagaa

SEQ ID NO: 14674 - DNA, 20 bp, Artificial Sequence
  Antisense compound
aagtgttttagttcaacaga

SEQ ID NO: 14675 - DNA, 20 bp, Artificial Sequence
  Antisense compound
gaagtgttttagttcaacag

SEQ ID NO: 14676 - DNA, 20 bp, Artificial Sequence
  Antisense compound
agaagtgttttagttcaaca

SEQ ID NO: 14677 - DNA, 20 bp, Artificial Sequence
  Antisense compound
aagaagtgttttagttcaac

SEQ ID NO: 14678 - DNA, 20 bp, Artificial Sequence
  Antisense compound
gaagaagtgttttagttcaa

SEQ ID NO: 14679 - DNA, 20 bp, Artificial Sequence
  Antisense compound
agaagaagtgttttagttca

SEQ ID NO: 14680 - DNA, 20 bp, Artificial Sequence
  Antisense compound
aagaagaagtgttttagttc

SEQ ID NO: 14681 - DNA, 20 bp, Artificial Sequence
  Antisense compound
aaagaagaagtgttttagtt

SEQ ID NO: 14682 - DNA, 20 bp, Artificial Sequence
  Antisense compound
caaagaagaagtgttttagt

SEQ ID NO: 14683 - DNA, 20 bp, Artificial Sequence
  Antisense compound
gcaaagaagaagtgttttag

SEQ ID NO: 14684 - DNA, 20 bp, Artificial Sequence
  Antisense compound
agcaaagaagaagtgtttta

SEQ ID NO: 14685 - DNA, 20 bp, Artificial Sequence
  Antisense compound
gagcaaagaagaagtgtttt

SEQ ID NO: 14686 - DNA, 20 bp, Artificial Sequence
  Antisense compound
tgagcaaagaagaagtgttt

SEQ ID NO: 14687 - DNA, 20 bp, Artificial Sequence
  Antisense compound
ctgagcaaagaagaagtgtt

SEQ ID NO: 14688 - DNA, 20 bp, Artificial Sequence
  Antisense compound
cctgagcaaagaagaagtgt

SEQ ID NO: 14689 - DNA, 20 bp, Artificial Sequence
  Antisense compound
tcctgagcaaagaagaagtg

SEQ ID NO: 14690 - DNA, 20 bp, Artificial Sequence
  Antisense compound
atcctgagcaaagaagaagt

SEQ ID NO: 14691 - DNA, 20 bp, Artificial Sequence
  Antisense compound
catcctgagcaaagaagaag

SEQ ID NO: 14692 - DNA, 20 bp, Artificial Sequence
  Antisense compound
ccatcctgagcaaagaagaa

SEQ ID NO: 14693 - DNA, 20 bp, Artificial Sequence
  Antisense compound
gccatcctgagcaaagaaga

SEQ ID NO: 14694 - DNA, 20 bp, Artificial Sequence
  Antisense compound
tgccatcctgagcaaagaag

SEQ ID NO: 14695 - DNA, 20 bp, Artificial Sequence
  Antisense compound
ttgccatcctgagcaaagaa

SEQ ID NO: 14696 - DNA, 20 bp, Artificial Sequence
  Antisense compound
gttgccatcctgagcaaaga

SEQ ID NO: 14697 - DNA, 20 bp, Artificial Sequence
  Antisense compound
cgttgccatcctgagcaaag

SEQ ID NO: 14698 - DNA, 20 bp, Artificial Sequence
  Antisense compound
gcgttgccatcctgagcaaa

SEQ ID NO: 14699 - DNA, 20 bp, Artificial Sequence
  Antisense compound
agcgttgccatcctgagcaa

SEQ ID NO: 14700 - DNA, 20 bp, Artificial Sequence
  Antisense compound
cagcgttgccatcctgagca

SEQ ID NO: 14701 - DNA, 20 bp, Artificial Sequence
  Antisense compound
gcagcgttgccatcctgagc

SEQ ID NO: 14702 - DNA, 20 bp, Artificial Sequence
  Antisense compound
agcagcgttgccatcctgag

SEQ ID NO: 14703 - DNA, 20 bp, Artificial Sequence
  Antisense compound
tagcagcgttgccatcctga

SEQ ID NO: 14704 - DNA, 20 bp, Artificial Sequence
  Antisense compound
atagcagcgttgccatcctg

SEQ ID NO: 14705 - DNA, 20 bp, Artificial Sequence
  Antisense compound
gatagcagcgttgccatcct

SEQ ID NO: 14706 - DNA, 20 bp, Artificial Sequence
  Antisense compound
tgatagcagcgttgccatcc

SEQ ID NO: 14707 - DNA, 20 bp, Artificial Sequence
  Antisense compound
ctgatagcagcgttgccatc

SEQ ID NO: 14708 - DNA, 20 bp, Artificial Sequence
  Antisense compound
actgatagcagcgttgccat

SEQ ID NO: 14709 - DNA, 20 bp, Artificial Sequence
  Antisense compound
cactgatagcagcgttgcca

SEQ ID NO: 14710 - DNA, 20 bp, Artificial Sequence
  Antisense compound
tcactgatagcagcgttgcc

SEQ ID NO: 14711 - DNA, 20 bp, Artificial Sequence
  Antisense compound
atcactgatagcagcgttgc

SEQ ID NO: 14712 - DNA, 20 bp, Artificial Sequence
  Antisense compound
aatcactgatagcagcgttg

SEQ ID NO: 14713 - DNA, 20 bp, Artificial Sequence
  Antisense compound
taatcactgatagcagcgtt

SEQ ID NO: 14714 - DNA, 20 bp, Artificial Sequence
  Antisense compound
ataatcactgatagcagcgt

SEQ ID NO: 14715 - DNA, 20 bp, Artificial Sequence
  Antisense compound
cataatcactgatagcagcg

SEQ ID NO: 14716 - DNA, 20 bp, Artificial Sequence
  Antisense compound
tcataatcactgatagcagc

SEQ ID NO: 14717 - DNA, 20 bp, Artificial Sequence
  Antisense compound
gtcataatcactgatagcag

SEQ ID NO: 14718 - DNA, 20 bp, Artificial Sequence
  Antisense compound
agtcataatcactgatagca

SEQ ID NO: 14719 - DNA, 20 bp, Artificial Sequence
  Antisense compound
tagtcataatcactgatagc

SEQ ID NO: 14720 - DNA, 20 bp, Artificial Sequence
  Antisense compound
atagtcataatcactgatag

SEQ ID NO: 14721 - DNA, 20 bp, Artificial Sequence
  Antisense compound
aatagtcataatcactgata

SEQ ID NO: 14722 - DNA, 20 bp, Artificial Sequence
  Antisense compound
taatagtcataatcactgat

SEQ ID NO: 14723 - DNA, 20 bp, Artificial Sequence
  Antisense compound
ataatagtcataatcactga

SEQ ID NO: 14724 - DNA, 20 bp, Artificial Sequence
  Antisense compound
gataatagtcataatcactg

SEQ ID NO: 14725 - DNA, 20 bp, Artificial Sequence
  Antisense compound
cgataatagtcataatcact

SEQ ID NO: 14726 - DNA, 20 bp, Artificial Sequence
  Antisense compound
acgataatagtcataatcac

SEQ ID NO: 14727 - DNA, 20 bp, Artificial Sequence
  Antisense compound
aacgataatagtcataatca

SEQ ID NO: 14728 - DNA, 20 bp, Artificial Sequence
  Antisense compound
taacgataatagtcataatc

SEQ ID NO: 14729 - DNA, 20 bp, Artificial Sequence
  Antisense compound
ataacgataatagtcataat

SEQ ID NO: 14730 - DNA, 20 bp, Artificial Sequence
  Antisense compound
tataacgataatagtcataa

SEQ ID NO: 14731 - DNA, 20 bp, Artificial Sequence
  Antisense compound
ttataacgataatagtcata

SEQ ID NO: 14732 - DNA, 20 bp, Artificial Sequence
  Antisense compound
attataacgataatagtcat

SEQ ID NO: 14733 - DNA, 20 bp, Artificial Sequence
  Antisense compound
gattataacgataatagtca

SEQ ID NO: 14734 - DNA, 20 bp, Artificial Sequence
  Antisense compound
agattataacgataatagtc

SEQ ID NO: 14735 - DNA, 20 bp, Artificial Sequence
  Antisense compound
cagattataacgataatagt

SEQ ID NO: 14736 - DNA, 20 bp, Artificial Sequence
  Antisense compound
gcagattataacgataatag

SEQ ID NO: 14737 - DNA, 20 bp, Artificial Sequence
  Antisense compound
ggcagattataacgataata

SEQ ID NO: 14738 - DNA, 20 bp, Artificial Sequence
  Antisense compound
tggcagattataacgataat

SEQ ID NO: 14739 - DNA, 20 bp, Artificial Sequence
  Antisense compound
ttggcagattataacgataa

SEQ ID NO: 14740 - DNA, 20 bp, Artificial Sequence
  Antisense compound
gttggcagattataacgata

SEQ ID NO: 14741 - DNA, 20 bp, Artificial Sequence
  Antisense compound
tgttggcagattataacgat

SEQ ID NO: 14742 - DNA, 20 bp, Artificial Sequence
  Antisense compound
ttgttggcagattataacga

SEQ ID NO: 14743 - DNA, 20 bp, Artificial Sequence
  Antisense compound
attgttggcagattataacg

SEQ ID NO: 14744 - DNA, 20 bp, Artificial Sequence
  Antisense compound
cattgttggcagattataac

SEQ ID NO: 14745 - DNA, 20 bp, Artificial Sequence
  Antisense compound
acattgttggcagattataa

SEQ ID NO: 14746 - DNA, 20 bp, Artificial Sequence
  Antisense compound
cacattgttggcagattata

SEQ ID NO: 14747 - DNA, 20 bp, Artificial Sequence
  Antisense compound
acacattgttggcagattat

SEQ ID NO: 14748 - DNA, 20 bp, Artificial Sequence
  Antisense compound
cacacattgttggcagatta

SEQ ID NO: 14749 - DNA, 20 bp, Artificial Sequence
  Antisense compound
tcacacattgttggcagatt

SEQ ID NO: 14750 - DNA, 20 bp, Artificial Sequence
  Antisense compound
atcacacattgttggcagat

SEQ ID NO: 14751 - DNA, 20 bp, Artificial Sequence
  Antisense compound
tatcacacattgttggcaga

SEQ ID NO: 14752 - DNA, 20 bp, Artificial Sequence
  Antisense compound
atatcacacattgttggcag

SEQ ID NO: 14753 - DNA, 20 bp, Artificial Sequence
  Antisense compound
gatatcacacattgttggca

SEQ ID NO: 14754 - DNA, 20 bp, Artificial Sequence
  Antisense compound
tgatatcacacattgttggc

SEQ ID NO: 14755 - DNA, 20 bp, Artificial Sequence
  Antisense compound
ctgatatcacacattgttgg

SEQ ID NO: 14756 - DNA, 20 bp, Artificial Sequence
  Antisense compound
tctgatatcacacattgttg

SEQ ID NO: 14757 - DNA, 20 bp, Artificial Sequence
  Antisense compound
gtctgatatcacacattgtt

SEQ ID NO: 14758 - DNA, 20 bp, Artificial Sequence
  Antisense compound
tgtctgatatcacacattgt

SEQ ID NO: 14759 - DNA, 20 bp, Artificial Sequence
  Antisense compound
ttgtctgatatcacacattg

SEQ ID NO: 14760 - DNA, 20 bp, Artificial Sequence
  Antisense compound
gttgtctgatatcacacatt

SEQ ID NO: 14761 - DNA, 20 bp, Artificial Sequence
  Antisense compound
agttgtctgatatcacacat

SEQ ID NO: 14762 - DNA, 20 bp, Artificial Sequence
  Antisense compound
gagttgtctgatatcacaca

SEQ ID NO: 14763 - DNA, 20 bp, Artificial Sequence
  Antisense compound
ggagttgtctgatatcacac

SEQ ID NO: 14764 - DNA, 20 bp, Artificial Sequence
  Antisense compound
aggagttgtctgatatcaca

SEQ ID NO: 14765 - DNA, 20 bp, Artificial Sequence
  Antisense compound
taggagttgtctgatatcac

SEQ ID NO: 14766 - DNA, 20 bp, Artificial Sequence
  Antisense compound
ataggagttgtctgatatca

SEQ ID NO: 14767 - DNA, 20 bp, Artificial Sequence
  Antisense compound
aataggagttgtctgatatc

SEQ ID NO: 14768 - DNA, 20 bp, Artificial Sequence
  Antisense compound
gaataggagttgtctgatat

SEQ ID NO: 14769 - DNA, 20 bp, Artificial Sequence
  Antisense compound
cgaataggagttgtctgata

SEQ ID NO: 14770 - DNA, 20 bp, Artificial Sequence
  Antisense compound
acgaataggagttgtctgat

SEQ ID NO: 14771 - DNA, 20 bp, Artificial Sequence
  Antisense compound
tacgaataggagttgtctga

SEQ ID NO: 14772 - DNA, 20 bp, Artificial Sequence
  Antisense compound
ctacgaataggagttgtctg

SEQ ID NO: 14773 - DNA, 20 bp, Artificial Sequence
  Antisense compound
actacgaataggagttgtct

SEQ ID NO: 14774 - DNA, 20 bp, Artificial Sequence
  Antisense compound
aactacgaataggagttgtc

SEQ ID NO: 14775 - DNA, 20 bp, Artificial Sequence
  Antisense compound
caactacgaataggagttgt

SEQ ID NO: 14776 - DNA, 20 bp, Artificial Sequence
  Antisense compound
tcaactacgaataggagttg

SEQ ID NO: 14777 - DNA, 20 bp, Artificial Sequence
  Antisense compound
ttcaactacgaataggagtt

SEQ ID NO: 14778 - DNA, 20 bp, Artificial Sequence
  Antisense compound
cttcaactacgaataggagt

SEQ ID NO: 14779 - DNA, 20 bp, Artificial Sequence
  Antisense compound
acttcaactacgaataggag

SEQ ID NO: 14780 - DNA, 20 bp, Artificial Sequence
  Antisense compound
aacttcaactacgaatagga

SEQ ID NO: 14781 - DNA, 20 bp, Artificial Sequence
  Antisense compound
caacttcaactacgaatagg

SEQ ID NO: 14782 - DNA, 20 bp, Artificial Sequence
  Antisense compound
acaacttcaactacgaatag

SEQ ID NO: 14783 - DNA, 20 bp, Artificial Sequence
  Antisense compound
aacaacttcaactacgaata

SEQ ID NO: 14784 - DNA, 20 bp, Artificial Sequence
  Antisense compound
caacaacttcaactacgaat

SEQ ID NO: 14785 - DNA, 20 bp, Artificial Sequence
  Antisense compound
tcaacaacttcaactacgaa

SEQ ID NO: 14786 - DNA, 20 bp, Artificial Sequence
  Antisense compound
atcaacaacttcaactacga

SEQ ID NO: 14787 - DNA, 20 bp, Artificial Sequence
  Antisense compound
tatcaacaacttcaactacg

SEQ ID NO: 14788 - DNA, 20 bp, Artificial Sequence
  Antisense compound
ttatcaacaacttcaactac

SEQ ID NO: 14789 - DNA, 20 bp, Artificial Sequence
  Antisense compound
tttatcaacaacttcaacta

SEQ ID NO: 14790 - DNA, 20 bp, Artificial Sequence
  Antisense compound
atttatcaacaacttcaact

SEQ ID NO: 14791 - DNA, 20 bp, Artificial Sequence
  Antisense compound
tatttatcaacaacttcaac

SEQ ID NO: 14792 - DNA, 20 bp, Artificial Sequence
  Antisense compound
gtatttatcaacaacttcaa

SEQ ID NO: 14793 - DNA, 20 bp, Artificial Sequence
  Antisense compound
agtatttatcaacaacttca

SEQ ID NO: 14794 - DNA, 20 bp, Artificial Sequence
  Antisense compound
aagtatttatcaacaacttc

SEQ ID NO: 14795 - DNA, 20 bp, Artificial Sequence
  Antisense compound
aaagtatttatcaacaactt

SEQ ID NO: 14796 - DNA, 20 bp, Artificial Sequence
  Antisense compound
caaagtatttatcaacaact

SEQ ID NO: 14797 - DNA, 20 bp, Artificial Sequence
  Antisense compound
tcaaagtatttatcaacaac

SEQ ID NO: 14798 - DNA, 20 bp, Artificial Sequence
  Antisense compound
atcaaagtatttatcaacaa

SEQ ID NO: 14799 - DNA, 20 bp, Artificial Sequence
  Antisense compound
aatcaaagtatttatcaaca

SEQ ID NO: 14800 - DNA, 20 bp, Artificial Sequence
  Antisense compound
caatcaaagtatttatcaac

SEQ ID NO: 14801 - DNA, 20 bp, Artificial Sequence
  Antisense compound
acaatcaaagtatttatcaa

SEQ ID NO: 14802 - DNA, 20 bp, Artificial Sequence
  Antisense compound
aacaatcaaagtatttatca

SEQ ID NO: 14803 - DNA, 20 bp, Artificial Sequence
  Antisense compound
taacaatcaaagtatttatc

SEQ ID NO: 14804 - DNA, 20 bp, Artificial Sequence
  Antisense compound
gtaacaatcaaagtatttat

SEQ ID NO: 14805 - DNA, 20 bp, Artificial Sequence
  Antisense compound
cgtaacaatcaaagtattta

SEQ ID NO: 14806 - DNA, 20 bp, Artificial Sequence
  Antisense compound
tcgtaacaatcaaagtattt

SEQ ID NO: 14807 - DNA, 20 bp, Artificial Sequence
  Antisense compound
atcgtaacaatcaaagtatt

SEQ ID NO: 14808 - DNA, 20 bp, Artificial Sequence
  Antisense compound
catcgtaacaatcaaagtat

SEQ ID NO: 14809 - DNA, 20 bp, Artificial Sequence
  Antisense compound
ccatcgtaacaatcaaagta

SEQ ID NO: 14810 - DNA, 20 bp, Artificial Sequence
  Antisense compound
accatcgtaacaatcaaagt

SEQ ID NO: 14811 - DNA, 20 bp, Artificial Sequence
  Antisense compound
caccatcgtaacaatcaaag

SEQ ID NO: 14812 - DNA, 20 bp, Artificial Sequence
  Antisense compound
ccaccatcgtaacaatcaaa

SEQ ID NO: 14813 - DNA, 20 bp, Artificial Sequence
  Antisense compound
gccaccatcgtaacaatcaa

SEQ ID NO: 14814 - DNA, 20 bp, Artificial Sequence
  Antisense compound
agccaccatcgtaacaatca

SEQ ID NO: 14815 - DNA, 20 bp, Artificial Sequence
  Antisense compound
cagccaccatcgtaacaatc

SEQ ID NO: 14816 - DNA, 20 bp, Artificial Sequence
  Antisense compound
acagccaccatcgtaacaat

SEQ ID NO: 14817 - DNA, 20 bp, Artificial Sequence
  Antisense compound
tacagccaccatcgtaacaa

SEQ ID NO: 14818 - DNA, 20 bp, Artificial Sequence
  Antisense compound
atacagccaccatcgtaaca

SEQ ID NO: 14819 - DNA, 20 bp, Artificial Sequence
  Antisense compound
aatacagccaccatcgtaac

SEQ ID NO: 14820 - DNA, 20 bp, Artificial Sequence
  Antisense compound
taatacagccaccatcgtaa

SEQ ID NO: 14821 - DNA, 20 bp, Artificial Sequence
  Antisense compound
ttaatacagccaccatcgta

SEQ ID NO: 14822 - DNA, 20 bp, Artificial Sequence
  Antisense compound
attaatacagccaccatcgt

SEQ ID NO: 14823 - DNA, 20 bp, Artificial Sequence
  Antisense compound
cattaatacagccaccatcg

SEQ ID NO: 14824 - DNA, 20 bp, Artificial Sequence
  Antisense compound
gcattaatacagccaccatc

SEQ ID NO: 14825 - DNA, 20 bp, Artificial Sequence
  Antisense compound
ggcattaatacagccaccat

SEQ ID NO: 14826 - DNA, 20 bp, Artificial Sequence
  Antisense compound
tggcattaatacagccacca

SEQ ID NO: 14827 - DNA, 20 bp, Artificial Sequence
  Antisense compound
ttggcattaatacagccacc

SEQ ID NO: 14828 - DNA, 20 bp, Artificial Sequence
  Antisense compound
gttggcattaatacagccac

SEQ ID NO: 14829 - DNA, 20 bp, Artificial Sequence
  Antisense compound
ggttggcattaatacagcca

SEQ ID NO: 14830 - DNA, 20 bp, Artificial Sequence
  Antisense compound
tggttggcattaatacagcc

SEQ ID NO: 14831 - DNA, 20 bp, Artificial Sequence
  Antisense compound
ttggttggcattaatacagc

SEQ ID NO: 14832 - DNA, 20 bp, Artificial Sequence
  Antisense compound
cttggttggcattaatacag

SEQ ID NO: 14833 - DNA, 20 bp, Artificial Sequence
  Antisense compound
acttggttggcattaataca

SEQ ID NO: 14834 - DNA, 20 bp, Artificial Sequence
  Antisense compound
tacttggttggcattaatac

SEQ ID NO: 14835 - DNA, 20 bp, Artificial Sequence
  Antisense compound
ttacttggttggcattaata

SEQ ID NO: 14836 - DNA, 20 bp, Artificial Sequence
  Antisense compound
attacttggttggcattaat

SEQ ID NO: 14837 - DNA, 20 bp, Artificial Sequence
  Antisense compound
gattacttggttggcattaa

SEQ ID NO: 14838 - DNA, 20 bp, Artificial Sequence
  Antisense compound
cgattacttggttggcatta

SEQ ID NO: 14839 - DNA, 20 bp, Artificial Sequence
  Antisense compound
acgattacttggttggcatt

SEQ ID NO: 14840 - DNA, 20 bp, Artificial Sequence
  Antisense compound
aacgattacttggttggcat

SEQ ID NO: 14841 - DNA, 20 bp, Artificial Sequence
  Antisense compound
taacgattacttggttggca

SEQ ID NO: 14842 - DNA, 20 bp, Artificial Sequence
  Antisense compound
ttaacgattacttggttggc

SEQ ID NO: 14843 - DNA, 20 bp, Artificial Sequence
  Antisense compound
gttaacgattacttggttgg

SEQ ID NO: 14844 - DNA, 20 bp, Artificial Sequence
  Antisense compound
tgttaacgattacttggttg

SEQ ID NO: 14845 - DNA, 20 bp, Artificial Sequence
  Antisense compound
ttgttaacgattacttggtt

SEQ ID NO: 14846 - DNA, 20 bp, Artificial Sequence
  Antisense compound
attgttaacgattacttggt

SEQ ID NO: 14847 - DNA, 20 bp, Artificial Sequence
  Antisense compound
gattgttaacgattacttgg

SEQ ID NO: 14848 - DNA, 20 bp, Artificial Sequence
  Antisense compound
agattgttaacgattacttg

SEQ ID NO: 14849 - DNA, 20 bp, Artificial Sequence
  Antisense compound
cagattgttaacgattactt

SEQ ID NO: 14850 - DNA, 20 bp, Artificial Sequence
  Antisense compound
ccagattgttaacgattact

SEQ ID NO: 14851 - DNA, 20 bp, Artificial Sequence
  Antisense compound
tccagattgttaacgattac

SEQ ID NO: 14852 - DNA, 20 bp, Artificial Sequence
  Antisense compound
atccagattgttaacgatta

SEQ ID NO: 14853 - DNA, 20 bp, Artificial Sequence
  Antisense compound
tatccagattgttaacgatt

SEQ ID NO: 14854 - DNA, 20 bp, Artificial Sequence
  Antisense compound
ttatccagattgttaacgat

SEQ ID NO: 14855 - DNA, 20 bp, Artificial Sequence
  Antisense compound
tttatccagattgttaacga

SEQ ID NO: 14856 - DNA, 20 bp, Artificial Sequence
  Antisense compound
atttatccagattgttaacg

SEQ ID NO: 14857 - DNA, 20 bp, Artificial Sequence
  Antisense compound
gatttatccagattgttaac

SEQ ID NO: 14858 - DNA, 20 bp, Artificial Sequence
  Antisense compound
tgatttatccagattgttaa

SEQ ID NO: 14859 - DNA, 20 bp, Artificial Sequence
  Antisense compound
ctgatttatccagattgtta

SEQ ID NO: 14860 - DNA, 20 bp, Artificial Sequence
  Antisense compound
gctgatttatccagattgtt

SEQ ID NO: 14861 - DNA, 20 bp, Artificial Sequence
  Antisense compound
agctgatttatccagattgt

SEQ ID NO: 14862 - DNA, 20 bp, Artificial Sequence
  Antisense compound
cagctgatttatccagattg

SEQ ID NO: 14863 - DNA, 20 bp, Artificial Sequence
  Antisense compound
ccagctgatttatccagatt

SEQ ID NO: 14864 - DNA, 20 bp, Artificial Sequence
  Antisense compound
accagctgatttatccagat

SEQ ID NO: 14865 - DNA, 20 bp, Artificial Sequence
  Antisense compound
aaccagctgatttatccaga

SEQ ID NO: 14866 - DNA, 20 bp, Artificial Sequence
  Antisense compound
aaaccagctgatttatccag

SEQ ID NO: 14867 - DNA, 20 bp, Artificial Sequence
  Antisense compound
gaaaccagctgatttatcca

SEQ ID NO: 14868 - DNA, 20 bp, Artificial Sequence
  Antisense compound
ggaaaccagctgatttatcc

SEQ ID NO: 14869 - DNA, 20 bp, Artificial Sequence
  Antisense compound
gggaaaccagctgatttatc

SEQ ID NO: 14870 - DNA, 20 bp, Artificial Sequence
  Antisense compound
tgggaaaccagctgatttat

SEQ ID NO: 14871 - DNA, 20 bp, Artificial Sequence
  Antisense compound
atgggaaaccagctgattta

SEQ ID NO: 14872 - DNA, 20 bp, Artificial Sequence
  Antisense compound
aatgggaaaccagctgattt

SEQ ID NO: 14873 - DNA, 20 bp, Artificial Sequence
  Antisense compound
aaatgggaaaccagctgatt

SEQ ID NO: 14874 - DNA, 20 bp, Artificial Sequence
  Antisense compound
taaatgggaaaccagctgat

SEQ ID NO: 14875 - DNA, 20 bp, Artificial Sequence
  Antisense compound
ttaaatgggaaaccagctga

SEQ ID NO: 14876 - DNA, 20 bp, Artificial Sequence
  Antisense compound
attaaatgggaaaccagctg

SEQ ID NO: 14877 - DNA, 20 bp, Artificial Sequence
  Antisense compound
tattaaatgggaaaccagct

SEQ ID NO: 14878 - DNA, 20 bp, Artificial Sequence
  Antisense compound
ttattaaatgggaaaccagc

SEQ ID NO: 14879 - DNA, 20 bp, Artificial Sequence
  Antisense compound
tttattaaatgggaaaccag

SEQ ID NO: 14880 - DNA, 20 bp, Artificial Sequence
  Antisense compound
atttattaaatgggaaacca

SEQ ID NO: 14881 - DNA, 20 bp, Artificial Sequence
  Antisense compound
catttattaaatgggaaacc

SEQ ID NO: 14882 - DNA, 20 bp, Artificial Sequence
  Antisense compound
ccatttattaaatgggaaac

SEQ ID NO: 14883 - DNA, 20 bp, Artificial Sequence
  Antisense compound
cccatttattaaatgggaaa

SEQ ID NO: 14884 - DNA, 20 bp, Artificial Sequence
  Antisense compound
ccccatttattaaatgggaa

SEQ ID NO: 14885 - DNA, 20 bp, Artificial Sequence
  Antisense compound
accccatttattaaatggga

SEQ ID NO: 14886 - DNA, 20 bp, Artificial Sequence
  Antisense compound
taccccatttattaaatggg

SEQ ID NO: 14887 - DNA, 20 bp, Artificial Sequence
  Antisense compound
ttaccccatttattaaatgg

SEQ ID NO: 14888 - DNA, 20 bp, Artificial Sequence
  Antisense compound
cttaccccatttattaaatg

SEQ ID NO: 14889 - DNA, 20 bp, Artificial Sequence
  Antisense compound
ccttaccccatttattaaat

SEQ ID NO: 14890 - DNA, 20 bp, Artificial Sequence
  Antisense compound
gccttaccccatttattaaa

SEQ ID NO: 14891 - DNA, 20 bp, Artificial Sequence
  Antisense compound
agccttaccccatttattaa

SEQ ID NO: 14892 - DNA, 20 bp, Artificial Sequence
  Antisense compound
tagccttaccccatttatta

SEQ ID NO: 14893 - DNA, 20 bp, Artificial Sequence
  Antisense compound
ctagccttaccccatttatt

SEQ ID NO: 14894 - DNA, 20 bp, Artificial Sequence
  Antisense compound
tctagccttaccccatttat

SEQ ID NO: 14895 - DNA, 20 bp, Artificial Sequence
  Antisense compound
gtctagccttaccccattta

SEQ ID NO: 14896 - DNA, 20 bp, Artificial Sequence
  Antisense compound
agtctagccttaccccattt

SEQ ID NO: 14897 - DNA, 20 bp, Artificial Sequence
  Antisense compound
aagtctagccttaccccatt

SEQ ID NO: 14898 - DNA, 20 bp, Artificial Sequence
  Antisense compound
aaagtctagccttaccccat

SEQ ID NO: 14899 - DNA, 20 bp, Artificial Sequence
  Antisense compound
taaagtctagccttacccca

SEQ ID NO: 14900 - DNA, 20 bp, Artificial Sequence
  Antisense compound
ataaagtctagccttacccc

SEQ ID NO: 14901 - DNA, 20 bp, Artificial Sequence
  Antisense compound
aataaagtctagccttaccc

SEQ ID NO: 14902 - DNA, 20 bp, Artificial Sequence
  Antisense compound
taataaagtctagccttacc

SEQ ID NO: 14903 - DNA, 20 bp, Artificial Sequence
  Antisense compound
ataataaagtctagccttac

SEQ ID NO: 14904 - DNA, 20 bp, Artificial Sequence
  Antisense compound
cataataaagtctagcctta

SEQ ID NO: 14905 - DNA, 20 bp, Artificial Sequence
  Antisense compound
tcataataaagtctagcctt

SEQ ID NO: 14906 - DNA, 20 bp, Artificial Sequence
  Antisense compound
gtcataataaagtctagcct

SEQ ID NO: 14907 - DNA, 20 bp, Artificial Sequence
  Antisense compound
agtcataataaagtctagcc

SEQ ID NO: 14908 - DNA, 20 bp, Artificial Sequence
  Antisense compound
gagtcataataaagtctagc

SEQ ID NO: 14909 - DNA, 20 bp, Artificial Sequence
  Antisense compound
tgagtcataataaagtctag

SEQ ID NO: 14910 - DNA, 20 bp, Artificial Sequence
  Antisense compound
ttgagtcataataaagtcta

SEQ ID NO: 14911 - DNA, 20 bp, Artificial Sequence
  Antisense compound
attgagtcataataaagtct

SEQ ID NO: 14912 - DNA, 20 bp, Artificial Sequence
  Antisense compound
cattgagtcataataaagtc

SEQ ID NO: 14913 - DNA, 20 bp, Artificial Sequence
  Antisense compound
tcattgagtcataataaagt

SEQ ID NO: 14914 - DNA, 20 bp, Artificial Sequence
  Antisense compound
ctcattgagtcataataaag

SEQ ID NO: 14915 - DNA, 20 bp, Artificial Sequence
  Antisense compound
actcattgagtcataataaa

SEQ ID NO: 14916 - DNA, 20 bp, Artificial Sequence
  Antisense compound
aactcattgagtcataataa

SEQ ID NO: 14917 - DNA, 20 bp, Artificial Sequence
  Antisense compound
taactcattgagtcataata

SEQ ID NO: 14918 - DNA, 20 bp, Artificial Sequence
  Antisense compound
ataactcattgagtcataat

SEQ ID NO: 14919 - DNA, 20 bp, Artificial Sequence
  Antisense compound
cataactcattgagtcataa

SEQ ID NO: 14920 - DNA, 20 bp, Artificial Sequence
  Antisense compound
tcataactcattgagtcata

SEQ ID NO: 14921 - DNA, 20 bp, Artificial Sequence
  Antisense compound
ctcataactcattgagtcat

SEQ ID NO: 14922 - DNA, 20 bp, Artificial Sequence
  Antisense compound
cctcataactcattgagtca

SEQ ID NO: 14923 - DNA, 20 bp, Artificial Sequence
  Antisense compound
tcctcataactcattgagtc

SEQ ID NO: 14924 - DNA, 20 bp, Artificial Sequence
  Antisense compound
atcctcataactcattgagt

SEQ ID NO: 14925 - DNA, 20 bp, Artificial Sequence
  Antisense compound
gatcctcataactcattgag

SEQ ID NO: 14926 - DNA, 20 bp, Artificial Sequence
  Antisense compound
tgatcctcataactcattga

SEQ ID NO: 14927 - DNA, 20 bp, Artificial Sequence
  Antisense compound
ttgatcctcataactcattg

SEQ ID NO: 14928 - DNA, 20 bp, Artificial Sequence
  Antisense compound
cttgatcctcataactcatt

SEQ ID NO: 14929 - DNA, 20 bp, Artificial Sequence
  Antisense compound
tcttgatcctcataactcat

SEQ ID NO: 14930 - DNA, 20 bp, Artificial Sequence
  Antisense compound
atcttgatcctcataactca

SEQ ID NO: 14931 - DNA, 20 bp, Artificial Sequence
  Antisense compound
catcttgatcctcataactc

SEQ ID NO: 14932 - DNA, 20 bp, Artificial Sequence
  Antisense compound
gcatcttgatcctcataact

SEQ ID NO: 14933 - DNA, 20 bp, Artificial Sequence
  Antisense compound
tgcatcttgatcctcataac

SEQ ID NO: 14934 - DNA, 20 bp, Artificial Sequence
  Antisense compound
gtgcatcttgatcctcataa

SEQ ID NO: 14935 - DNA, 20 bp, Artificial Sequence
  Antisense compound
agtgcatcttgatcctcata

SEQ ID NO: 14936 - DNA, 20 bp, Artificial Sequence
  Antisense compound
aagtgcatcttgatcctcat

SEQ ID NO: 14937 - DNA, 20 bp, Artificial Sequence
  Antisense compound
aaagtgcatcttgatcctca

SEQ ID NO: 14938 - DNA, 20 bp, Artificial Sequence
  Antisense compound
aaaagtgcatcttgatcctc

SEQ ID NO: 14939 - DNA, 20 bp, Artificial Sequence
  Antisense compound
gaaaagtgcatcttgatcct

SEQ ID NO: 14940 - DNA, 20 bp, Artificial Sequence
  Antisense compound
cgaaaagtgcatcttgatcc

SEQ ID NO: 14941 - DNA, 20 bp, Artificial Sequence
  Antisense compound
gcgaaaagtgcatcttgatc

SEQ ID NO: 14942 - DNA, 20 bp, Artificial Sequence
  Antisense compound
cgcgaaaagtgcatcttgat

SEQ ID NO: 14943 - DNA, 20 bp, Artificial Sequence
  Antisense compound
acgcgaaaagtgcatcttga

SEQ ID NO: 14944 - DNA, 20 bp, Artificial Sequence
  Antisense compound
tacgcgaaaagtgcatcttg

SEQ ID NO: 14945 - DNA, 20 bp, Artificial Sequence
  Antisense compound
atacgcgaaaagtgcatctt

SEQ ID NO: 14946 - DNA, 20 bp, Artificial Sequence
  Antisense compound
tatacgcgaaaagtgcatct

SEQ ID NO: 14947 - DNA, 20 bp, Artificial Sequence
  Antisense compound
gtatacgcgaaaagtgcatc

SEQ ID NO: 14948 - DNA, 20 bp, Artificial Sequence
  Antisense compound
agtatacgcgaaaagtgcat

SEQ ID NO: 14949 - DNA, 20 bp, Artificial Sequence
  Antisense compound
tagtatacgcgaaaagtgca

SEQ ID NO: 14950 - DNA, 20 bp, Artificial Sequence
  Antisense compound
ttagtatacgcgaaaagtgc

SEQ ID NO: 14951 - DNA, 20 bp, Artificial Sequence
  Antisense compound
cttagtatacgcgaaaagtg

SEQ ID NO: 14952 - DNA, 20 bp, Artificial Sequence
  Antisense compound
gcttagtatacgcgaaaagt

SEQ ID NO: 14953 - DNA, 20 bp, Artificial Sequence
  Antisense compound
cgcttagtatacgcgaaaag

SEQ ID NO: 14954 - DNA, 20 bp, Artificial Sequence
  Antisense compound
acgcttagtatacgcgaaaa

SEQ ID NO: 14955 - DNA, 20 bp, Artificial Sequence
  Antisense compound
tacgcttagtatacgcgaaa

SEQ ID NO: 14956 - DNA, 20 bp, Artificial Sequence
  Antisense compound
ttacgcttagtatacgcgaa

SEQ ID NO: 14957 - DNA, 20 bp, Artificial Sequence
  Antisense compound
attacgcttagtatacgcga

SEQ ID NO: 14958 - DNA, 20 bp, Artificial Sequence
  Antisense compound
cattacgcttagtatacgcg

SEQ ID NO: 14959 - DNA, 20 bp, Artificial Sequence
  Antisense compound
acattacgcttagtatacgc

SEQ ID NO: 14960 - DNA, 20 bp, Artificial Sequence
  Antisense compound
gacattacgcttagtatacg

SEQ ID NO: 14961 - DNA, 20 bp, Artificial Sequence
  Antisense compound
tgacattacgcttagtatac

SEQ ID NO: 14962 - DNA, 20 bp, Artificial Sequence
  Antisense compound
atgacattacgcttagtata

SEQ ID NO: 14963 - DNA, 20 bp, Artificial Sequence
  Antisense compound
gatgacattacgcttagtat

SEQ ID NO: 14964 - DNA, 20 bp, Artificial Sequence
  Antisense compound
ggatgacattacgcttagta

SEQ ID NO: 14965 - DNA, 20 bp, Artificial Sequence
  Antisense compound
gggatgacattacgcttagt

SEQ ID NO: 14966 - DNA, 20 bp, Artificial Sequence
  Antisense compound
agggatgacattacgcttag

SEQ ID NO: 14967 - DNA, 20 bp, Artificial Sequence
  Antisense compound
tagggatgacattacgctta

SEQ ID NO: 14968 - DNA, 20 bp, Artificial Sequence
  Antisense compound
gtagggatgacattacgctt

SEQ ID NO: 14969 - DNA, 20 bp, Artificial Sequence
  Antisense compound
agtagggatgacattacgct

SEQ ID NO: 14970 - DNA, 20 bp, Artificial Sequence
  Antisense compound
tagtagggatgacattacgc

SEQ ID NO: 14971 - DNA, 20 bp, Artificial Sequence
  Antisense compound
atagtagggatgacattacg

SEQ ID NO: 14972 - DNA, 20 bp, Artificial Sequence
  Antisense compound
tatagtagggatgacattac

SEQ ID NO: 14973 - DNA, 20 bp, Artificial Sequence
  Antisense compound
ttatagtagggatgacatta

SEQ ID NO: 14974 - DNA, 20 bp, Artificial Sequence
  Antisense compound
gttatagtagggatgacatt

SEQ ID NO: 14975 - DNA, 20 bp, Artificial Sequence
  Antisense compound
agttatagtagggatgacat

SEQ ID NO: 14976 - DNA, 20 bp, Artificial Sequence
  Antisense compound
gagttatagtagggatgaca

SEQ ID NO: 14977 - DNA, 20 bp, Artificial Sequence
  Antisense compound
tgagttatagtagggatgac

SEQ ID NO: 14978 - DNA, 20 bp, Artificial Sequence
  Antisense compound
ttgagttatagtagggatga

SEQ ID NO: 14979 - DNA, 20 bp, Artificial Sequence
  Antisense compound
tttgagttatagtagggatg

SEQ ID NO: 14980 - DNA, 20 bp, Artificial Sequence
  Antisense compound
atttgagttatagtagggat

SEQ ID NO: 14981 - DNA, 20 bp, Artificial Sequence
  Antisense compound
catttgagttatagtaggga

SEQ ID NO: 14982 - DNA, 20 bp, Artificial Sequence
  Antisense compound
tcatttgagttatagtaggg

SEQ ID NO: 14983 - DNA, 20 bp, Artificial Sequence
  Antisense compound
ttcatttgagttatagtagg

SEQ ID NO: 14984 - DNA, 20 bp, Artificial Sequence
  Antisense compound
attcatttgagttatagtag

SEQ ID NO: 14985 - DNA, 20 bp, Artificial Sequence
  Antisense compound
gattcatttgagttatagta

SEQ ID NO: 14986 - DNA, 20 bp, Artificial Sequence
  Antisense compound
agattcatttgagttatagt

SEQ ID NO: 14987 - DNA, 20 bp, Artificial Sequence
  Antisense compound
aagattcatttgagttatag

SEQ ID NO: 14988 - DNA, 20 bp, Artificial Sequence
  Antisense compound
taagattcatttgagttata

SEQ ID NO: 14989 - DNA, 20 bp, Artificial Sequence
  Antisense compound
ttaagattcatttgagttat

SEQ ID NO: 14990 - DNA, 20 bp, Artificial Sequence
  Antisense compound
cttaagattcatttgagtta

SEQ ID NO: 14991 - DNA, 20 bp, Artificial Sequence
  Antisense compound
acttaagattcatttgagtt

SEQ ID NO: 14992 - DNA, 20 bp, Artificial Sequence
  Antisense compound
tacttaagattcatttgagt

SEQ ID NO: 14993 - DNA, 20 bp, Artificial Sequence
  Antisense compound
atacttaagattcatttgag

SEQ ID NO: 14994 - DNA, 20 bp, Artificial Sequence
  Antisense compound
catacttaagattcatttga

SEQ ID NO: 14995 - DNA, 20 bp, Artificial Sequence
  Antisense compound
gcatacttaagattcatttg

SEQ ID NO: 14996 - DNA, 20 bp, Artificial Sequence
  Antisense compound
ggcatacttaagattcattt

SEQ ID NO: 14997 - DNA, 20 bp, Artificial Sequence
  Antisense compound
tggcatacttaagattcatt

SEQ ID NO: 14998 - DNA, 20 bp, Artificial Sequence
  Antisense compound
atggcatacttaagattcat

SEQ ID NO: 14999 - DNA, 20 bp, Artificial Sequence
  Antisense compound
aatggcatacttaagattca

SEQ ID NO: 15000 - DNA, 20 bp, Artificial Sequence
  Antisense compound
taatggcatacttaagattc

SEQ ID NO: 15001 - DNA, 20 bp, Artificial Sequence
  Antisense compound
ctaatggcatacttaagatt

SEQ ID NO: 15002 - DNA, 20 bp, Artificial Sequence
  Antisense compound
actaatggcatacttaagat

SEQ ID NO: 15003 - DNA, 20 bp, Artificial Sequence
  Antisense compound
cactaatggcatacttaaga

SEQ ID NO: 15004 - DNA, 20 bp, Artificial Sequence
  Antisense compound
gcactaatggcatacttaag

SEQ ID NO: 15005 - DNA, 20 bp, Artificial Sequence
  Antisense compound
tgcactaatggcatacttaa

SEQ ID NO: 15006 - DNA, 20 bp, Artificial Sequence
  Antisense compound
ttgcactaatggcatactta

SEQ ID NO: 15007 - DNA, 20 bp, Artificial Sequence
  Antisense compound
tttgcactaatggcatactt

SEQ ID NO: 15008 - DNA, 20 bp, Artificial Sequence
  Antisense compound
ctttgcactaatggcatact

SEQ ID NO: 15009 - DNA, 20 bp, Artificial Sequence
  Antisense compound
tctttgcactaatggcatac

SEQ ID NO: 15010 - DNA, 20 bp, Artificial Sequence
  Antisense compound
ttctttgcactaatggcata

SEQ ID NO: 15011 - DNA, 20 bp, Artificial Sequence
  Antisense compound
attctttgcactaatggcat

SEQ ID NO: 15012 - DNA, 20 bp, Artificial Sequence
  Antisense compound
tattctttgcactaatggca

SEQ ID NO: 15013 - DNA, 20 bp, Artificial Sequence
  Antisense compound
ctattctttgcactaatggc

SEQ ID NO: 15014 - DNA, 20 bp, Artificial Sequence
  Antisense compound
tctattctttgcactaatgg

SEQ ID NO: 15015 - DNA, 20 bp, Artificial Sequence
  Antisense compound
ctctattctttgcactaatg

SEQ ID NO: 15016 - DNA, 20 bp, Artificial Sequence
  Antisense compound
gctctattctttgcactaat

SEQ ID NO: 15017 - DNA, 20 bp, Artificial Sequence
  Antisense compound
agctctattctttgcactaa

SEQ ID NO: 15018 - DNA, 20 bp, Artificial Sequence
  Antisense compound
gagctctattctttgcacta

SEQ ID NO: 15019 - DNA, 20 bp, Artificial Sequence
  Antisense compound
cgagctctattctttgcact

SEQ ID NO: 15020 - DNA, 20 bp, Artificial Sequence
  Antisense compound
gcgagctctattctttgcac

SEQ ID NO: 15021 - DNA, 20 bp, Artificial Sequence
  Antisense compound
tgcgagctctattctttgca

SEQ ID NO: 15022 - DNA, 20 bp, Artificial Sequence
  Antisense compound
gtgcgagctctattctttgc

SEQ ID NO: 15023 - DNA, 20 bp, Artificial Sequence
  Antisense compound
ggtgcgagctctattctttg

SEQ ID NO: 15024 - DNA, 20 bp, Artificial Sequence
  Antisense compound
cggtgcgagctctattcttt

SEQ ID NO: 15025 - DNA, 20 bp, Artificial Sequence
  Antisense compound
acggtgcgagctctattctt

SEQ ID NO: 15026 - DNA, 20 bp, Artificial Sequence
  Antisense compound
tacggtgcgagctctattct

SEQ ID NO: 15027 - DNA, 20 bp, Artificial Sequence
  Antisense compound
ctacggtgcgagctctattc

SEQ ID NO: 15028 - DNA, 20 bp, Artificial Sequence
  Antisense compound
gctacggtgcgagctctatt

SEQ ID NO: 15029 - DNA, 20 bp, Artificial Sequence
  Antisense compound
agctacggtgcgagctctat

SEQ ID NO: 15030 - DNA, 20 bp, Artificial Sequence
  Antisense compound
cagctacggtgcgagctcta

SEQ ID NO: 15031 - DNA, 20 bp, Artificial Sequence
  Antisense compound
ccagctacggtgcgagctct

SEQ ID NO: 15032 - DNA, 20 bp, Artificial Sequence
  Antisense compound
accagctacggtgcgagctc

SEQ ID NO: 15033 - DNA, 20 bp, Artificial Sequence
  Antisense compound
caccagctacggtgcgagct

SEQ ID NO: 15034 - DNA, 20 bp, Artificial Sequence
  Antisense compound
acaccagctacggtgcgagc

SEQ ID NO: 15035 - DNA, 20 bp, Artificial Sequence
  Antisense compound
gacaccagctacggtgcgag

SEQ ID NO: 15036 - DNA, 20 bp, Artificial Sequence
  Antisense compound
agacaccagctacggtgcga

SEQ ID NO: 15037 - DNA, 20 bp, Artificial Sequence
  Antisense compound
gagacaccagctacggtgcg

SEQ ID NO: 15038 - DNA, 20 bp, Artificial Sequence
  Antisense compound
agagacaccagctacggtgc

SEQ ID NO: 15039 - DNA, 20 bp, Artificial Sequence
  Antisense compound
tagagacaccagctacggtg

SEQ ID NO: 15040 - DNA, 20 bp, Artificial Sequence
  Antisense compound
atagagacaccagctacggt

SEQ ID NO: 15041 - DNA, 20 bp, Artificial Sequence
  Antisense compound
gatagagacaccagctacgg

SEQ ID NO: 15042 - DNA, 20 bp, Artificial Sequence
  Antisense compound
agatagagacaccagctacg

SEQ ID NO: 15043 - DNA, 20 bp, Artificial Sequence
  Antisense compound
cagatagagacaccagctac

SEQ ID NO: 15044 - DNA, 20 bp, Artificial Sequence
  Antisense compound
acagatagagacaccagcta

SEQ ID NO: 15045 - DNA, 20 bp, Artificial Sequence
  Antisense compound
tacagatagagacaccagct

SEQ ID NO: 15046 - DNA, 20 bp, Artificial Sequence
  Antisense compound
ctacagatagagacaccagc

SEQ ID NO: 15047 - DNA, 20 bp, Artificial Sequence
  Antisense compound
actacagatagagacaccag

SEQ ID NO: 15048 - DNA, 20 bp, Artificial Sequence
  Antisense compound
tactacagatagagacacca

SEQ ID NO: 15049 - DNA, 20 bp, Artificial Sequence
  Antisense compound
gtactacagatagagacacc

SEQ ID NO: 15050 - DNA, 20 bp, Artificial Sequence
  Antisense compound
agtactacagatagagacac

SEQ ID NO: 15051 - DNA, 20 bp, Artificial Sequence
  Antisense compound
tagtactacagatagagaca

SEQ ID NO: 15052 - DNA, 20 bp, Artificial Sequence
  Antisense compound
atagtactacagatagagac

SEQ ID NO: 15053 - DNA, 20 bp, Artificial Sequence
  Antisense compound
catagtactacagatagaga

SEQ ID NO: 15054 - DNA, 20 bp, Artificial Sequence
  Antisense compound
tcatagtactacagatagag

SEQ ID NO: 15055 - DNA, 20 bp, Artificial Sequence
  Antisense compound
gtcatagtactacagataga

SEQ ID NO: 15056 - DNA, 20 bp, Artificial Sequence
  Antisense compound
tgtcatagtactacagatag

SEQ ID NO: 15057 - DNA, 20 bp, Artificial Sequence
  Antisense compound
ttgtcatagtactacagata

SEQ ID NO: 15058 - DNA, 20 bp, Artificial Sequence
  Antisense compound
tttgtcatagtactacagat

SEQ ID NO: 15059 - DNA, 20 bp, Artificial Sequence
  Antisense compound
atttgtcatagtactacaga

SEQ ID NO: 15060 - DNA, 20 bp, Artificial Sequence
  Antisense compound
tatttgtcatagtactacag

SEQ ID NO: 15061 - DNA, 20 bp, Artificial Sequence
  Antisense compound
ctatttgtcatagtactaca

SEQ ID NO: 15062 - DNA, 20 bp, Artificial Sequence
  Antisense compound
tctatttgtcatagtactac

SEQ ID NO: 15063 - DNA, 20 bp, Artificial Sequence
  Antisense compound
gtctatttgtcatagtacta

SEQ ID NO: 15064 - DNA, 20 bp, Artificial Sequence
  Antisense compound
tgtctatttgtcatagtact

SEQ ID NO: 15065 - DNA, 20 bp, Artificial Sequence
  Antisense compound
ctgtctatttgtcatagtac

SEQ ID NO: 15066 - DNA, 20 bp, Artificial Sequence
  Antisense compound
actgtctatttgtcatagta

SEQ ID NO: 15067 - DNA, 20 bp, Artificial Sequence
  Antisense compound
aactgtctatttgtcatagt

SEQ ID NO: 15068 - DNA, 20 bp, Artificial Sequence
  Antisense compound
aaactgtctatttgtcatag

SEQ ID NO: 15069 - DNA, 20 bp, Artificial Sequence
  Antisense compound
gaaactgtctatttgtcata

SEQ ID NO: 15070 - DNA, 20 bp, Artificial Sequence
  Antisense compound
tgaaactgtctatttgtcat

SEQ ID NO: 15071 - DNA, 20 bp, Artificial Sequence
  Antisense compound
atgaaactgtctatttgtca

SEQ ID NO: 15072 - DNA, 20 bp, Artificial Sequence
  Antisense compound
gatgaaactgtctatttgtc

SEQ ID NO: 15073 - DNA, 20 bp, Artificial Sequence
  Antisense compound
tgatgaaactgtctatttgt

SEQ ID NO: 15074 - DNA, 20 bp, Artificial Sequence
  Antisense compound
ctgatgaaactgtctatttg

SEQ ID NO: 15075 - DNA, 20 bp, Artificial Sequence
  Antisense compound
tctgatgaaactgtctattt

SEQ ID NO: 15076 - DNA, 20 bp, Artificial Sequence
  Antisense compound
ttctgatgaaactgtctatt

SEQ ID NO: 15077 - DNA, 20 bp, Artificial Sequence
  Antisense compound
tttctgatgaaactgtctat

SEQ ID NO: 15078 - DNA, 20 bp, Artificial Sequence
  Antisense compound
atttctgatgaaactgtcta

SEQ ID NO: 15079 - DNA, 20 bp, Artificial Sequence
  Antisense compound
aatttctgatgaaactgtct

SEQ ID NO: 15080 - DNA, 20 bp, Artificial Sequence
  Antisense compound
taatttctgatgaaactgtc

SEQ ID NO: 15081 - DNA, 20 bp, Artificial Sequence
  Antisense compound
ataatttctgatgaaactgt

SEQ ID NO: 15082 - DNA, 20 bp, Artificial Sequence
  Antisense compound
aataatttctgatgaaactg

SEQ ID NO: 15083 - DNA, 20 bp, Artificial Sequence
  Antisense compound
caataatttctgatgaaact

SEQ ID NO: 15084 - DNA, 20 bp, Artificial Sequence
  Antisense compound
tcaataatttctgatgaaac

SEQ ID NO: 15085 - DNA, 20 bp, Artificial Sequence
  Antisense compound
ttcaataatttctgatgaaa

SEQ ID NO: 15086 - DNA, 20 bp, Artificial Sequence
  Antisense compound
cttcaataatttctgatgaa

SEQ ID NO: 15087 - DNA, 20 bp, Artificial Sequence
  Antisense compound
acttcaataatttctgatga

SEQ ID NO: 15088 - DNA, 20 bp, Artificial Sequence
  Antisense compound
gacttcaataatttctgatg

SEQ ID NO: 15089 - DNA, 20 bp, Artificial Sequence
  Antisense compound
tgacttcaataatttctgat

SEQ ID NO: 15090 - DNA, 20 bp, Artificial Sequence
  Antisense compound
ttgacttcaataatttctga

SEQ ID NO: 15091 - DNA, 20 bp, Artificial Sequence
  Antisense compound
attgacttcaataatttctg

SEQ ID NO: 15092 - DNA, 20 bp, Artificial Sequence
  Antisense compound
tattgacttcaataatttct

SEQ ID NO: 15093 - DNA, 20 bp, Artificial Sequence
  Antisense compound
ctattgacttcaataatttc

SEQ ID NO: 15094 - DNA, 20 bp, Artificial Sequence
  Antisense compound
gctattgacttcaataattt

SEQ ID NO: 15095 - DNA, 20 bp, Artificial Sequence
  Antisense compound
ggctattgacttcaataatt

SEQ ID NO: 15096 - DNA, 20 bp, Artificial Sequence
  Antisense compound
cggctattgacttcaataat

SEQ ID NO: 15097 - DNA, 20 bp, Artificial Sequence
  Antisense compound
gcggctattgacttcaataa

SEQ ID NO: 15098 - DNA, 20 bp, Artificial Sequence
  Antisense compound
ggcggctattgacttcaata

SEQ ID NO: 15099 - DNA, 20 bp, Artificial Sequence
  Antisense compound
tggcggctattgacttcaat

SEQ ID NO: 15100 - DNA, 20 bp, Artificial Sequence
  Antisense compound
gtggcggctattgacttcaa

SEQ ID NO: 15101 - DNA, 20 bp, Artificial Sequence
  Antisense compound
agtggcggctattgacttca

SEQ ID NO: 15102 - DNA, 20 bp, Artificial Sequence
  Antisense compound
tagtggcggctattgacttc

SEQ ID NO: 15103 - DNA, 20 bp, Artificial Sequence
  Antisense compound
ctagtggcggctattgactt

SEQ ID NO: 15104 - DNA, 20 bp, Artificial Sequence
  Antisense compound
tctagtggcggctattgact

SEQ ID NO: 15105 - DNA, 20 bp, Artificial Sequence
  Antisense compound
ctctagtggcggctattgac

SEQ ID NO: 15106 - DNA, 20 bp, Artificial Sequence
  Antisense compound
cctctagtggcggctattga

SEQ ID NO: 15107 - DNA, 20 bp, Artificial Sequence
  Antisense compound
tcctctagtggcggctattg

SEQ ID NO: 15108 - DNA, 20 bp, Artificial Sequence
  Antisense compound
ctcctctagtggcggctatt

SEQ ID NO: 15109 - DNA, 20 bp, Artificial Sequence
  Antisense compound
gctcctctagtggcggctat

SEQ ID NO: 15110 - DNA, 20 bp, Artificial Sequence
  Antisense compound
agctcctctagtggcggcta

SEQ ID NO: 15111 - DNA, 20 bp, Artificial Sequence
  Antisense compound
tagctcctctagtggcggct

SEQ ID NO: 15112 - DNA, 20 bp, Artificial Sequence
  Antisense compound
gtagctcctctagtggcggc

SEQ ID NO: 15113 - DNA, 20 bp, Artificial Sequence
  Antisense compound
agtagctcctctagtggcgg

SEQ ID NO: 15114 - DNA, 20 bp, Artificial Sequence
  Antisense compound
cagtagctcctctagtggcg

SEQ ID NO: 15115 - DNA, 20 bp, Artificial Sequence
  Antisense compound
acagtagctcctctagtggc

SEQ ID NO: 15116 - DNA, 20 bp, Artificial Sequence
  Antisense compound
cacagtagctcctctagtgg

SEQ ID NO: 15117 - DNA, 20 bp, Artificial Sequence
  Antisense compound
ccacagtagctcctctagtg

SEQ ID NO: 15118 - DNA, 20 bp, Artificial Sequence
  Antisense compound
accacagtagctcctctagt

SEQ ID NO: 15119 - DNA, 20 bp, Artificial Sequence
  Antisense compound
taccacagtagctcctctag

SEQ ID NO: 15120 - DNA, 20 bp, Artificial Sequence
  Antisense compound
ttaccacagtagctcctcta

SEQ ID NO: 15121 - DNA, 20 bp, Artificial Sequence
  Antisense compound
attaccacagtagctcctct

SEQ ID NO: 15122 - DNA, 20 bp, Artificial Sequence
  Antisense compound
aattaccacagtagctcctc

SEQ ID NO: 15123 - DNA, 20 bp, Artificial Sequence
  Antisense compound
caattaccacagtagctcct

SEQ ID NO: 15124 - DNA, 20 bp, Artificial Sequence
  Antisense compound
ccaattaccacagtagctcc

SEQ ID NO: 15125 - DNA, 20 bp, Artificial Sequence
  Antisense compound
tccaattaccacagtagctc

SEQ ID NO: 15126 - DNA, 20 bp, Artificial Sequence
  Antisense compound
ttccaattaccacagtagct

SEQ ID NO: 15127 - DNA, 20 bp, Artificial Sequence
  Antisense compound
gttccaattaccacagtagc

SEQ ID NO: 15128 - DNA, 20 bp, Artificial Sequence
  Antisense compound
tgttccaattaccacagtag

SEQ ID NO: 15129 - DNA, 20 bp, Artificial Sequence
  Antisense compound
ttgttccaattaccacagta

SEQ ID NO: 15130 - DNA, 20 bp, Artificial Sequence
  Antisense compound
cttgttccaattaccacagt

SEQ ID NO: 15131 - DNA, 20 bp, Artificial Sequence
  Antisense compound
gcttgttccaattaccacag

SEQ ID NO: 15132 - DNA, 20 bp, Artificial Sequence
  Antisense compound
tgcttgttccaattaccaca

SEQ ID NO: 15133 - DNA, 20 bp, Artificial Sequence
  Antisense compound
ttgcttgttccaattaccac

SEQ ID NO: 15134 - DNA, 20 bp, Artificial Sequence
  Antisense compound
cttgcttgttccaattacca

SEQ ID NO: 15135 - DNA, 20 bp, Artificial Sequence
  Antisense compound
acttgcttgttccaattacc

SEQ ID NO: 15136 - DNA, 20 bp, Artificial Sequence
  Antisense compound
aacttgcttgttccaattac

SEQ ID NO: 15137 - DNA, 20 bp, Artificial Sequence
  Antisense compound
aaacttgcttgttccaatta

SEQ ID NO: 15138 - DNA, 20 bp, Artificial Sequence
  Antisense compound
aaaacttgcttgttccaatt

SEQ ID NO: 15139 - DNA, 20 bp, Artificial Sequence
  Antisense compound
taaaacttgcttgttccaat

SEQ ID NO: 15140 - DNA, 20 bp, Artificial Sequence
  Antisense compound
gtaaaacttgcttgttccaa

SEQ ID NO: 15141 - DNA, 20 bp, Artificial Sequence
  Antisense compound
cgtaaaacttgcttgttcca

SEQ ID NO: 15142 - DNA, 20 bp, Artificial Sequence
  Antisense compound
ccgtaaaacttgcttgttcc

SEQ ID NO: 15143 - DNA, 20 bp, Artificial Sequence
  Antisense compound
accgtaaaacttgcttgttc

SEQ ID NO: 15144 - DNA, 20 bp, Artificial Sequence
  Antisense compound
caccgtaaaacttgcttgtt

SEQ ID NO: 15145 - DNA, 20 bp, Artificial Sequence
  Antisense compound
ccaccgtaaaacttgcttgt

SEQ ID NO: 15146 - DNA, 20 bp, Artificial Sequence
  Antisense compound
gccaccgtaaaacttgcttg

SEQ ID NO: 15147 - DNA, 20 bp, Artificial Sequence
  Antisense compound
agccaccgtaaaacttgctt

SEQ ID NO: 15148 - DNA, 20 bp, Artificial Sequence
  Antisense compound
cagccaccgtaaaacttgct

SEQ ID NO: 15149 - DNA, 20 bp, Artificial Sequence
  Antisense compound
ccagccaccgtaaaacttgc

SEQ ID NO: 15150 - DNA, 20 bp, Artificial Sequence
  Antisense compound
gccagccaccgtaaaacttg

SEQ ID NO: 15151 - DNA, 20 bp, Artificial Sequence
  Antisense compound
tgccagccaccgtaaaactt

SEQ ID NO: 15152 - DNA, 20 bp, Artificial Sequence
  Antisense compound
atgccagccaccgtaaaact

SEQ ID NO: 15153 - DNA, 20 bp, Artificial Sequence
  Antisense compound
tatgccagccaccgtaaaac

SEQ ID NO: 15154 - DNA, 20 bp, Artificial Sequence
  Antisense compound
ttatgccagccaccgtaaaa

SEQ ID NO: 15155 - DNA, 20 bp, Artificial Sequence
  Antisense compound
attatgccagccaccgtaaa

SEQ ID NO: 15156 - DNA, 20 bp, Artificial Sequence
  Antisense compound
tattatgccagccaccgtaa

SEQ ID NO: 15157 - DNA, 20 bp, Artificial Sequence
  Antisense compound
atattatgccagccaccgta

SEQ ID NO: 15158 - DNA, 20 bp, Artificial Sequence
  Antisense compound
catattatgccagccaccgt

SEQ ID NO: 15159 - DNA, 20 bp, Artificial Sequence
  Antisense compound
acatattatgccagccaccg

SEQ ID NO: 15160 - DNA, 20 bp, Artificial Sequence
  Antisense compound
aacatattatgccagccacc

SEQ ID NO: 15161 - DNA, 20 bp, Artificial Sequence
  Antisense compound
taacatattatgccagccac

SEQ ID NO: 15162 - DNA, 20 bp, Artificial Sequence
  Antisense compound
ttaacatattatgccagcca

SEQ ID NO: 15163 - DNA, 20 bp, Artificial Sequence
  Antisense compound
tttaacatattatgccagcc

SEQ ID NO: 15164 - DNA, 20 bp, Artificial Sequence
  Antisense compound
ttttaacatattatgccagc

SEQ ID NO: 15165 - DNA, 20 bp, Artificial Sequence
  Antisense compound
tttttaacatattatgccag

SEQ ID NO: 15166 - DNA, 20 bp, Artificial Sequence
  Antisense compound
gtttttaacatattatgcca

SEQ ID NO: 15167 - DNA, 20 bp, Artificial Sequence
  Antisense compound
agtttttaacatattatgcc

SEQ ID NO: 15168 - DNA, 20 bp, Artificial Sequence
  Antisense compound
cagtttttaacatattatgc

SEQ ID NO: 15169 - DNA, 20 bp, Artificial Sequence
  Antisense compound
acagtttttaacatattatg

SEQ ID NO: 15170 - DNA, 20 bp, Artificial Sequence
  Antisense compound
aacagtttttaacatattat

SEQ ID NO: 15171 - DNA, 20 bp, Artificial Sequence
  Antisense compound
aaacagtttttaacatatta

SEQ ID NO: 15172 - DNA, 20 bp, Artificial Sequence
  Antisense compound
taaacagtttttaacatatt

SEQ ID NO: 15173 - DNA, 20 bp, Artificial Sequence
  Antisense compound
gtaaacagtttttaacatat

SEQ ID NO: 15174 - DNA, 20 bp, Artificial Sequence
  Antisense compound
tgtaaacagtttttaacata

SEQ ID NO: 15175 - DNA, 20 bp, Artificial Sequence
  Antisense compound
ctgtaaacagtttttaacat

SEQ ID NO: 15176 - DNA, 20 bp, Artificial Sequence
  Antisense compound
actgtaaacagtttttaaca

SEQ ID NO: 15177 - DNA, 20 bp, Artificial Sequence
  Antisense compound
cactgtaaacagtttttaac

SEQ ID NO: 15178 - DNA, 20 bp, Artificial Sequence
  Antisense compound
tcactgtaaacagtttttaa

SEQ ID NO: 15179 - DNA, 20 bp, Artificial Sequence
  Antisense compound
atcactgtaaacagttttta

SEQ ID NO: 15180 - DNA, 20 bp, Artificial Sequence
  Antisense compound
catcactgtaaacagttttt

SEQ ID NO: 15181 - DNA, 20 bp, Artificial Sequence
  Antisense compound
acatcactgtaaacagtttt

SEQ ID NO: 15182 - DNA, 20 bp, Artificial Sequence
  Antisense compound
tacatcactgtaaacagttt

SEQ ID NO: 15183 - DNA, 20 bp, Artificial Sequence
  Antisense compound
ctacatcactgtaaacagtt

SEQ ID NO: 15184 - DNA, 20 bp, Artificial Sequence
  Antisense compound
tctacatcactgtaaacagt

SEQ ID NO: 15185 - DNA, 20 bp, Artificial Sequence
  Antisense compound
ttctacatcactgtaaacag

SEQ ID NO: 15186 - DNA, 20 bp, Artificial Sequence
  Antisense compound
tttctacatcactgtaaaca

SEQ ID NO: 15187 - DNA, 20 bp, Artificial Sequence
  Antisense compound
gtttctacatcactgtaaac

SEQ ID NO: 15188 - DNA, 20 bp, Artificial Sequence
  Antisense compound
agtttctacatcactgtaaa

SEQ ID NO: 15189 - DNA, 20 bp, Artificial Sequence
  Antisense compound
gagtttctacatcactgtaa

SEQ ID NO: 15190 - DNA, 20 bp, Artificial Sequence
  Antisense compound
ggagtttctacatcactgta

SEQ ID NO: 15191 - DNA, 20 bp, Artificial Sequence
  Antisense compound
tggagtttctacatcactgt

SEQ ID NO: 15192 - DNA, 20 bp, Artificial Sequence
  Antisense compound
gtggagtttctacatcactg

SEQ ID NO: 15193 - DNA, 20 bp, Artificial Sequence
  Antisense compound
tgtggagtttctacatcact

SEQ ID NO: 15194 - DNA, 20 bp, Artificial Sequence
  Antisense compound
gtgtggagtttctacatcac

SEQ ID NO: 15195 - DNA, 20 bp, Artificial Sequence
  Antisense compound
ggtgtggagtttctacatca

SEQ ID NO: 15196 - DNA, 20 bp, Artificial Sequence
  Antisense compound
aggtgtggagtttctacatc

SEQ ID NO: 15197 - DNA, 20 bp, Artificial Sequence
  Antisense compound
aaggtgtggagtttctacat

SEQ ID NO: 15198 - DNA, 20 bp, Artificial Sequence
  Antisense compound
taaggtgtggagtttctaca

SEQ ID NO: 15199 - DNA, 20 bp, Artificial Sequence
  Antisense compound
ataaggtgtggagtttctac

SEQ ID NO: 15200 - DNA, 20 bp, Artificial Sequence
  Antisense compound
cataaggtgtggagtttcta

SEQ ID NO: 15201 - DNA, 20 bp, Artificial Sequence
  Antisense compound
ccataaggtgtggagtttct

SEQ ID NO: 15202 - DNA, 20 bp, Artificial Sequence
  Antisense compound
cccataaggtgtggagtttc

SEQ ID NO: 15203 - DNA, 20 bp, Artificial Sequence
  Antisense compound
acccataaggtgtggagttt

SEQ ID NO: 15204 - DNA, 20 bp, Artificial Sequence
  Antisense compound
aacccataaggtgtggagtt

SEQ ID NO: 15205 - DNA, 20 bp, Artificial Sequence
  Antisense compound
caacccataaggtgtggagt

SEQ ID NO: 15206 - DNA, 20 bp, Artificial Sequence
  Antisense compound
ccaacccataaggtgtggag

SEQ ID NO: 15207 - DNA, 20 bp, Artificial Sequence
  Antisense compound
cccaacccataaggtgtgga

SEQ ID NO: 15208 - DNA, 20 bp, Artificial Sequence
  Antisense compound
tcccaacccataaggtgtgg

SEQ ID NO: 15209 - DNA, 20 bp, Artificial Sequence
  Antisense compound
atcccaacccataaggtgtg

SEQ ID NO: 15210 - DNA, 20 bp, Artificial Sequence
  Antisense compound
aatcccaacccataaggtgt

SEQ ID NO: 15211 - DNA, 20 bp, Artificial Sequence
  Antisense compound
taatcccaacccataaggtg

SEQ ID NO: 15212 - DNA, 20 bp, Artificial Sequence
  Antisense compound
ataatcccaacccataaggt

SEQ ID NO: 15213 - DNA, 20 bp, Artificial Sequence
  Antisense compound
gataatcccaacccataagg

SEQ ID NO: 15214 - DNA, 20 bp, Artificial Sequence
  Antisense compound
ggataatcccaacccataag

SEQ ID NO: 15215 - DNA, 20 bp, Artificial Sequence
  Antisense compound
tggataatcccaacccataa

SEQ ID NO: 15216 - DNA, 20 bp, Artificial Sequence
  Antisense compound
ttggataatcccaacccata

SEQ ID NO: 15217 - DNA, 20 bp, Artificial Sequence
  Antisense compound
tttggataatcccaacccat

SEQ ID NO: 15218 - DNA, 20 bp, Artificial Sequence
  Antisense compound
ttttggataatcccaaccca

SEQ ID NO: 15219 - DNA, 20 bp, Artificial Sequence
  Antisense compound
attttggataatcccaaccc

SEQ ID NO: 15220 - DNA, 20 bp, Artificial Sequence
  Antisense compound
cattttggataatcccaacc

SEQ ID NO: 15221 - DNA, 20 bp, Artificial Sequence
  Antisense compound
acattttggataatcccaac

SEQ ID NO: 15222 - DNA, 20 bp, Artificial Sequence
  Antisense compound
cacattttggataatcccaa

SEQ ID NO: 15223 - DNA, 20 bp, Artificial Sequence
  Antisense compound
tcacattttggataatccca

SEQ ID NO: 15224 - DNA, 20 bp, Artificial Sequence
  Antisense compound
gtcacattttggataatccc

SEQ ID NO: 15225 - DNA, 20 bp, Artificial Sequence
  Antisense compound
tgtcacattttggataatcc

SEQ ID NO: 15226 - DNA, 20 bp, Artificial Sequence
  Antisense compound
ctgtcacattttggataatc

SEQ ID NO: 15227 - DNA, 20 bp, Artificial Sequence
  Antisense compound
tctgtcacattttggataat

SEQ ID NO: 15228 - DNA, 20 bp, Artificial Sequence
  Antisense compound
ctctgtcacattttggataa

SEQ ID NO: 15229 - DNA, 20 bp, Artificial Sequence
  Antisense compound
gctctgtcacattttggata

SEQ ID NO: 15230 - DNA, 20 bp, Artificial Sequence
  Antisense compound
ggctctgtcacattttggat

SEQ ID NO: 15231 - DNA, 20 bp, Artificial Sequence
  Antisense compound
tggctctgtcacattttgga

SEQ ID NO: 15232 - DNA, 20 bp, Artificial Sequence
  Antisense compound
atggctctgtcacattttgg

SEQ ID NO: 15233 - DNA, 20 bp, Artificial Sequence
  Antisense compound
catggctctgtcacattttg

SEQ ID NO: 15234 - DNA, 20 bp, Artificial Sequence
  Antisense compound
gcatggctctgtcacatttt

SEQ ID NO: 15235 - DNA, 20 bp, Artificial Sequence
  Antisense compound
ggcatggctctgtcacattt

SEQ ID NO: 15236 - DNA, 20 bp, Artificial Sequence
  Antisense compound
aggcatggctctgtcacatt

SEQ ID NO: 15237 - DNA, 20 bp, Artificial Sequence
  Antisense compound
taggcatggctctgtcacat

SEQ ID NO: 15238 - DNA, 20 bp, Artificial Sequence
  Antisense compound
ttaggcatggctctgtcaca

SEQ ID NO: 15239 - DNA, 20 bp, Artificial Sequence
  Antisense compound
gttaggcatggctctgtcac

SEQ ID NO: 15240 - DNA, 20 bp, Artificial Sequence
  Antisense compound
tgttaggcatggctctgtca

SEQ ID NO: 15241 - DNA, 20 bp, Artificial Sequence
  Antisense compound
atgttaggcatggctctgtc

SEQ ID NO: 15242 - DNA, 20 bp, Artificial Sequence
  Antisense compound
catgttaggcatggctctgt

SEQ ID NO: 15243 - DNA, 20 bp, Artificial Sequence
  Antisense compound
gcatgttaggcatggctctg

SEQ ID NO: 15244 - DNA, 20 bp, Artificial Sequence
  Antisense compound
agcatgttaggcatggctct

SEQ ID NO: 15245 - DNA, 20 bp, Artificial Sequence
  Antisense compound
aagcatgttaggcatggctc

SEQ ID NO: 15246 - DNA, 20 bp, Artificial Sequence
  Antisense compound
taagcatgttaggcatggct

SEQ ID NO: 15247 - DNA, 20 bp, Artificial Sequence
  Antisense compound
ctaagcatgttaggcatggc

SEQ ID NO: 15248 - DNA, 20 bp, Artificial Sequence
  Antisense compound
cctaagcatgttaggcatgg

SEQ ID NO: 15249 - DNA, 20 bp, Artificial Sequence
  Antisense compound
tcctaagcatgttaggcatg

SEQ ID NO: 15250 - DNA, 20 bp, Artificial Sequence
  Antisense compound
atcctaagcatgttaggcat

SEQ ID NO: 15251 - DNA, 20 bp, Artificial Sequence
  Antisense compound
tatcctaagcatgttaggca

SEQ ID NO: 15252 - DNA, 20 bp, Artificial Sequence
  Antisense compound
ttatcctaagcatgttaggc

SEQ ID NO: 15253 - DNA, 20 bp, Artificial Sequence
  Antisense compound
attatcctaagcatgttagg

SEQ ID NO: 15254 - DNA, 20 bp, Artificial Sequence
  Antisense compound
cattatcctaagcatgttag

SEQ ID NO: 15255 - DNA, 20 bp, Artificial Sequence
  Antisense compound
ccattatcctaagcatgtta

SEQ ID NO: 15256 - DNA, 20 bp, Artificial Sequence
  Antisense compound
gccattatcctaagcatgtt

SEQ ID NO: 15257 - DNA, 20 bp, Artificial Sequence
  Antisense compound
ggccattatcctaagcatgt

SEQ ID NO: 15258 - DNA, 20 bp, Artificial Sequence
  Antisense compound
aggccattatcctaagcatg

SEQ ID NO: 15259 - DNA, 20 bp, Artificial Sequence
  Antisense compound
gaggccattatcctaagcat

SEQ ID NO: 15260 - DNA, 20 bp, Artificial Sequence
  Antisense compound
agaggccattatcctaagca

SEQ ID NO: 15261 - DNA, 20 bp, Artificial Sequence
  Antisense compound
gagaggccattatcctaagc

SEQ ID NO: 15262 - DNA, 20 bp, Artificial Sequence
  Antisense compound
agagaggccattatcctaag

SEQ ID NO: 15263 - DNA, 20 bp, Artificial Sequence
  Antisense compound
aagagaggccattatcctaa

SEQ ID NO: 15264 - DNA, 20 bp, Artificial Sequence
  Antisense compound
caagagaggccattatccta

SEQ ID NO: 15265 - DNA, 20 bp, Artificial Sequence
  Antisense compound
acaagagaggccattatcct

SEQ ID NO: 15266 - DNA, 20 bp, Artificial Sequence
  Antisense compound
aacaagagaggccattatcc

SEQ ID NO: 15267 - DNA, 20 bp, Artificial Sequence
  Antisense compound
gaacaagagaggccattatc

SEQ ID NO: 15268 - DNA, 20 bp, Artificial Sequence
  Antisense compound
agaacaagagaggccattat

SEQ ID NO: 15269 - DNA, 20 bp, Artificial Sequence
  Antisense compound
aagaacaagagaggccatta

SEQ ID NO: 15270 - DNA, 20 bp, Artificial Sequence
  Antisense compound
caagaacaagagaggccatt

SEQ ID NO: 15271 - DNA, 20 bp, Artificial Sequence
  Antisense compound
gcaagaacaagagaggccat

SEQ ID NO: 15272 - DNA, 20 bp, Artificial Sequence
  Antisense compound
agcaagaacaagagaggcca

SEQ ID NO: 15273 - DNA, 20 bp, Artificial Sequence
  Antisense compound
gagcaagaacaagagaggcc

SEQ ID NO: 15274 - DNA, 20 bp, Artificial Sequence
  Antisense compound
cgagcaagaacaagagaggc

SEQ ID NO: 15275 - DNA, 20 bp, Artificial Sequence
  Antisense compound
gcgagcaagaacaagagagg

SEQ ID NO: 15276 - DNA, 20 bp, Artificial Sequence
  Antisense compound
tgcgagcaagaacaagagag

SEQ ID NO: 15277 - DNA, 20 bp, Artificial Sequence
  Antisense compound
ttgcgagcaagaacaagaga

SEQ ID NO: 15278 - DNA, 20 bp, Artificial Sequence
  Antisense compound
tttgcgagcaagaacaagag

SEQ ID NO: 15279 - DNA, 20 bp, Artificial Sequence
  Antisense compound
gtttgcgagcaagaacaaga

SEQ ID NO: 15280 - DNA, 20 bp, Artificial Sequence
  Antisense compound
tgtttgcgagcaagaacaag

SEQ ID NO: 15281 - DNA, 20 bp, Artificial Sequence
  Antisense compound
atgtttgcgagcaagaacaa

SEQ ID NO: 15282 - DNA, 20 bp, Artificial Sequence
  Antisense compound
tatgtttgcgagcaagaaca

SEQ ID NO: 15283 - DNA, 20 bp, Artificial Sequence
  Antisense compound
ttatgtttgcgagcaagaac

SEQ ID NO: 15284 - DNA, 20 bp, Artificial Sequence
  Antisense compound
gttatgtttgcgagcaagaa

SEQ ID NO: 15285 - DNA, 20 bp, Artificial Sequence
  Antisense compound
tgttatgtttgcgagcaaga

SEQ ID NO: 15286 - DNA, 20 bp, Artificial Sequence
  Antisense compound
gtgttatgtttgcgagcaag

SEQ ID NO: 15287 - DNA, 20 bp, Artificial Sequence
  Antisense compound
agtgttatgtttgcgagcaa

SEQ ID NO: 15288 - DNA, 20 bp, Artificial Sequence
  Antisense compound
aagtgttatgtttgcgagca

SEQ ID NO: 15289 - DNA, 20 bp, Artificial Sequence
  Antisense compound
caagtgttatgtttgcgagc

SEQ ID NO: 15290 - DNA, 20 bp, Artificial Sequence
  Antisense compound
gcaagtgttatgtttgcgag

SEQ ID NO: 15291 - DNA, 20 bp, Artificial Sequence
  Antisense compound
agcaagtgttatgtttgcga

SEQ ID NO: 15292 - DNA, 20 bp, Artificial Sequence
  Antisense compound
cagcaagtgttatgtttgcg

SEQ ID NO: 15293 - DNA, 20 bp, Artificial Sequence
  Antisense compound
acagcaagtgttatgtttgc

SEQ ID NO: 15294 - DNA, 20 bp, Artificial Sequence
  Antisense compound
tacagcaagtgttatgtttg

SEQ ID NO: 15295 - DNA, 20 bp, Artificial Sequence
  Antisense compound
ttacagcaagtgttatgttt

SEQ ID NO: 15296 - DNA, 20 bp, Artificial Sequence
  Antisense compound
gttacagcaagtgttatgtt

SEQ ID NO: 15297 - DNA, 20 bp, Artificial Sequence
  Antisense compound
agttacagcaagtgttatgt

SEQ ID NO: 15298 - DNA, 20 bp, Artificial Sequence
  Antisense compound
aagttacagcaagtgttatg

SEQ ID NO: 15299 - DNA, 20 bp, Artificial Sequence
  Antisense compound
taagttacagcaagtgttat

SEQ ID NO: 15300 - DNA, 20 bp, Artificial Sequence
  Antisense compound
ataagttacagcaagtgtta

SEQ ID NO: 15301 - DNA, 20 bp, Artificial Sequence
  Antisense compound
gataagttacagcaagtgtt

SEQ ID NO: 15302 - DNA, 20 bp, Artificial Sequence
  Antisense compound
tgataagttacagcaagtgt

SEQ ID NO: 15303 - DNA, 20 bp, Artificial Sequence
  Antisense compound
gtgataagttacagcaagtg

SEQ ID NO: 15304 - DNA, 20 bp, Artificial Sequence
  Antisense compound
tgtgataagttacagcaagt

SEQ ID NO: 15305 - DNA, 20 bp, Artificial Sequence
  Antisense compound
gtgtgataagttacagcaag

SEQ ID NO: 15306 - DNA, 20 bp, Artificial Sequence
  Antisense compound
ggtgtgataagttacagcaa

SEQ ID NO: 15307 - DNA, 20 bp, Artificial Sequence
  Antisense compound
cggtgtgataagttacagca

SEQ ID NO: 15308 - DNA, 20 bp, Artificial Sequence
  Antisense compound
acggtgtgataagttacagc

SEQ ID NO: 15309 - DNA, 20 bp, Artificial Sequence
  Antisense compound
aacggtgtgataagttacag

SEQ ID NO: 15310 - DNA, 20 bp, Artificial Sequence
  Antisense compound
aaacggtgtgataagttaca

SEQ ID NO: 15311 - DNA, 20 bp, Artificial Sequence
  Antisense compound
gaaacggtgtgataagttac

SEQ ID NO: 15312 - DNA, 20 bp, Artificial Sequence
  Antisense compound
agaaacggtgtgataagtta

SEQ ID NO: 15313 - DNA, 20 bp, Artificial Sequence
  Antisense compound
tagaaacggtgtgataagtt

SEQ ID NO: 15314 - DNA, 20 bp, Artificial Sequence
  Antisense compound
gtagaaacggtgtgataagt

SEQ ID NO: 15315 - DNA, 20 bp, Artificial Sequence
  Antisense compound
tgtagaaacggtgtgataag

SEQ ID NO: 15316 - DNA, 20 bp, Artificial Sequence
  Antisense compound
ctgtagaaacggtgtgataa

SEQ ID NO: 15317 - DNA, 20 bp, Artificial Sequence
  Antisense compound
cctgtagaaacggtgtgata

SEQ ID NO: 15318 - DNA, 20 bp, Artificial Sequence
  Antisense compound
acctgtagaaacggtgtgat

SEQ ID NO: 15319 - DNA, 20 bp, Artificial Sequence
  Antisense compound
aacctgtagaaacggtgtga

SEQ ID NO: 15320 - DNA, 20 bp, Artificial Sequence
  Antisense compound
taacctgtagaaacggtgtg

SEQ ID NO: 15321 - DNA, 20 bp, Artificial Sequence
  Antisense compound
ctaacctgtagaaacggtgt

SEQ ID NO: 15322 - DNA, 20 bp, Artificial Sequence
  Antisense compound
gctaacctgtagaaacggtg

SEQ ID NO: 15323 - DNA, 20 bp, Artificial Sequence
  Antisense compound
agctaacctgtagaaacggt

SEQ ID NO: 15324 - DNA, 20 bp, Artificial Sequence
  Antisense compound
tagctaacctgtagaaacgg

SEQ ID NO: 15325 - DNA, 20 bp, Artificial Sequence
  Antisense compound
ttagctaacctgtagaaacg

SEQ ID NO: 15326 - DNA, 20 bp, Artificial Sequence
  Antisense compound
gttagctaacctgtagaaac

SEQ ID NO: 15327 - DNA, 20 bp, Artificial Sequence
  Antisense compound
cgttagctaacctgtagaaa

SEQ ID NO: 15328 - DNA, 20 bp, Artificial Sequence
  Antisense compound
tcgttagctaacctgtagaa

SEQ ID NO: 15329 - DNA, 20 bp, Artificial Sequence
  Antisense compound
ctcgttagctaacctgtaga

SEQ ID NO: 15330 - DNA, 20 bp, Artificial Sequence
  Antisense compound
actcgttagctaacctgtag

SEQ ID NO: 15331 - DNA, 20 bp, Artificial Sequence
  Antisense compound
cactcgttagctaacctgta

SEQ ID NO: 15332 - DNA, 20 bp, Artificial Sequence
  Antisense compound
acactcgttagctaacctgt

SEQ ID NO: 15333 - DNA, 20 bp, Artificial Sequence
  Antisense compound
cacactcgttagctaacctg

SEQ ID NO: 15334 - DNA, 20 bp, Artificial Sequence
  Antisense compound
gcacactcgttagctaacct

SEQ ID NO: 15335 - DNA, 20 bp, Artificial Sequence
  Antisense compound
cgcacactcgttagctaacc

SEQ ID NO: 15336 - DNA, 20 bp, Artificial Sequence
  Antisense compound
gcgcacactcgttagctaac

SEQ ID NO: 15337 - DNA, 20 bp, Artificial Sequence
  Antisense compound
tgcgcacactcgttagctaa

SEQ ID NO: 15338 - DNA, 20 bp, Artificial Sequence
  Antisense compound
ttgcgcacactcgttagcta

SEQ ID NO: 15339 - DNA, 20 bp, Artificial Sequence
  Antisense compound
cttgcgcacactcgttagct

SEQ ID NO: 15340 - DNA, 20 bp, Artificial Sequence
  Antisense compound
acttgcgcacactcgttagc

SEQ ID NO: 15341 - DNA, 20 bp, Artificial Sequence
  Antisense compound
tacttgcgcacactcgttag

SEQ ID NO: 15342 - DNA, 20 bp, Artificial Sequence
  Antisense compound
atacttgcgcacactcgtta

SEQ ID NO: 15343 - DNA, 20 bp, Artificial Sequence
  Antisense compound
aatacttgcgcacactcgtt

SEQ ID NO: 15344 - DNA, 20 bp, Artificial Sequence
  Antisense compound
taatacttgcgcacactcgt

SEQ ID NO: 15345 - DNA, 20 bp, Artificial Sequence
  Antisense compound
ttaatacttgcgcacactcg

SEQ ID NO: 15346 - DNA, 20 bp, Artificial Sequence
  Antisense compound
cttaatacttgcgcacactc

SEQ ID NO: 15347 - DNA, 20 bp, Artificial Sequence
  Antisense compound
acttaatacttgcgcacact

SEQ ID NO: 15348 - DNA, 20 bp, Artificial Sequence
  Antisense compound
cacttaatacttgcgcacac

SEQ ID NO: 15349 - DNA, 20 bp, Artificial Sequence
  Antisense compound
tcacttaatacttgcgcaca

SEQ ID NO: 15350 - DNA, 20 bp, Artificial Sequence
  Antisense compound
ctcacttaatacttgcgcac

SEQ ID NO: 15351 - DNA, 20 bp, Artificial Sequence
  Antisense compound
tctcacttaatacttgcgca

SEQ ID NO: 15352 - DNA, 20 bp, Artificial Sequence
  Antisense compound
atctcacttaatacttgcgc

SEQ ID NO: 15353 - DNA, 20 bp, Artificial Sequence
  Antisense compound
catctcacttaatacttgcg

SEQ ID NO: 15354 - DNA, 20 bp, Artificial Sequence
  Antisense compound
ccatctcacttaatacttgc

SEQ ID NO: 15355 - DNA, 20 bp, Artificial Sequence
  Antisense compound
accatctcacttaatacttg

SEQ ID NO: 15356 - DNA, 20 bp, Artificial Sequence
  Antisense compound
gaccatctcacttaatactt

SEQ ID NO: 15357 - DNA, 20 bp, Artificial Sequence
  Antisense compound
tgaccatctcacttaatact

SEQ ID NO: 15358 - DNA, 20 bp, Artificial Sequence
  Antisense compound
atgaccatctcacttaatac

SEQ ID NO: 15359 - DNA, 20 bp, Artificial Sequence
  Antisense compound
catgaccatctcacttaata

SEQ ID NO: 15360 - DNA, 20 bp, Artificial Sequence
  Antisense compound
acatgaccatctcacttaat

SEQ ID NO: 15361 - DNA, 20 bp, Artificial Sequence
  Antisense compound
cacatgaccatctcacttaa

SEQ ID NO: 15362 - DNA, 20 bp, Artificial Sequence
  Antisense compound
acacatgaccatctcactta

SEQ ID NO: 15363 - DNA, 20 bp, Artificial Sequence
  Antisense compound
cacacatgaccatctcactt

SEQ ID NO: 15364 - DNA, 20 bp, Artificial Sequence
  Antisense compound
ccacacatgaccatctcact

SEQ ID NO: 15365 - DNA, 20 bp, Artificial Sequence
  Antisense compound
gccacacatgaccatctcac

SEQ ID NO: 15366 - DNA, 20 bp, Artificial Sequence
  Antisense compound
cgccacacatgaccatctca

SEQ ID NO: 15367 - DNA, 20 bp, Artificial Sequence
  Antisense compound
ccgccacacatgaccatctc

SEQ ID NO: 15368 - DNA, 20 bp, Artificial Sequence
  Antisense compound
gccgccacacatgaccatct

SEQ ID NO: 15369 - DNA, 20 bp, Artificial Sequence
  Antisense compound
agccgccacacatgaccatc

SEQ ID NO: 15370 - DNA, 20 bp, Artificial Sequence
  Antisense compound
gagccgccacacatgaccat

SEQ ID NO: 15371 - DNA, 20 bp, Artificial Sequence
  Antisense compound
tgagccgccacacatgacca

SEQ ID NO: 15372 - DNA, 20 bp, Artificial Sequence
  Antisense compound
gtgagccgccacacatgacc

SEQ ID NO: 15373 - DNA, 20 bp, Artificial Sequence
  Antisense compound
agtgagccgccacacatgac

SEQ ID NO: 15374 - DNA, 20 bp, Artificial Sequence
  Antisense compound
tagtgagccgccacacatga

SEQ ID NO: 15375 - DNA, 20 bp, Artificial Sequence
  Antisense compound
atagtgagccgccacacatg

SEQ ID NO: 15376 - DNA, 20 bp, Artificial Sequence
  Antisense compound
tatagtgagccgccacacat

SEQ ID NO: 15377 - DNA, 20 bp, Artificial Sequence
  Antisense compound
atatagtgagccgccacaca

SEQ ID NO: 15378 - DNA, 20 bp, Artificial Sequence
  Antisense compound
catatagtgagccgccacac

SEQ ID NO: 15379 - DNA, 20 bp, Artificial Sequence
  Antisense compound
acatatagtgagccgccaca

SEQ ID NO: 15380 - DNA, 20 bp, Artificial Sequence
  Antisense compound
aacatatagtgagccgccac

SEQ ID NO: 15381 - DNA, 20 bp, Artificial Sequence
  Antisense compound
taacatatagtgagccgcca

SEQ ID NO: 15382 - DNA, 20 bp, Artificial Sequence
  Antisense compound
ttaacatatagtgagccgcc

SEQ ID NO: 15383 - DNA, 20 bp, Artificial Sequence
  Antisense compound
tttaacatatagtgagccgc

SEQ ID NO: 15384 - DNA, 20 bp, Artificial Sequence
  Antisense compound
gtttaacatatagtgagccg

SEQ ID NO: 15385 - DNA, 20 bp, Artificial Sequence
  Antisense compound
ggtttaacatatagtgagcc

SEQ ID NO: 15386 - DNA, 20 bp, Artificial Sequence
  Antisense compound
tggtttaacatatagtgagc

SEQ ID NO: 15387 - DNA, 20 bp, Artificial Sequence
  Antisense compound
ctggtttaacatatagtgag

SEQ ID NO: 15388 - DNA, 20 bp, Artificial Sequence
  Antisense compound
cctggtttaacatatagtga

SEQ ID NO: 15389 - DNA, 20 bp, Artificial Sequence
  Antisense compound
acctggtttaacatatagtg

SEQ ID NO: 15390 - DNA, 20 bp, Artificial Sequence
  Antisense compound
cacctggtttaacatatagt

SEQ ID NO: 15391 - DNA, 20 bp, Artificial Sequence
  Antisense compound
ccacctggtttaacatatag

SEQ ID NO: 15392 - DNA, 20 bp, Artificial Sequence
  Antisense compound
tccacctggtttaacatata

SEQ ID NO: 15393 - DNA, 20 bp, Artificial Sequence
  Antisense compound
ttccacctggtttaacatat

SEQ ID NO: 15394 - DNA, 20 bp, Artificial Sequence
  Antisense compound
gttccacctggtttaacata

SEQ ID NO: 15395 - DNA, 20 bp, Artificial Sequence
  Antisense compound
tgttccacctggtttaacat

SEQ ID NO: 15396 - DNA, 20 bp, Artificial Sequence
  Antisense compound
atgttccacctggtttaaca

SEQ ID NO: 15397 - DNA, 20 bp, Artificial Sequence
  Antisense compound
gatgttccacctggtttaac

SEQ ID NO: 15398 - DNA, 20 bp, Artificial Sequence
  Antisense compound
tgatgttccacctggtttaa

SEQ ID NO: 15399 - DNA, 20 bp, Artificial Sequence
  Antisense compound
atgatgttccacctggttta

SEQ ID NO: 15400 - DNA, 20 bp, Artificial Sequence
  Antisense compound
gatgatgttccacctggttt

SEQ ID NO: 15401 - DNA, 20 bp, Artificial Sequence
  Antisense compound
ggatgatgttccacctggtt

SEQ ID NO: 15402 - DNA, 20 bp, Artificial Sequence
  Antisense compound
cggatgatgttccacctggt

SEQ ID NO: 15403 - DNA, 20 bp, Artificial Sequence
  Antisense compound
ccggatgatgttccacctgg

SEQ ID NO: 15404 - DNA, 20 bp, Artificial Sequence
  Antisense compound
accggatgatgttccacctg

SEQ ID NO: 15405 - DNA, 20 bp, Artificial Sequence
  Antisense compound
caccggatgatgttccacct

SEQ ID NO: 15406 - DNA, 20 bp, Artificial Sequence
  Antisense compound
tcaccggatgatgttccacc

SEQ ID NO: 15407 - DNA, 20 bp, Artificial Sequence
  Antisense compound
atcaccggatgatgttccac

SEQ ID NO: 15408 - DNA, 20 bp, Artificial Sequence
  Antisense compound
catcaccggatgatgttcca

SEQ ID NO: 15409 - DNA, 20 bp, Artificial Sequence
  Antisense compound
gcatcaccggatgatgttcc

SEQ ID NO: 15410 - DNA, 20 bp, Artificial Sequence
  Antisense compound
agcatcaccggatgatgttc

SEQ ID NO: 15411 - DNA, 20 bp, Artificial Sequence
  Antisense compound
tagcatcaccggatgatgtt

SEQ ID NO: 15412 - DNA, 20 bp, Artificial Sequence
  Antisense compound
gtagcatcaccggatgatgt

SEQ ID NO: 15413 - DNA, 20 bp, Artificial Sequence
  Antisense compound
tgtagcatcaccggatgatg

SEQ ID NO: 15414 - DNA, 20 bp, Artificial Sequence
  Antisense compound
ttgtagcatcaccggatgat

SEQ ID NO: 15415 - DNA, 20 bp, Artificial Sequence
  Antisense compound
gttgtagcatcaccggatga

SEQ ID NO: 15416 - DNA, 20 bp, Artificial Sequence
  Antisense compound
agttgtagcatcaccggatg

SEQ ID NO: 15417 - DNA, 20 bp, Artificial Sequence
  Antisense compound
cagttgtagcatcaccggat

SEQ ID NO: 15418 - DNA, 20 bp, Artificial Sequence
  Antisense compound
gcagttgtagcatcaccgga

SEQ ID NO: 15419 - DNA, 20 bp, Artificial Sequence
  Antisense compound
agcagttgtagcatcaccgg

SEQ ID NO: 15420 - DNA, 20 bp, Artificial Sequence
  Antisense compound
aagcagttgtagcatcaccg

SEQ ID NO: 15421 - DNA, 20 bp, Artificial Sequence
  Antisense compound
taagcagttgtagcatcacc

SEQ ID NO: 15422 - DNA, 20 bp, Artificial Sequence
  Antisense compound
ataagcagttgtagcatcac

SEQ ID NO: 15423 - DNA, 20 bp, Artificial Sequence
  Antisense compound
cataagcagttgtagcatca

SEQ ID NO: 15424 - DNA, 20 bp, Artificial Sequence
  Antisense compound
gcataagcagttgtagcatc

SEQ ID NO: 15425 - DNA, 20 bp, Artificial Sequence
  Antisense compound
agcataagcagttgtagcat

SEQ ID NO: 15426 - DNA, 20 bp, Artificial Sequence
  Antisense compound
tagcataagcagttgtagca

SEQ ID NO: 15427 - DNA, 20 bp, Artificial Sequence
  Antisense compound
ttagcataagcagttgtagc

SEQ ID NO: 15428 - DNA, 20 bp, Artificial Sequence
  Antisense compound
attagcataagcagttgtag

SEQ ID NO: 15429 - DNA, 20 bp, Artificial Sequence
  Antisense compound
tattagcataagcagttgta

SEQ ID NO: 15430 - DNA, 20 bp, Artificial Sequence
  Antisense compound
ctattagcataagcagttgt

SEQ ID NO: 15431 - DNA, 20 bp, Artificial Sequence
  Antisense compound
actattagcataagcagttg

SEQ ID NO: 15432 - DNA, 20 bp, Artificial Sequence
  Antisense compound
cactattagcataagcagtt

SEQ ID NO: 15433 - DNA, 20 bp, Artificial Sequence
  Antisense compound
acactattagcataagcagt

SEQ ID NO: 15434 - DNA, 20 bp, Artificial Sequence
  Antisense compound
gacactattagcataagcag

SEQ ID NO: 15435 - DNA, 20 bp, Artificial Sequence
  Antisense compound
agacactattagcataagca

SEQ ID NO: 15436 - DNA, 20 bp, Artificial Sequence
  Antisense compound
aagacactattagcataagc

SEQ ID NO: 15437 - DNA, 20 bp, Artificial Sequence
  Antisense compound
aaagacactattagcataag

SEQ ID NO: 15438 - DNA, 20 bp, Artificial Sequence
  Antisense compound
taaagacactattagcataa

SEQ ID NO: 15439 - DNA, 20 bp, Artificial Sequence
  Antisense compound
ttaaagacactattagcata

SEQ ID NO: 15440 - DNA, 20 bp, Artificial Sequence
  Antisense compound
gttaaagacactattagcat

SEQ ID NO: 15441 - DNA, 20 bp, Artificial Sequence
  Antisense compound
tgttaaagacactattagca

SEQ ID NO: 15442 - DNA, 20 bp, Artificial Sequence
  Antisense compound
atgttaaagacactattagc

SEQ ID NO: 15443 - DNA, 20 bp, Artificial Sequence
  Antisense compound
aatgttaaagacactattag

SEQ ID NO: 15444 - DNA, 20 bp, Artificial Sequence
  Antisense compound
aaatgttaaagacactatta

SEQ ID NO: 15445 - DNA, 20 bp, Artificial Sequence
  Antisense compound
caaatgttaaagacactatt

SEQ ID NO: 15446 - DNA, 20 bp, Artificial Sequence
  Antisense compound
acaaatgttaaagacactat

SEQ ID NO: 15447 - DNA, 20 bp, Artificial Sequence
  Antisense compound
gacaaatgttaaagacacta

SEQ ID NO: 15448 - DNA, 20 bp, Artificial Sequence
  Antisense compound
tgacaaatgttaaagacact

SEQ ID NO: 15449 - DNA, 20 bp, Artificial Sequence
  Antisense compound
ttgacaaatgttaaagacac

SEQ ID NO: 15450 - DNA, 20 bp, Artificial Sequence
  Antisense compound
cttgacaaatgttaaagaca

SEQ ID NO: 15451 - DNA, 20 bp, Artificial Sequence
  Antisense compound
gcttgacaaatgttaaagac

SEQ ID NO: 15452 - DNA, 20 bp, Artificial Sequence
  Antisense compound
agcttgacaaatgttaaaga

SEQ ID NO: 15453 - DNA, 20 bp, Artificial Sequence
  Antisense compound
cagcttgacaaatgttaaag

SEQ ID NO: 15454 - DNA, 20 bp, Artificial Sequence
  Antisense compound
acagcttgacaaatgttaaa

SEQ ID NO: 15455 - DNA, 20 bp, Artificial Sequence
  Antisense compound
aacagcttgacaaatgttaa

SEQ ID NO: 15456 - DNA, 20 bp, Artificial Sequence
  Antisense compound
taacagcttgacaaatgtta

SEQ ID NO: 15457 - DNA, 20 bp, Artificial Sequence
  Antisense compound
gtaacagcttgacaaatgtt

SEQ ID NO: 15458 - DNA, 20 bp, Artificial Sequence
  Antisense compound
tgtaacagcttgacaaatgt

SEQ ID NO: 15459 - DNA, 20 bp, Artificial Sequence
  Antisense compound
ctgtaacagcttgacaaatg

SEQ ID NO: 15460 - DNA, 20 bp, Artificial Sequence
  Antisense compound
gctgtaacagcttgacaaat

SEQ ID NO: 15461 - DNA, 20 bp, Artificial Sequence
  Antisense compound
ggctgtaacagcttgacaaa

SEQ ID NO: 15462 - DNA, 20 bp, Artificial Sequence
  Antisense compound
tggctgtaacagcttgacaa

SEQ ID NO: 15463 - DNA, 20 bp, Artificial Sequence
  Antisense compound
ttggctgtaacagcttgaca

SEQ ID NO: 15464 - DNA, 20 bp, Artificial Sequence
  Antisense compound
attggctgtaacagcttgac

SEQ ID NO: 15465 - DNA, 20 bp, Artificial Sequence
  Antisense compound
cattggctgtaacagcttga

SEQ ID NO: 15466 - DNA, 20 bp, Artificial Sequence
  Antisense compound
acattggctgtaacagcttg

SEQ ID NO: 15467 - DNA, 20 bp, Artificial Sequence
  Antisense compound
tacattggctgtaacagctt

SEQ ID NO: 15468 - DNA, 20 bp, Artificial Sequence
  Antisense compound
ttacattggctgtaacagct

SEQ ID NO: 15469 - DNA, 20 bp, Artificial Sequence
  Antisense compound
tttacattggctgtaacagc

SEQ ID NO: 15470 - DNA, 20 bp, Artificial Sequence
  Antisense compound
atttacattggctgtaacag

SEQ ID NO: 15471 - DNA, 20 bp, Artificial Sequence
  Antisense compound
catttacattggctgtaaca

SEQ ID NO: 15472 - DNA, 20 bp, Artificial Sequence
  Antisense compound
gcatttacattggctgtaac

SEQ ID NO: 15473 - DNA, 20 bp, Artificial Sequence
  Antisense compound
tgcatttacattggctgtaa

SEQ ID NO: 15474 - DNA, 20 bp, Artificial Sequence
  Antisense compound
gtgcatttacattggctgta

SEQ ID NO: 15475 - DNA, 20 bp, Artificial Sequence
  Antisense compound
agtgcatttacattggctgt

SEQ ID NO: 15476 - DNA, 20 bp, Artificial Sequence
  Antisense compound
aagtgcatttacattggctg

SEQ ID NO: 15477 - DNA, 20 bp, Artificial Sequence
  Antisense compound
gaagtgcatttacattggct

SEQ ID NO: 15478 - DNA, 20 bp, Artificial Sequence
  Antisense compound
agaagtgcatttacattggc

SEQ ID NO: 15479 - DNA, 20 bp, Artificial Sequence
  Antisense compound
aagaagtgcatttacattgg

SEQ ID NO: 15480 - DNA, 20 bp, Artificial Sequence
  Antisense compound
aaagaagtgcatttacattg

SEQ ID NO: 15481 - DNA, 20 bp, Artificial Sequence
  Antisense compound
gaaagaagtgcatttacatt

SEQ ID NO: 15482 - DNA, 20 bp, Artificial Sequence
  Antisense compound
tgaaagaagtgcatttacat

SEQ ID NO: 15483 - DNA, 20 bp, Artificial Sequence
  Antisense compound
ttgaaagaagtgcatttaca

SEQ ID NO: 15484 - DNA, 20 bp, Artificial Sequence
  Antisense compound
gttgaaagaagtgcatttac

SEQ ID NO: 15485 - DNA, 20 bp, Artificial Sequence
  Antisense compound
agttgaaagaagtgcattta

SEQ ID NO: 15486 - DNA, 20 bp, Artificial Sequence
  Antisense compound
cagttgaaagaagtgcattt

SEQ ID NO: 15487 - DNA, 20 bp, Artificial Sequence
  Antisense compound
tcagttgaaagaagtgcatt

SEQ ID NO: 15488 - DNA, 20 bp, Artificial Sequence
  Antisense compound
atcagttgaaagaagtgcat

SEQ ID NO: 15489 - DNA, 20 bp, Artificial Sequence
  Antisense compound
catcagttgaaagaagtgca

SEQ ID NO: 15490 - DNA, 20 bp, Artificial Sequence
  Antisense compound
ccatcagttgaaagaagtgc

SEQ ID NO: 15491 - DNA, 20 bp, Artificial Sequence
  Antisense compound
accatcagttgaaagaagtg

SEQ ID NO: 15492 - DNA, 20 bp, Artificial Sequence
  Antisense compound
taccatcagttgaaagaagt

SEQ ID NO: 15493 - DNA, 20 bp, Artificial Sequence
  Antisense compound
ttaccatcagttgaaagaag

SEQ ID NO: 15494 - DNA, 20 bp, Artificial Sequence
  Antisense compound
attaccatcagttgaaagaa

SEQ ID NO: 15495 - DNA, 20 bp, Artificial Sequence
  Antisense compound
tattaccatcagttgaaaga

SEQ ID NO: 15496 - DNA, 20 bp, Artificial Sequence
  Antisense compound
ttattaccatcagttgaaag

SEQ ID NO: 15497 - DNA, 20 bp, Artificial Sequence
  Antisense compound
cttattaccatcagttgaaa

SEQ ID NO: 15498 - DNA, 20 bp, Artificial Sequence
  Antisense compound
tcttattaccatcagttgaa

SEQ ID NO: 15499 - DNA, 20 bp, Artificial Sequence
  Antisense compound
atcttattaccatcagttga

SEQ ID NO: 15500 - DNA, 20 bp, Artificial Sequence
  Antisense compound
tatcttattaccatcagttg

SEQ ID NO: 15501 - DNA, 20 bp, Artificial Sequence
  Antisense compound
ctatcttattaccatcagtt

SEQ ID NO: 15502 - DNA, 20 bp, Artificial Sequence
  Antisense compound
gctatcttattaccatcagt

SEQ ID NO: 15503 - DNA, 20 bp, Artificial Sequence
  Antisense compound
agctatcttattaccatcag

SEQ ID NO: 15504 - DNA, 20 bp, Artificial Sequence
  Antisense compound
cagctatcttattaccatca

SEQ ID NO: 15505 - DNA, 20 bp, Artificial Sequence
  Antisense compound
tcagctatcttattaccatc

SEQ ID NO: 15506 - DNA, 20 bp, Artificial Sequence
  Antisense compound
gtcagctatcttattaccat

SEQ ID NO: 15507 - DNA, 20 bp, Artificial Sequence
  Antisense compound
tgtcagctatcttattacca

SEQ ID NO: 15508 - DNA, 20 bp, Artificial Sequence
  Antisense compound
ttgtcagctatcttattacc

SEQ ID NO: 15509 - DNA, 20 bp, Artificial Sequence
  Antisense compound
cttgtcagctatcttattac

SEQ ID NO: 15510 - DNA, 20 bp, Artificial Sequence
  Antisense compound
acttgtcagctatcttatta

SEQ ID NO: 15511 - DNA, 20 bp, Artificial Sequence
  Antisense compound
tacttgtcagctatcttatt

SEQ ID NO: 15512 - DNA, 20 bp, Artificial Sequence
  Antisense compound
atacttgtcagctatcttat

SEQ ID NO: 15513 - DNA, 20 bp, Artificial Sequence
  Antisense compound
catacttgtcagctatctta

SEQ ID NO: 15514 - DNA, 20 bp, Artificial Sequence
  Antisense compound
acatacttgtcagctatctt

SEQ ID NO: 15515 - DNA, 20 bp, Artificial Sequence
  Antisense compound
gacatacttgtcagctatct

SEQ ID NO: 15516 - DNA, 20 bp, Artificial Sequence
  Antisense compound
ggacatacttgtcagctatc

SEQ ID NO: 15517 - DNA, 20 bp, Artificial Sequence
  Antisense compound
cggacatacttgtcagctat

SEQ ID NO: 15518 - DNA, 20 bp, Artificial Sequence
  Antisense compound
gcggacatacttgtcagcta

SEQ ID NO: 15519 - DNA, 20 bp, Artificial Sequence
  Antisense compound
tgcggacatacttgtcagct

SEQ ID NO: 15520 - DNA, 20 bp, Artificial Sequence
  Antisense compound
ttgcggacatacttgtcagc

SEQ ID NO: 15521 - DNA, 20 bp, Artificial Sequence
  Antisense compound
attgcggacatacttgtcag

SEQ ID NO: 15522 - DNA, 20 bp, Artificial Sequence
  Antisense compound
gattgcggacatacttgtca

SEQ ID NO: 15523 - DNA, 20 bp, Artificial Sequence
  Antisense compound
agattgcggacatacttgtc

SEQ ID NO: 15524 - DNA, 20 bp, Artificial Sequence
  Antisense compound
tagattgcggacatacttgt

SEQ ID NO: 15525 - DNA, 20 bp, Artificial Sequence
  Antisense compound
gtagattgcggacatacttg

SEQ ID NO: 15526 - DNA, 20 bp, Artificial Sequence
  Antisense compound
tgtagattgcggacatactt

SEQ ID NO: 15527 - DNA, 20 bp, Artificial Sequence
  Antisense compound
ttgtagattgcggacatact

SEQ ID NO: 15528 - DNA, 20 bp, Artificial Sequence
  Antisense compound
gttgtagattgcggacatac

SEQ ID NO: 15529 - DNA, 20 bp, Artificial Sequence
  Antisense compound
tgttgtagattgcggacata

SEQ ID NO: 15530 - DNA, 20 bp, Artificial Sequence
  Antisense compound
gtgttgtagattgcggacat

SEQ ID NO: 15531 - DNA, 20 bp, Artificial Sequence
  Antisense compound
tgtgttgtagattgcggaca

SEQ ID NO: 15532 - DNA, 20 bp, Artificial Sequence
  Antisense compound
ctgtgttgtagattgcggac

SEQ ID NO: 15533 - DNA, 20 bp, Artificial Sequence
  Antisense compound
cctgtgttgtagattgcgga

SEQ ID NO: 15534 - DNA, 20 bp, Artificial Sequence
  Antisense compound
gcctgtgttgtagattgcgg

SEQ ID NO: 15535 - DNA, 20 bp, Artificial Sequence
  Antisense compound
agcctgtgttgtagattgcg

SEQ ID NO: 15536 - DNA, 20 bp, Artificial Sequence
  Antisense compound
gagcctgtgttgtagattgc

SEQ ID NO: 15537 - DNA, 20 bp, Artificial Sequence
  Antisense compound
agagcctgtgttgtagattg

SEQ ID NO: 15538 - DNA, 20 bp, Artificial Sequence
  Antisense compound
tagagcctgtgttgtagatt

SEQ ID NO: 15539 - DNA, 20 bp, Artificial Sequence
  Antisense compound
atagagcctgtgttgtagat

SEQ ID NO: 15540 - DNA, 20 bp, Artificial Sequence
  Antisense compound
catagagcctgtgttgtaga

SEQ ID NO: 15541 - DNA, 20 bp, Artificial Sequence
  Antisense compound
tcatagagcctgtgttgtag

SEQ ID NO: 15542 - DNA, 20 bp, Artificial Sequence
  Antisense compound
ctcatagagcctgtgttgta

SEQ ID NO: 15543 - DNA, 20 bp, Artificial Sequence
  Antisense compound
actcatagagcctgtgttgt

SEQ ID NO: 15544 - DNA, 20 bp, Artificial Sequence
  Antisense compound
cactcatagagcctgtgttg

SEQ ID NO: 15545 - DNA, 20 bp, Artificial Sequence
  Antisense compound
acactcatagagcctgtgtt

SEQ ID NO: 15546 - DNA, 20 bp, Artificial Sequence
  Antisense compound
gacactcatagagcctgtgt

SEQ ID NO: 15547 - DNA, 20 bp, Artificial Sequence
  Antisense compound
agacactcatagagcctgtg

SEQ ID NO: 15548 - DNA, 20 bp, Artificial Sequence
  Antisense compound
gagacactcatagagcctgt

SEQ ID NO: 15549 - DNA, 20 bp, Artificial Sequence
  Antisense compound
agagacactcatagagcctg

SEQ ID NO: 15550 - DNA, 20 bp, Artificial Sequence
  Antisense compound
tagagacactcatagagcct

SEQ ID NO: 15551 - DNA, 20 bp, Artificial Sequence
  Antisense compound
atagagacactcatagagcc

SEQ ID NO: 15552 - DNA, 20 bp, Artificial Sequence
  Antisense compound
tatagagacactcatagagc

SEQ ID NO: 15553 - DNA, 20 bp, Artificial Sequence
  Antisense compound
ctatagagacactcatagag

SEQ ID NO: 15554 - DNA, 20 bp, Artificial Sequence
  Antisense compound
tctatagagacactcataga

SEQ ID NO: 15555 - DNA, 20 bp, Artificial Sequence
  Antisense compound
ttctatagagacactcatag

SEQ ID NO: 15556 - DNA, 20 bp, Artificial Sequence
  Antisense compound
tttctatagagacactcata

SEQ ID NO: 15557 - DNA, 20 bp, Artificial Sequence
  Antisense compound
atttctatagagacactcat

SEQ ID NO: 15558 - DNA, 20 bp, Artificial Sequence
  Antisense compound
tatttctatagagacactca

SEQ ID NO: 15559 - DNA, 20 bp, Artificial Sequence
  Antisense compound
ctatttctatagagacactc

SEQ ID NO: 15560 - DNA, 20 bp, Artificial Sequence
  Antisense compound
cctatttctatagagacact

SEQ ID NO: 15561 - DNA, 20 bp, Artificial Sequence
  Antisense compound
ccctatttctatagagacac

SEQ ID NO: 15562 - DNA, 20 bp, Artificial Sequence
  Antisense compound
tccctatttctatagagaca

SEQ ID NO: 15563 - DNA, 20 bp, Artificial Sequence
  Antisense compound
atccctatttctatagagac

SEQ ID NO: 15564 - DNA, 20 bp, Artificial Sequence
  Antisense compound
catccctatttctatagaga

SEQ ID NO: 15565 - DNA, 20 bp, Artificial Sequence
  Antisense compound
acatccctatttctatagag

SEQ ID NO: 15566 - DNA, 20 bp, Artificial Sequence
  Antisense compound
aacatccctatttctataga

SEQ ID NO: 15567 - DNA, 20 bp, Artificial Sequence
  Antisense compound
caacatccctatttctatag

SEQ ID NO: 15568 - DNA, 20 bp, Artificial Sequence
  Antisense compound
tcaacatccctatttctata

SEQ ID NO: 15569 - DNA, 20 bp, Artificial Sequence
  Antisense compound
atcaacatccctatttctat

SEQ ID NO: 15570 - DNA, 20 bp, Artificial Sequence
  Antisense compound
gatcaacatccctatttcta

SEQ ID NO: 15571 - DNA, 20 bp, Artificial Sequence
  Antisense compound
tgatcaacatccctatttct

SEQ ID NO: 15572 - DNA, 20 bp, Artificial Sequence
  Antisense compound
atgatcaacatccctatttc

SEQ ID NO: 15573 - DNA, 20 bp, Artificial Sequence
  Antisense compound
catgatcaacatccctattt

SEQ ID NO: 15574 - DNA, 20 bp, Artificial Sequence
  Antisense compound
tcatgatcaacatccctatt

SEQ ID NO: 15575 - DNA, 20 bp, Artificial Sequence
  Antisense compound
ttcatgatcaacatccctat

SEQ ID NO: 15576 - DNA, 20 bp, Artificial Sequence
  Antisense compound
attcatgatcaacatcccta

SEQ ID NO: 15577 - DNA, 20 bp, Artificial Sequence
  Antisense compound
aattcatgatcaacatccct

SEQ ID NO: 15578 - DNA, 20 bp, Artificial Sequence
  Antisense compound
gaattcatgatcaacatccc

SEQ ID NO: 15579 - DNA, 20 bp, Artificial Sequence
  Antisense compound
cgaattcatgatcaacatcc

SEQ ID NO: 15580 - DNA, 20 bp, Artificial Sequence
  Antisense compound
acgaattcatgatcaacatc

SEQ ID NO: 15581 - DNA, 20 bp, Artificial Sequence
  Antisense compound
cacgaattcatgatcaacat

SEQ ID NO: 15582 - DNA, 20 bp, Artificial Sequence
  Antisense compound
ccacgaattcatgatcaaca

SEQ ID NO: 15583 - DNA, 20 bp, Artificial Sequence
  Antisense compound
tccacgaattcatgatcaac

SEQ ID NO: 15584 - DNA, 20 bp, Artificial Sequence
  Antisense compound
atccacgaattcatgatcaa

SEQ ID NO: 15585 - DNA, 20 bp, Artificial Sequence
  Antisense compound
catccacgaattcatgatca

SEQ ID NO: 15586 - DNA, 20 bp, Artificial Sequence
  Antisense compound
tcatccacgaattcatgatc

SEQ ID NO: 15587 - DNA, 20 bp, Artificial Sequence
  Antisense compound
ctcatccacgaattcatgat

SEQ ID NO: 15588 - DNA, 20 bp, Artificial Sequence
  Antisense compound
actcatccacgaattcatga

SEQ ID NO: 15589 - DNA, 20 bp, Artificial Sequence
  Antisense compound
aactcatccacgaattcatg

SEQ ID NO: 15590 - DNA, 20 bp, Artificial Sequence
  Antisense compound
aaactcatccacgaattcat

SEQ ID NO: 15591 - DNA, 20 bp, Artificial Sequence
  Antisense compound
aaaactcatccacgaattca

SEQ ID NO: 15592 - DNA, 20 bp, Artificial Sequence
  Antisense compound
taaaactcatccacgaattc

SEQ ID NO: 15593 - DNA, 20 bp, Artificial Sequence
  Antisense compound
gtaaaactcatccacgaatt

SEQ ID NO: 15594 - DNA, 20 bp, Artificial Sequence
  Antisense compound
cgtaaaactcatccacgaat

SEQ ID NO: 15595 - DNA, 20 bp, Artificial Sequence
  Antisense compound
gcgtaaaactcatccacgaa

SEQ ID NO: 15596 - DNA, 20 bp, Artificial Sequence
  Antisense compound
agcgtaaaactcatccacga

SEQ ID NO: 15597 - DNA, 20 bp, Artificial Sequence
  Antisense compound
aagcgtaaaactcatccacg

SEQ ID NO: 15598 - DNA, 20 bp, Artificial Sequence
  Antisense compound
taagcgtaaaactcatccac

SEQ ID NO: 15599 - DNA, 20 bp, Artificial Sequence
  Antisense compound
gtaagcgtaaaactcatcca

SEQ ID NO: 15600 - DNA, 20 bp, Artificial Sequence
  Antisense compound
ggtaagcgtaaaactcatcc

SEQ ID NO: 15601 - DNA, 20 bp, Artificial Sequence
  Antisense compound
aggtaagcgtaaaactcatc

SEQ ID NO: 15602 - DNA, 20 bp, Artificial Sequence
  Antisense compound
caggtaagcgtaaaactcat

SEQ ID NO: 15603 - DNA, 20 bp, Artificial Sequence
  Antisense compound
gcaggtaagcgtaaaactca

SEQ ID NO: 15604 - DNA, 20 bp, Artificial Sequence
  Antisense compound
cgcaggtaagcgtaaaactc

SEQ ID NO: 15605 - DNA, 20 bp, Artificial Sequence
  Antisense compound
acgcaggtaagcgtaaaact

SEQ ID NO: 15606 - DNA, 20 bp, Artificial Sequence
  Antisense compound
tacgcaggtaagcgtaaaac

SEQ ID NO: 15607 - DNA, 20 bp, Artificial Sequence
  Antisense compound
ttacgcaggtaagcgtaaaa

SEQ ID NO: 15608 - DNA, 20 bp, Artificial Sequence
  Antisense compound
tttacgcaggtaagcgtaaa

SEQ ID NO: 15609 - DNA, 20 bp, Artificial Sequence
  Antisense compound
gtttacgcaggtaagcgtaa

SEQ ID NO: 15610 - DNA, 20 bp, Artificial Sequence
  Antisense compound
tgtttacgcaggtaagcgta

SEQ ID NO: 15611 - DNA, 20 bp, Artificial Sequence
  Antisense compound
atgtttacgcaggtaagcgt

SEQ ID NO: 15612 - DNA, 20 bp, Artificial Sequence
  Antisense compound
aatgtttacgcaggtaagcg

SEQ ID NO: 15613 - DNA, 20 bp, Artificial Sequence
  Antisense compound
aaatgtttacgcaggtaagc

SEQ ID NO: 15614 - DNA, 20 bp, Artificial Sequence
  Antisense compound
gaaatgtttacgcaggtaag

SEQ ID NO: 15615 - DNA, 20 bp, Artificial Sequence
  Antisense compound
agaaatgtttacgcaggtaa

SEQ ID NO: 15616 - DNA, 20 bp, Artificial Sequence
  Antisense compound
gagaaatgtttacgcaggta

SEQ ID NO: 15617 - DNA, 20 bp, Artificial Sequence
  Antisense compound
ggagaaatgtttacgcaggt

SEQ ID NO: 15618 - DNA, 20 bp, Artificial Sequence
  Antisense compound
tggagaaatgtttacgcagg

SEQ ID NO: 15619 - DNA, 20 bp, Artificial Sequence
  Antisense compound
atggagaaatgtttacgcag

SEQ ID NO: 15620 - DNA, 20 bp, Artificial Sequence
  Antisense compound
catggagaaatgtttacgca

SEQ ID NO: 15621 - DNA, 20 bp, Artificial Sequence
  Antisense compound
tcatggagaaatgtttacgc

SEQ ID NO: 15622 - DNA, 20 bp, Artificial Sequence
  Antisense compound
atcatggagaaatgtttacg

SEQ ID NO: 15623 - DNA, 20 bp, Artificial Sequence
  Antisense compound
catcatggagaaatgtttac

SEQ ID NO: 15624 - DNA, 20 bp, Artificial Sequence
  Antisense compound
tcatcatggagaaatgttta

SEQ ID NO: 15625 - DNA, 20 bp, Artificial Sequence
  Antisense compound
atcatcatggagaaatgttt

SEQ ID NO: 15626 - DNA, 20 bp, Artificial Sequence
  Antisense compound
aatcatcatggagaaatgtt

SEQ ID NO: 15627 - DNA, 20 bp, Artificial Sequence
  Antisense compound
gaatcatcatggagaaatgt

SEQ ID NO: 15628 - DNA, 20 bp, Artificial Sequence
  Antisense compound
agaatcatcatggagaaatg

SEQ ID NO: 15629 - DNA, 20 bp, Artificial Sequence
  Antisense compound
aagaatcatcatggagaaat

SEQ ID NO: 15630 - DNA, 20 bp, Artificial Sequence
  Antisense compound
aaagaatcatcatggagaaa

SEQ ID NO: 15631 - DNA, 20 bp, Artificial Sequence
  Antisense compound
gaaagaatcatcatggagaa

SEQ ID NO: 15632 - DNA, 20 bp, Artificial Sequence
  Antisense compound
agaaagaatcatcatggaga

SEQ ID NO: 15633 - DNA, 20 bp, Artificial Sequence
  Antisense compound
cagaaagaatcatcatggag

SEQ ID NO: 15634 - DNA, 20 bp, Artificial Sequence
  Antisense compound
tcagaaagaatcatcatgga

SEQ ID NO: 15635 - DNA, 20 bp, Artificial Sequence
  Antisense compound
atcagaaagaatcatcatgg

SEQ ID NO: 15636 - DNA, 20 bp, Artificial Sequence
  Antisense compound
catcagaaagaatcatcatg

SEQ ID NO: 15637 - DNA, 20 bp, Artificial Sequence
  Antisense compound
tcatcagaaagaatcatcat

SEQ ID NO: 15638 - DNA, 20 bp, Artificial Sequence
  Antisense compound
atcatcagaaagaatcatca

SEQ ID NO: 15639 - DNA, 20 bp, Artificial Sequence
  Antisense compound
catcatcagaaagaatcatc

SEQ ID NO: 15640 - DNA, 20 bp, Artificial Sequence
  Antisense compound
gcatcatcagaaagaatcat

SEQ ID NO: 15641 - DNA, 20 bp, Artificial Sequence
  Antisense compound
ggcatcatcagaaagaatca

SEQ ID NO: 15642 - DNA, 20 bp, Artificial Sequence
  Antisense compound
cggcatcatcagaaagaatc

SEQ ID NO: 15643 - DNA, 20 bp, Artificial Sequence
  Antisense compound
acggcatcatcagaaagaat

SEQ ID NO: 15644 - DNA, 20 bp, Artificial Sequence
  Antisense compound
aacggcatcatcagaaagaa

SEQ ID NO: 15645 - DNA, 20 bp, Artificial Sequence
  Antisense compound
caacggcatcatcagaaaga

SEQ ID NO: 15646 - DNA, 20 bp, Artificial Sequence
  Antisense compound
acaacggcatcatcagaaag

SEQ ID NO: 15647 - DNA, 20 bp, Artificial Sequence
  Antisense compound
cacaacggcatcatcagaaa

SEQ ID NO: 15648 - DNA, 20 bp, Artificial Sequence
  Antisense compound
acacaacggcatcatcagaa

SEQ ID NO: 15649 - DNA, 20 bp, Artificial Sequence
  Antisense compound
cacacaacggcatcatcaga

SEQ ID NO: 15650 - DNA, 20 bp, Artificial Sequence
  Antisense compound
gcacacaacggcatcatcag

SEQ ID NO: 15651 - DNA, 20 bp, Artificial Sequence
  Antisense compound
agcacacaacggcatcatca

SEQ ID NO: 15652 - DNA, 20 bp, Artificial Sequence
  Antisense compound
tagcacacaacggcatcatc

SEQ ID NO: 15653 - DNA, 20 bp, Artificial Sequence
  Antisense compound
atagcacacaacggcatcat

SEQ ID NO: 15654 - DNA, 20 bp, Artificial Sequence
  Antisense compound
tatagcacacaacggcatca

SEQ ID NO: 15655 - DNA, 20 bp, Artificial Sequence
  Antisense compound
ttatagcacacaacggcatc

SEQ ID NO: 15656 - DNA, 20 bp, Artificial Sequence
  Antisense compound
gttatagcacacaacggcat

SEQ ID NO: 15657 - DNA, 20 bp, Artificial Sequence
  Antisense compound
tgttatagcacacaacggca

SEQ ID NO: 15658 - DNA, 20 bp, Artificial Sequence
  Antisense compound
ctgttatagcacacaacggc

SEQ ID NO: 15659 - DNA, 20 bp, Artificial Sequence
  Antisense compound
actgttatagcacacaacgg

SEQ ID NO: 15660 - DNA, 20 bp, Artificial Sequence
  Antisense compound
tactgttatagcacacaacg

SEQ ID NO: 15661 - DNA, 20 bp, Artificial Sequence
  Antisense compound
ttactgttatagcacacaac

SEQ ID NO: 15662 - DNA, 20 bp, Artificial Sequence
  Antisense compound
gttactgttatagcacacaa

SEQ ID NO: 15663 - DNA, 20 bp, Artificial Sequence
  Antisense compound
agttactgttatagcacaca

SEQ ID NO: 15664 - DNA, 20 bp, Artificial Sequence
  Antisense compound
tagttactgttatagcacac

SEQ ID NO: 15665 - DNA, 20 bp, Artificial Sequence
  Antisense compound
atagttactgttatagcaca

SEQ ID NO: 15666 - DNA, 20 bp, Artificial Sequence
  Antisense compound
catagttactgttatagcac

SEQ ID NO: 15667 - DNA, 20 bp, Artificial Sequence
  Antisense compound
gcatagttactgttatagca

SEQ ID NO: 15668 - DNA, 20 bp, Artificial Sequence
  Antisense compound
cgcatagttactgttatagc

SEQ ID NO: 15669 - DNA, 20 bp, Artificial Sequence
  Antisense compound
ccgcatagttactgttatag

SEQ ID NO: 15670 - DNA, 20 bp, Artificial Sequence
  Antisense compound
gccgcatagttactgttata

SEQ ID NO: 15671 - DNA, 20 bp, Artificial Sequence
  Antisense compound
agccgcatagttactgttat

SEQ ID NO: 15672 - DNA, 20 bp, Artificial Sequence
  Antisense compound
gagccgcatagttactgtta

SEQ ID NO: 15673 - DNA, 20 bp, Artificial Sequence
  Antisense compound
tgagccgcatagttactgtt

SEQ ID NO: 15674 - DNA, 20 bp, Artificial Sequence
  Antisense compound
ttgagccgcatagttactgt

SEQ ID NO: 15675 - DNA, 20 bp, Artificial Sequence
  Antisense compound
cttgagccgcatagttactg

SEQ ID NO: 15676 - DNA, 20 bp, Artificial Sequence
  Antisense compound
ccttgagccgcatagttact

SEQ ID NO: 15677 - DNA, 20 bp, Artificial Sequence
  Antisense compound
accttgagccgcatagttac

SEQ ID NO: 15678 - DNA, 20 bp, Artificial Sequence
  Antisense compound
aaccttgagccgcatagtta

SEQ ID NO: 15679 - DNA, 20 bp, Artificial Sequence
  Antisense compound
aaaccttgagccgcatagtt

SEQ ID NO: 15680 - DNA, 20 bp, Artificial Sequence
  Antisense compound
taaaccttgagccgcatagt

SEQ ID NO: 15681 - DNA, 20 bp, Artificial Sequence
  Antisense compound
ctaaaccttgagccgcatag

SEQ ID NO: 15682 - DNA, 20 bp, Artificial Sequence
  Antisense compound
actaaaccttgagccgcata

SEQ ID NO: 15683 - DNA, 20 bp, Artificial Sequence
  Antisense compound
tactaaaccttgagccgcat

SEQ ID NO: 15684 - DNA, 20 bp, Artificial Sequence
  Antisense compound
ctactaaaccttgagccgca

SEQ ID NO: 15685 - DNA, 20 bp, Artificial Sequence
  Antisense compound
gctactaaaccttgagccgc

SEQ ID NO: 15686 - DNA, 20 bp, Artificial Sequence
  Antisense compound
agctactaaaccttgagccg

SEQ ID NO: 15687 - DNA, 20 bp, Artificial Sequence
  Antisense compound
tagctactaaaccttgagcc

SEQ ID NO: 15688 - DNA, 20 bp, Artificial Sequence
  Antisense compound
ctagctactaaaccttgagc

SEQ ID NO: 15689 - DNA, 20 bp, Artificial Sequence
  Antisense compound
gctagctactaaaccttgag

SEQ ID NO: 15690 - DNA, 20 bp, Artificial Sequence
  Antisense compound
tgctagctactaaaccttga

SEQ ID NO: 15691 - DNA, 20 bp, Artificial Sequence
  Antisense compound
atgctagctactaaaccttg

SEQ ID NO: 15692 - DNA, 20 bp, Artificial Sequence
  Antisense compound
aatgctagctactaaacctt

SEQ ID NO: 15693 - DNA, 20 bp, Artificial Sequence
  Antisense compound
taatgctagctactaaacct

SEQ ID NO: 15694 - DNA, 20 bp, Artificial Sequence
  Antisense compound
ttaatgctagctactaaacc

SEQ ID NO: 15695 - DNA, 20 bp, Artificial Sequence
  Antisense compound
cttaatgctagctactaaac

SEQ ID NO: 15696 - DNA, 20 bp, Artificial Sequence
  Antisense compound
tcttaatgctagctactaaa

SEQ ID NO: 15697 - DNA, 20 bp, Artificial Sequence
  Antisense compound
ttcttaatgctagctactaa

SEQ ID NO: 15698 - DNA, 20 bp, Artificial Sequence
  Antisense compound
gttcttaatgctagctacta

SEQ ID NO: 15699 - DNA, 20 bp, Artificial Sequence
  Antisense compound
agttcttaatgctagctact

SEQ ID NO: 15700 - DNA, 20 bp, Artificial Sequence
  Antisense compound
aagttcttaatgctagctac

SEQ ID NO: 15701 - DNA, 20 bp, Artificial Sequence
  Antisense compound
aaagttcttaatgctagcta

SEQ ID NO: 15702 - DNA, 20 bp, Artificial Sequence
  Antisense compound
taaagttcttaatgctagct

SEQ ID NO: 15703 - DNA, 20 bp, Artificial Sequence
  Antisense compound
ttaaagttcttaatgctagc

SEQ ID NO: 15704 - DNA, 20 bp, Artificial Sequence
  Antisense compound
cttaaagttcttaatgctag

SEQ ID NO: 15705 - DNA, 20 bp, Artificial Sequence
  Antisense compound
ccttaaagttcttaatgcta

SEQ ID NO: 15706 - DNA, 20 bp, Artificial Sequence
  Antisense compound
gccttaaagttcttaatgct

SEQ ID NO: 15707 - DNA, 20 bp, Artificial Sequence
  Antisense compound
tgccttaaagttcttaatgc

SEQ ID NO: 15708 - DNA, 20 bp, Artificial Sequence
  Antisense compound
ctgccttaaagttcttaatg

SEQ ID NO: 15709 - DNA, 20 bp, Artificial Sequence
  Antisense compound
actgccttaaagttcttaat

SEQ ID NO: 15710 - DNA, 20 bp, Artificial Sequence
  Antisense compound
aactgccttaaagttcttaa

SEQ ID NO: 15711 - DNA, 20 bp, Artificial Sequence
  Antisense compound
gaactgccttaaagttctta

SEQ ID NO: 15712 - DNA, 20 bp, Artificial Sequence
  Antisense compound
agaactgccttaaagttctt

SEQ ID NO: 15713 - DNA, 20 bp, Artificial Sequence
  Antisense compound
aagaactgccttaaagttct

SEQ ID NO: 15714 - DNA, 20 bp, Artificial Sequence
  Antisense compound
aaagaactgccttaaagttc

SEQ ID NO: 15715 - DNA, 20 bp, Artificial Sequence
  Antisense compound
taaagaactgccttaaagtt

SEQ ID NO: 15716 - DNA, 20 bp, Artificial Sequence
  Antisense compound
ataaagaactgccttaaagt

SEQ ID NO: 15717 - DNA, 20 bp, Artificial Sequence
  Antisense compound
aataaagaactgccttaaag

SEQ ID NO: 15718 - DNA, 20 bp, Artificial Sequence
  Antisense compound
taataaagaactgccttaaa

SEQ ID NO: 15719 - DNA, 20 bp, Artificial Sequence
  Antisense compound
ataataaagaactgccttaa

SEQ ID NO: 15720 - DNA, 20 bp, Artificial Sequence
  Antisense compound
gataataaagaactgcctta

SEQ ID NO: 15721 - DNA, 20 bp, Artificial Sequence
  Antisense compound
tgataataaagaactgcctt

SEQ ID NO: 15722 - DNA, 20 bp, Artificial Sequence
  Antisense compound
ttgataataaagaactgcct

SEQ ID NO: 15723 - DNA, 20 bp, Artificial Sequence
  Antisense compound
tttgataataaagaactgcc

SEQ ID NO: 15724 - DNA, 20 bp, Artificial Sequence
  Antisense compound
ttttgataataaagaactgc

SEQ ID NO: 15725 - DNA, 20 bp, Artificial Sequence
  Antisense compound
attttgataataaagaactg

SEQ ID NO: 15726 - DNA, 20 bp, Artificial Sequence
  Antisense compound
tattttgataataaagaact

SEQ ID NO: 15727 - DNA, 20 bp, Artificial Sequence
  Antisense compound
ttattttgataataaagaac

SEQ ID NO: 15728 - DNA, 20 bp, Artificial Sequence
  Antisense compound
attattttgataataaagaa

SEQ ID NO: 15729 - DNA, 20 bp, Artificial Sequence
  Antisense compound
cattattttgataataaaga

SEQ ID NO: 15730 - DNA, 20 bp, Artificial Sequence
  Antisense compound
acattattttgataataaag

SEQ ID NO: 15731 - DNA, 20 bp, Artificial Sequence
  Antisense compound
cacattattttgataataaa

SEQ ID NO: 15732 - DNA, 20 bp, Artificial Sequence
  Antisense compound
acacattattttgataataa

SEQ ID NO: 15733 - DNA, 20 bp, Artificial Sequence
  Antisense compound
aacacattattttgataata

SEQ ID NO: 15734 - DNA, 20 bp, Artificial Sequence
  Antisense compound
gaacacattattttgataat

SEQ ID NO: 15735 - DNA, 20 bp, Artificial Sequence
  Antisense compound
tgaacacattattttgataa

SEQ ID NO: 15736 - DNA, 20 bp, Artificial Sequence
  Antisense compound
atgaacacattattttgata

SEQ ID NO: 15737 - DNA, 20 bp, Artificial Sequence
  Antisense compound
catgaacacattattttgat

SEQ ID NO: 15738 - DNA, 20 bp, Artificial Sequence
  Antisense compound
acatgaacacattattttga

SEQ ID NO: 15739 - DNA, 20 bp, Artificial Sequence
  Antisense compound
gacatgaacacattattttg

SEQ ID NO: 15740 - DNA, 20 bp, Artificial Sequence
  Antisense compound
agacatgaacacattatttt

SEQ ID NO: 15741 - DNA, 20 bp, Artificial Sequence
  Antisense compound
cagacatgaacacattattt

SEQ ID NO: 15742 - DNA, 20 bp, Artificial Sequence
  Antisense compound
tcagacatgaacacattatt

SEQ ID NO: 15743 - DNA, 20 bp, Artificial Sequence
  Antisense compound
ctcagacatgaacacattat

SEQ ID NO: 15744 - DNA, 20 bp, Artificial Sequence
  Antisense compound
cctcagacatgaacacatta

SEQ ID NO: 15745 - DNA, 20 bp, Artificial Sequence
  Antisense compound
gcctcagacatgaacacatt

SEQ ID NO: 15746 - DNA, 20 bp, Artificial Sequence
  Antisense compound
tgcctcagacatgaacacat

SEQ ID NO: 15747 - DNA, 20 bp, Artificial Sequence
  Antisense compound
ttgcctcagacatgaacaca

SEQ ID NO: 15748 - DNA, 20 bp, Artificial Sequence
  Antisense compound
tttgcctcagacatgaacac

SEQ ID NO: 15749 - DNA, 20 bp, Artificial Sequence
  Antisense compound
ttttgcctcagacatgaaca

SEQ ID NO: 15750 - DNA, 20 bp, Artificial Sequence
  Antisense compound
attttgcctcagacatgaac

SEQ ID NO: 15751 - DNA, 20 bp, Artificial Sequence
  Antisense compound
cattttgcctcagacatgaa

SEQ ID NO: 15752 - DNA, 20 bp, Artificial Sequence
  Antisense compound
acattttgcctcagacatga

SEQ ID NO: 15753 - DNA, 20 bp, Artificial Sequence
  Antisense compound
aacattttgcctcagacatg

SEQ ID NO: 15754 - DNA, 20 bp, Artificial Sequence
  Antisense compound
caacattttgcctcagacat

SEQ ID NO: 15755 - DNA, 20 bp, Artificial Sequence
  Antisense compound
ccaacattttgcctcagaca

SEQ ID NO: 15756 - DNA, 20 bp, Artificial Sequence
  Antisense compound
tccaacattttgcctcagac

SEQ ID NO: 15757 - DNA, 20 bp, Artificial Sequence
  Antisense compound
gtccaacattttgcctcaga

SEQ ID NO: 15758 - DNA, 20 bp, Artificial Sequence
  Antisense compound
agtccaacattttgcctcag

SEQ ID NO: 15759 - DNA, 20 bp, Artificial Sequence
  Antisense compound
cagtccaacattttgcctca

SEQ ID NO: 15760 - DNA, 20 bp, Artificial Sequence
  Antisense compound
tcagtccaacattttgcctc

SEQ ID NO: 15761 - DNA, 20 bp, Artificial Sequence
  Antisense compound
ctcagtccaacattttgcct

SEQ ID NO: 15762 - DNA, 20 bp, Artificial Sequence
  Antisense compound
tctcagtccaacattttgcc

SEQ ID NO: 15763 - DNA, 20 bp, Artificial Sequence
  Antisense compound
gtctcagtccaacattttgc

SEQ ID NO: 15764 - DNA, 20 bp, Artificial Sequence
  Antisense compound
agtctcagtccaacattttg

SEQ ID NO: 15765 - DNA, 20 bp, Artificial Sequence
  Antisense compound
cagtctcagtccaacatttt

SEQ ID NO: 15766 - DNA, 20 bp, Artificial Sequence
  Antisense compound
tcagtctcagtccaacattt

SEQ ID NO: 15767 - DNA, 20 bp, Artificial Sequence
  Antisense compound
gtcagtctcagtccaacatt

SEQ ID NO: 15768 - DNA, 20 bp, Artificial Sequence
  Antisense compound
ggtcagtctcagtccaacat

SEQ ID NO: 15769 - DNA, 20 bp, Artificial Sequence
  Antisense compound
aggtcagtctcagtccaaca

SEQ ID NO: 15770 - DNA, 20 bp, Artificial Sequence
  Antisense compound
aaggtcagtctcagtccaac

SEQ ID NO: 15771 - DNA, 20 bp, Artificial Sequence
  Antisense compound
taaggtcagtctcagtccaa

SEQ ID NO: 15772 - DNA, 20 bp, Artificial Sequence
  Antisense compound
gtaaggtcagtctcagtcca

SEQ ID NO: 15773 - DNA, 20 bp, Artificial Sequence
  Antisense compound
agtaaggtcagtctcagtcc

SEQ ID NO: 15774 - DNA, 20 bp, Artificial Sequence
  Antisense compound
tagtaaggtcagtctcagtc

SEQ ID NO: 15775 - DNA, 20 bp, Artificial Sequence
  Antisense compound
ttagtaaggtcagtctcagt

SEQ ID NO: 15776 - DNA, 20 bp, Artificial Sequence
  Antisense compound
tttagtaaggtcagtctcag

SEQ ID NO: 15777 - DNA, 20 bp, Artificial Sequence
  Antisense compound
ctttagtaaggtcagtctca

SEQ ID NO: 15778 - DNA, 20 bp, Artificial Sequence
  Antisense compound
cctttagtaaggtcagtctc

SEQ ID NO: 15779 - DNA, 20 bp, Artificial Sequence
  Antisense compound
tcctttagtaaggtcagtct

SEQ ID NO: 15780 - DNA, 20 bp, Artificial Sequence
  Antisense compound
gtcctttagtaaggtcagtc

SEQ ID NO: 15781 - DNA, 20 bp, Artificial Sequence
  Antisense compound
ggtcctttagtaaggtcagt

SEQ ID NO: 15782 - DNA, 20 bp, Artificial Sequence
  Antisense compound
aggtcctttagtaaggtcag

SEQ ID NO: 15783 - DNA, 20 bp, Artificial Sequence
  Antisense compound
gaggtcctttagtaaggtca

SEQ ID NO: 15784 - DNA, 20 bp, Artificial Sequence
  Antisense compound
tgaggtcctttagtaaggtc

SEQ ID NO: 15785 - DNA, 20 bp, Artificial Sequence
  Antisense compound
gtgaggtcctttagtaaggt

SEQ ID NO: 15786 - DNA, 20 bp, Artificial Sequence
  Antisense compound
cgtgaggtcctttagtaagg

SEQ ID NO: 15787 - DNA, 20 bp, Artificial Sequence
  Antisense compound
tcgtgaggtcctttagtaag

SEQ ID NO: 15788 - DNA, 20 bp, Artificial Sequence
  Antisense compound
ttcgtgaggtcctttagtaa

SEQ ID NO: 15789 - DNA, 20 bp, Artificial Sequence
  Antisense compound
attcgtgaggtcctttagta

SEQ ID NO: 15790 - DNA, 20 bp, Artificial Sequence
  Antisense compound
aattcgtgaggtcctttagt

SEQ ID NO: 15791 - DNA, 20 bp, Artificial Sequence
  Antisense compound
aaattcgtgaggtcctttag

SEQ ID NO: 15792 - DNA, 20 bp, Artificial Sequence
  Antisense compound
aaaattcgtgaggtccttta

SEQ ID NO: 15793 - DNA, 20 bp, Artificial Sequence
  Antisense compound
caaaattcgtgaggtccttt

SEQ ID NO: 15794 - DNA, 20 bp, Artificial Sequence
  Antisense compound
gcaaaattcgtgaggtcctt

SEQ ID NO: 15795 - DNA, 20 bp, Artificial Sequence
  Antisense compound
agcaaaattcgtgaggtcct

SEQ ID NO: 15796 - DNA, 20 bp, Artificial Sequence
  Antisense compound
gagcaaaattcgtgaggtcc

SEQ ID NO: 15797 - DNA, 20 bp, Artificial Sequence
  Antisense compound
tgagcaaaattcgtgaggtc

SEQ ID NO: 15798 - DNA, 20 bp, Artificial Sequence
  Antisense compound
gtgagcaaaattcgtgaggt

SEQ ID NO: 15799 - DNA, 20 bp, Artificial Sequence
  Antisense compound
tgtgagcaaaattcgtgagg

SEQ ID NO: 15800 - DNA, 20 bp, Artificial Sequence
  Antisense compound
ctgtgagcaaaattcgtgag

SEQ ID NO: 15801 - DNA, 20 bp, Artificial Sequence
  Antisense compound
gctgtgagcaaaattcgtga

SEQ ID NO: 15802 - DNA, 20 bp, Artificial Sequence
  Antisense compound
tgctgtgagcaaaattcgtg

SEQ ID NO: 15803 - DNA, 20 bp, Artificial Sequence
  Antisense compound
atgctgtgagcaaaattcgt

SEQ ID NO: 15804 - DNA, 20 bp, Artificial Sequence
  Antisense compound
tatgctgtgagcaaaattcg

SEQ ID NO: 15805 - DNA, 20 bp, Artificial Sequence
  Antisense compound
gtatgctgtgagcaaaattc

SEQ ID NO: 15806 - DNA, 20 bp, Artificial Sequence
  Antisense compound
tgtatgctgtgagcaaaatt

SEQ ID NO: 15807 - DNA, 20 bp, Artificial Sequence
  Antisense compound
ttgtatgctgtgagcaaaat

SEQ ID NO: 15808 - DNA, 20 bp, Artificial Sequence
  Antisense compound
attgtatgctgtgagcaaaa

SEQ ID NO: 15809 - DNA, 20 bp, Artificial Sequence
  Antisense compound
cattgtatgctgtgagcaaa

SEQ ID NO: 15810 - DNA, 20 bp, Artificial Sequence
  Antisense compound
gcattgtatgctgtgagcaa

SEQ ID NO: 15811 - DNA, 20 bp, Artificial Sequence
  Antisense compound
agcattgtatgctgtgagca

SEQ ID NO: 15812 - DNA, 20 bp, Artificial Sequence
  Antisense compound
tagcattgtatgctgtgagc

SEQ ID NO: 15813 - DNA, 20 bp, Artificial Sequence
  Antisense compound
ctagcattgtatgctgtgag

SEQ ID NO: 15814 - DNA, 20 bp, Artificial Sequence
  Antisense compound
actagcattgtatgctgtga

SEQ ID NO: 15815 - DNA, 20 bp, Artificial Sequence
  Antisense compound
aactagcattgtatgctgtg

SEQ ID NO: 15816 - DNA, 20 bp, Artificial Sequence
  Antisense compound
taactagcattgtatgctgt

SEQ ID NO: 15817 - DNA, 20 bp, Artificial Sequence
  Antisense compound
ttaactagcattgtatgctg

SEQ ID NO: 15818 - DNA, 20 bp, Artificial Sequence
  Antisense compound
tttaactagcattgtatgct

SEQ ID NO: 15819 - DNA, 20 bp, Artificial Sequence
  Antisense compound
gtttaactagcattgtatgc

SEQ ID NO: 15820 - DNA, 20 bp, Artificial Sequence
  Antisense compound
tgtttaactagcattgtatg

SEQ ID NO: 15821 - DNA, 20 bp, Artificial Sequence
  Antisense compound
ttgtttaactagcattgtat

SEQ ID NO: 15822 - DNA, 20 bp, Artificial Sequence
  Antisense compound
cttgtttaactagcattgta

SEQ ID NO: 15823 - DNA, 20 bp, Artificial Sequence
  Antisense compound
ccttgtttaactagcattgt

SEQ ID NO: 15824 - DNA, 20 bp, Artificial Sequence
  Antisense compound
tccttgtttaactagcattg

SEQ ID NO: 15825 - DNA, 20 bp, Artificial Sequence
  Antisense compound
ctccttgtttaactagcatt

SEQ ID NO: 15826 - DNA, 20 bp, Artificial Sequence
  Antisense compound
tctccttgtttaactagcat

SEQ ID NO: 15827 - DNA, 20 bp, Artificial Sequence
  Antisense compound
atctccttgtttaactagca

SEQ ID NO: 15828 - DNA, 20 bp, Artificial Sequence
  Antisense compound
catctccttgtttaactagc

SEQ ID NO: 15829 - DNA, 20 bp, Artificial Sequence
  Antisense compound
tcatctccttgtttaactag

SEQ ID NO: 15830 - DNA, 20 bp, Artificial Sequence
  Antisense compound
atcatctccttgtttaacta

SEQ ID NO: 15831 - DNA, 20 bp, Artificial Sequence
  Antisense compound
aatcatctccttgtttaact

SEQ ID NO: 15832 - DNA, 20 bp, Artificial Sequence
  Antisense compound
taatcatctccttgtttaac

SEQ ID NO: 15833 - DNA, 20 bp, Artificial Sequence
  Antisense compound
gtaatcatctccttgtttaa

SEQ ID NO: 15834 - DNA, 20 bp, Artificial Sequence
  Antisense compound
cgtaatcatctccttgttta

SEQ ID NO: 15835 - DNA, 20 bp, Artificial Sequence
  Antisense compound
acgtaatcatctccttgttt

SEQ ID NO: 15836 - DNA, 20 bp, Artificial Sequence
  Antisense compound
cacgtaatcatctccttgtt

SEQ ID NO: 15837 - DNA, 20 bp, Artificial Sequence
  Antisense compound
acacgtaatcatctccttgt

SEQ ID NO: 15838 - DNA, 20 bp, Artificial Sequence
  Antisense compound
tacacgtaatcatctccttg

SEQ ID NO: 15839 - DNA, 20 bp, Artificial Sequence
  Antisense compound
gtacacgtaatcatctcctt

SEQ ID NO: 15840 - DNA, 20 bp, Artificial Sequence
  Antisense compound
ggtacacgtaatcatctcct

SEQ ID NO: 15841 - DNA, 20 bp, Artificial Sequence
  Antisense compound
aggtacacgtaatcatctcc

SEQ ID NO: 15842 - DNA, 20 bp, Artificial Sequence
  Antisense compound
caggtacacgtaatcatctc

SEQ ID NO: 15843 - DNA, 20 bp, Artificial Sequence
  Antisense compound
gcaggtacacgtaatcatct

SEQ ID NO: 15844 - DNA, 20 bp, Artificial Sequence
  Antisense compound
ggcaggtacacgtaatcatc

SEQ ID NO: 15845 - DNA, 20 bp, Artificial Sequence
  Antisense compound
aggcaggtacacgtaatcat

SEQ ID NO: 15846 - DNA, 20 bp, Artificial Sequence
  Antisense compound
aaggcaggtacacgtaatca

SEQ ID NO: 15847 - DNA, 20 bp, Artificial Sequence
  Antisense compound
taaggcaggtacacgtaatc

SEQ ID NO: 15848 - DNA, 20 bp, Artificial Sequence
  Antisense compound
gtaaggcaggtacacgtaat

SEQ ID NO: 15849 - DNA, 20 bp, Artificial Sequence
  Antisense compound
ggtaaggcaggtacacgtaa

SEQ ID NO: 15850 - DNA, 20 bp, Artificial Sequence
  Antisense compound
gggtaaggcaggtacacgta

SEQ ID NO: 15851 - DNA, 20 bp, Artificial Sequence
  Antisense compound
tgggtaaggcaggtacacgt

SEQ ID NO: 15852 - DNA, 20 bp, Artificial Sequence
  Antisense compound
ctgggtaaggcaggtacacg

SEQ ID NO: 15853 - DNA, 20 bp, Artificial Sequence
  Antisense compound
tctgggtaaggcaggtacac

SEQ ID NO: 15854 - DNA, 20 bp, Artificial Sequence
  Antisense compound
atctgggtaaggcaggtaca

SEQ ID NO: 15855 - DNA, 20 bp, Artificial Sequence
  Antisense compound
gatctgggtaaggcaggtac

SEQ ID NO: 15856 - DNA, 20 bp, Artificial Sequence
  Antisense compound
ggatctgggtaaggcaggta

SEQ ID NO: 15857 - DNA, 20 bp, Artificial Sequence
  Antisense compound
tggatctgggtaaggcaggt

SEQ ID NO: 15858 - DNA, 20 bp, Artificial Sequence
  Antisense compound
atggatctgggtaaggcagg

SEQ ID NO: 15859 - DNA, 20 bp, Artificial Sequence
  Antisense compound
gatggatctgggtaaggcag

SEQ ID NO: 15860 - DNA, 20 bp, Artificial Sequence
  Antisense compound
tgatggatctgggtaaggca

SEQ ID NO: 15861 - DNA, 20 bp, Artificial Sequence
  Antisense compound
ttgatggatctgggtaaggc

SEQ ID NO: 15862 - DNA, 20 bp, Artificial Sequence
  Antisense compound
cttgatggatctgggtaagg

SEQ ID NO: 15863 - DNA, 20 bp, Artificial Sequence
  Antisense compound
tcttgatggatctgggtaag

SEQ ID NO: 15864 - DNA, 20 bp, Artificial Sequence
  Antisense compound
ttcttgatggatctgggtaa

SEQ ID NO: 15865 - DNA, 20 bp, Artificial Sequence
  Antisense compound
attcttgatggatctgggta

SEQ ID NO: 15866 - DNA, 20 bp, Artificial Sequence
  Antisense compound
tattcttgatggatctgggt

SEQ ID NO: 15867 - DNA, 20 bp, Artificial Sequence
  Antisense compound
atattcttgatggatctggg

SEQ ID NO: 15868 - DNA, 20 bp, Artificial Sequence
  Antisense compound
aatattcttgatggatctgg

SEQ ID NO: 15869 - DNA, 20 bp, Artificial Sequence
  Antisense compound
taatattcttgatggatctg

SEQ ID NO: 15870 - DNA, 20 bp, Artificial Sequence
  Antisense compound
ctaatattcttgatggatct

SEQ ID NO: 15871 - DNA, 20 bp, Artificial Sequence
  Antisense compound
cctaatattcttgatggatc

SEQ ID NO: 15872 - DNA, 20 bp, Artificial Sequence
  Antisense compound
gcctaatattcttgatggat

SEQ ID NO: 15873 - DNA, 20 bp, Artificial Sequence
  Antisense compound
cgcctaatattcttgatgga

SEQ ID NO: 15874 - DNA, 20 bp, Artificial Sequence
  Antisense compound
gcgcctaatattcttgatgg

SEQ ID NO: 15875 - DNA, 20 bp, Artificial Sequence
  Antisense compound
tgcgcctaatattcttgatg

SEQ ID NO: 15876 - DNA, 20 bp, Artificial Sequence
  Antisense compound
ctgcgcctaatattcttgat

SEQ ID NO: 15877 - DNA, 20 bp, Artificial Sequence
  Antisense compound
cctgcgcctaatattcttga

SEQ ID NO: 15878 - DNA, 20 bp, Artificial Sequence
  Antisense compound
gcctgcgcctaatattcttg

SEQ ID NO: 15879 - DNA, 20 bp, Artificial Sequence
  Antisense compound
agcctgcgcctaatattctt

SEQ ID NO: 15880 - DNA, 20 bp, Artificial Sequence
  Antisense compound
cagcctgcgcctaatattct

SEQ ID NO: 15881 - DNA, 20 bp, Artificial Sequence
  Antisense compound
acagcctgcgcctaatattc

SEQ ID NO: 15882 - DNA, 20 bp, Artificial Sequence
  Antisense compound
aacagcctgcgcctaatatt

SEQ ID NO: 15883 - DNA, 20 bp, Artificial Sequence
  Antisense compound
aaacagcctgcgcctaatat

SEQ ID NO: 15884 - DNA, 20 bp, Artificial Sequence
  Antisense compound
aaaacagcctgcgcctaata

SEQ ID NO: 15885 - DNA, 20 bp, Artificial Sequence
  Antisense compound
caaaacagcctgcgcctaat

SEQ ID NO: 15886 - DNA, 20 bp, Artificial Sequence
  Antisense compound
acaaaacagcctgcgcctaa

SEQ ID NO: 15887 - DNA, 20 bp, Artificial Sequence
  Antisense compound
gacaaaacagcctgcgccta

SEQ ID NO: 15888 - DNA, 20 bp, Artificial Sequence
  Antisense compound
cgacaaaacagcctgcgcct

SEQ ID NO: 15889 - DNA, 20 bp, Artificial Sequence
  Antisense compound
tcgacaaaacagcctgcgcc

SEQ ID NO: 15890 - DNA, 20 bp, Artificial Sequence
  Antisense compound
atcgacaaaacagcctgcgc

SEQ ID NO: 15891 - DNA, 20 bp, Artificial Sequence
  Antisense compound
catcgacaaaacagcctgcg

SEQ ID NO: 15892 - DNA, 20 bp, Artificial Sequence
  Antisense compound
tcatcgacaaaacagcctgc

SEQ ID NO: 15893 - DNA, 20 bp, Artificial Sequence
  Antisense compound
atcatcgacaaaacagcctg

SEQ ID NO: 15894 - DNA, 20 bp, Artificial Sequence
  Antisense compound
tatcatcgacaaaacagcct

SEQ ID NO: 15895 - DNA, 20 bp, Artificial Sequence
  Antisense compound
atatcatcgacaaaacagcc

SEQ ID NO: 15896 - DNA, 20 bp, Artificial Sequence
  Antisense compound
aatatcatcgacaaaacagc

SEQ ID NO: 15897 - DNA, 20 bp, Artificial Sequence
  Antisense compound
caatatcatcgacaaaacag

SEQ ID NO: 15898 - DNA, 20 bp, Artificial Sequence
  Antisense compound
acaatatcatcgacaaaaca

SEQ ID NO: 15899 - DNA, 20 bp, Artificial Sequence
  Antisense compound
gacaatatcatcgacaaaac

SEQ ID NO: 15900 - DNA, 20 bp, Artificial Sequence
  Antisense compound
tgacaatatcatcgacaaaa

SEQ ID NO: 15901 - DNA, 20 bp, Artificial Sequence
  Antisense compound
ttgacaatatcatcgacaaa

SEQ ID NO: 15902 - DNA, 20 bp, Artificial Sequence
  Antisense compound
tttgacaatatcatcgacaa

SEQ ID NO: 15903 - DNA, 20 bp, Artificial Sequence
  Antisense compound
ttttgacaatatcatcgaca

SEQ ID NO: 15904 - DNA, 20 bp, Artificial Sequence
  Antisense compound
gttttgacaatatcatcgac

SEQ ID NO: 15905 - DNA, 20 bp, Artificial Sequence
  Antisense compound
tgttttgacaatatcatcga

SEQ ID NO: 15906 - DNA, 20 bp, Artificial Sequence
  Antisense compound
ctgttttgacaatatcatcg

SEQ ID NO: 15907 - DNA, 20 bp, Artificial Sequence
  Antisense compound
tctgttttgacaatatcatc

SEQ ID NO: 15908 - DNA, 20 bp, Artificial Sequence
  Antisense compound
atctgttttgacaatatcat

SEQ ID NO: 15909 - DNA, 20 bp, Artificial Sequence
  Antisense compound
catctgttttgacaatatca

SEQ ID NO: 15910 - DNA, 20 bp, Artificial Sequence
  Antisense compound
ccatctgttttgacaatatc

SEQ ID NO: 15911 - DNA, 20 bp, Artificial Sequence
  Antisense compound
accatctgttttgacaatat

SEQ ID NO: 15912 - DNA, 20 bp, Artificial Sequence
  Antisense compound
taccatctgttttgacaata

SEQ ID NO: 15913 - DNA, 20 bp, Artificial Sequence
  Antisense compound
gtaccatctgttttgacaat

SEQ ID NO: 15914 - DNA, 20 bp, Artificial Sequence
  Antisense compound
tgtaccatctgttttgacaa

SEQ ID NO: 15915 - DNA, 20 bp, Artificial Sequence
  Antisense compound
gtgtaccatctgttttgaca

SEQ ID NO: 15916 - DNA, 20 bp, Artificial Sequence
  Antisense compound
agtgtaccatctgttttgac

SEQ ID NO: 15917 - DNA, 20 bp, Artificial Sequence
  Antisense compound
aagtgtaccatctgttttga

SEQ ID NO: 15918 - DNA, 20 bp, Artificial Sequence
  Antisense compound
taagtgtaccatctgttttg

SEQ ID NO: 15919 - DNA, 20 bp, Artificial Sequence
  Antisense compound
ataagtgtaccatctgtttt

SEQ ID NO: 15920 - DNA, 20 bp, Artificial Sequence
  Antisense compound
cataagtgtaccatctgttt

SEQ ID NO: 15921 - DNA, 20 bp, Artificial Sequence
  Antisense compound
tcataagtgtaccatctgtt

SEQ ID NO: 15922 - DNA, 20 bp, Artificial Sequence
  Antisense compound
atcataagtgtaccatctgt

SEQ ID NO: 15923 - DNA, 20 bp, Artificial Sequence
  Antisense compound
aatcataagtgtaccatctg

SEQ ID NO: 15924 - DNA, 20 bp, Artificial Sequence
  Antisense compound
caatcataagtgtaccatct

SEQ ID NO: 15925 - DNA, 20 bp, Artificial Sequence
  Antisense compound
tcaatcataagtgtaccatc

SEQ ID NO: 15926 - DNA, 20 bp, Artificial Sequence
  Antisense compound
ttcaatcataagtgtaccat

SEQ ID NO: 15927 - DNA, 20 bp, Artificial Sequence
  Antisense compound
tttcaatcataagtgtacca

SEQ ID NO: 15928 - DNA, 20 bp, Artificial Sequence
  Antisense compound
ctttcaatcataagtgtacc

SEQ ID NO: 15929 - DNA, 20 bp, Artificial Sequence
  Antisense compound
cctttcaatcataagtgtac

SEQ ID NO: 15930 - DNA, 20 bp, Artificial Sequence
  Antisense compound
acctttcaatcataagtgta

SEQ ID NO: 15931 - DNA, 20 bp, Artificial Sequence
  Antisense compound
aacctttcaatcataagtgt

SEQ ID NO: 15932 - DNA, 20 bp, Artificial Sequence
  Antisense compound
gaacctttcaatcataagtg

SEQ ID NO: 15933 - DNA, 20 bp, Artificial Sequence
  Antisense compound
cgaacctttcaatcataagt

SEQ ID NO: 15934 - DNA, 20 bp, Artificial Sequence
  Antisense compound
acgaacctttcaatcataag

SEQ ID NO: 15935 - DNA, 20 bp, Artificial Sequence
  Antisense compound
cacgaacctttcaatcataa

SEQ ID NO: 15936 - DNA, 20 bp, Artificial Sequence
  Antisense compound
acacgaacctttcaatcata

SEQ ID NO: 15937 - DNA, 20 bp, Artificial Sequence
  Antisense compound
gacacgaacctttcaatcat

SEQ ID NO: 15938 - DNA, 20 bp, Artificial Sequence
  Antisense compound
tgacacgaacctttcaatca

SEQ ID NO: 15939 - DNA, 20 bp, Artificial Sequence
  Antisense compound
gtgacacgaacctttcaatc

SEQ ID NO: 15940 - DNA, 20 bp, Artificial Sequence
  Antisense compound
agtgacacgaacctttcaat

SEQ ID NO: 15941 - DNA, 20 bp, Artificial Sequence
  Antisense compound
cagtgacacgaacctttcaa

SEQ ID NO: 15942 - DNA, 20 bp, Artificial Sequence
  Antisense compound
ccagtgacacgaacctttca

SEQ ID NO: 15943 - DNA, 20 bp, Artificial Sequence
  Antisense compound
gccagtgacacgaacctttc

SEQ ID NO: 15944 - DNA, 20 bp, Artificial Sequence
  Antisense compound
agccagtgacacgaaccttt

SEQ ID NO: 15945 - DNA, 20 bp, Artificial Sequence
  Antisense compound
tagccagtgacacgaacctt

SEQ ID NO: 15946 - DNA, 20 bp, Artificial Sequence
  Antisense compound
atagccagtgacacgaacct

SEQ ID NO: 15947 - DNA, 20 bp, Artificial Sequence
  Antisense compound
aatagccagtgacacgaacc

SEQ ID NO: 15948 - DNA, 20 bp, Artificial Sequence
  Antisense compound
caatagccagtgacacgaac

SEQ ID NO: 15949 - DNA, 20 bp, Artificial Sequence
  Antisense compound
tcaatagccagtgacacgaa

SEQ ID NO: 15950 - DNA, 20 bp, Artificial Sequence
  Antisense compound
atcaatagccagtgacacga

SEQ ID NO: 15951 - DNA, 20 bp, Artificial Sequence
  Antisense compound
catcaatagccagtgacacg

SEQ ID NO: 15952 - DNA, 20 bp, Artificial Sequence
  Antisense compound
gcatcaatagccagtgacac

SEQ ID NO: 15953 - DNA, 20 bp, Artificial Sequence
  Antisense compound
agcatcaatagccagtgaca

SEQ ID NO: 15954 - DNA, 20 bp, Artificial Sequence
  Antisense compound
aagcatcaatagccagtgac

SEQ ID NO: 15955 - DNA, 20 bp, Artificial Sequence
  Antisense compound
taagcatcaatagccagtga

SEQ ID NO: 15956 - DNA, 20 bp, Artificial Sequence
  Antisense compound
gtaagcatcaatagccagtg

SEQ ID NO: 15957 - DNA, 20 bp, Artificial Sequence
  Antisense compound
ggtaagcatcaatagccagt

SEQ ID NO: 15958 - DNA, 20 bp, Artificial Sequence
  Antisense compound
gggtaagcatcaatagccag

SEQ ID NO: 15959 - DNA, 20 bp, Artificial Sequence
  Antisense compound
tgggtaagcatcaatagcca

SEQ ID NO: 15960 - DNA, 20 bp, Artificial Sequence
  Antisense compound
gtgggtaagcatcaatagcc

SEQ ID NO: 15961 - DNA, 20 bp, Artificial Sequence
  Antisense compound
agtgggtaagcatcaatagc

SEQ ID NO: 15962 - DNA, 20 bp, Artificial Sequence
  Antisense compound
aagtgggtaagcatcaatag

SEQ ID NO: 15963 - DNA, 20 bp, Artificial Sequence
  Antisense compound
taagtgggtaagcatcaata

SEQ ID NO: 15964 - DNA, 20 bp, Artificial Sequence
  Antisense compound
gtaagtgggtaagcatcaat

SEQ ID NO: 15965 - DNA, 20 bp, Artificial Sequence
  Antisense compound
tgtaagtgggtaagcatcaa

SEQ ID NO: 15966 - DNA, 20 bp, Artificial Sequence
  Antisense compound
ttgtaagtgggtaagcatca

SEQ ID NO: 15967 - DNA, 20 bp, Artificial Sequence
  Antisense compound
tttgtaagtgggtaagcatc

SEQ ID NO: 15968 - DNA, 20 bp, Artificial Sequence
  Antisense compound
ttttgtaagtgggtaagcat

SEQ ID NO: 15969 - DNA, 20 bp, Artificial Sequence
  Antisense compound
gttttgtaagtgggtaagca

SEQ ID NO: 15970 - DNA, 20 bp, Artificial Sequence
  Antisense compound
tgttttgtaagtgggtaagc

SEQ ID NO: 15971 - DNA, 20 bp, Artificial Sequence
  Antisense compound
atgttttgtaagtgggtaag

SEQ ID NO: 15972 - DNA, 20 bp, Artificial Sequence
  Antisense compound
gatgttttgtaagtgggtaa

SEQ ID NO: 15973 - DNA, 20 bp, Artificial Sequence
  Antisense compound
ggatgttttgtaagtgggta

SEQ ID NO: 15974 - DNA, 20 bp, Artificial Sequence
  Antisense compound
aggatgttttgtaagtgggt

SEQ ID NO: 15975 - DNA, 20 bp, Artificial Sequence
  Antisense compound
taggatgttttgtaagtggg

SEQ ID NO: 15976 - DNA, 20 bp, Artificial Sequence
  Antisense compound
ttaggatgttttgtaagtgg

SEQ ID NO: 15977 - DNA, 20 bp, Artificial Sequence
  Antisense compound
attaggatgttttgtaagtg

SEQ ID NO: 15978 - DNA, 20 bp, Artificial Sequence
  Antisense compound
gattaggatgttttgtaagt

SEQ ID NO: 15979 - DNA, 20 bp, Artificial Sequence
  Antisense compound
tgattaggatgttttgtaag

SEQ ID NO: 15980 - DNA, 20 bp, Artificial Sequence
  Antisense compound
ctgattaggatgttttgtaa

SEQ ID NO: 15981 - DNA, 20 bp, Artificial Sequence
  Antisense compound
cctgattaggatgttttgta

SEQ ID NO: 15982 - DNA, 20 bp, Artificial Sequence
  Antisense compound
tcctgattaggatgttttgt

SEQ ID NO: 15983 - DNA, 20 bp, Artificial Sequence
  Antisense compound
ctcctgattaggatgttttg

SEQ ID NO: 15984 - DNA, 20 bp, Artificial Sequence
  Antisense compound
actcctgattaggatgtttt

SEQ ID NO: 15985 - DNA, 20 bp, Artificial Sequence
  Antisense compound
tactcctgattaggatgttt

SEQ ID NO: 15986 - DNA, 20 bp, Artificial Sequence
  Antisense compound
atactcctgattaggatgtt

SEQ ID NO: 15987 - DNA, 20 bp, Artificial Sequence
  Antisense compound
catactcctgattaggatgt

SEQ ID NO: 15988 - DNA, 20 bp, Artificial Sequence
  Antisense compound
gcatactcctgattaggatg

SEQ ID NO: 15989 - DNA, 20 bp, Artificial Sequence
  Antisense compound
agcatactcctgattaggat

SEQ ID NO: 15990 - DNA, 20 bp, Artificial Sequence
  Antisense compound
cagcatactcctgattagga

SEQ ID NO: 15991 - DNA, 20 bp, Artificial Sequence
  Antisense compound
tcagcatactcctgattagg

SEQ ID NO: 15992 - DNA, 20 bp, Artificial Sequence
  Antisense compound
atcagcatactcctgattag

SEQ ID NO: 15993 - DNA, 20 bp, Artificial Sequence
  Antisense compound
catcagcatactcctgatta

SEQ ID NO: 15994 - DNA, 20 bp, Artificial Sequence
  Antisense compound
acatcagcatactcctgatt

SEQ ID NO: 15995 - DNA, 20 bp, Artificial Sequence
  Antisense compound
gacatcagcatactcctgat

SEQ ID NO: 15996 - DNA, 20 bp, Artificial Sequence
  Antisense compound
agacatcagcatactcctga

SEQ ID NO: 15997 - DNA, 20 bp, Artificial Sequence
  Antisense compound
aagacatcagcatactcctg

SEQ ID NO: 15998 - DNA, 20 bp, Artificial Sequence
  Antisense compound
aaagacatcagcatactcct

SEQ ID NO: 15999 - DNA, 20 bp, Artificial Sequence
  Antisense compound
gaaagacatcagcatactcc

SEQ ID NO: 16000 - DNA, 20 bp, Artificial Sequence
  Antisense compound
tgaaagacatcagcatactc

SEQ ID NO: 16001 - DNA, 20 bp, Artificial Sequence
  Antisense compound
gtgaaagacatcagcatact

SEQ ID NO: 16002 - DNA, 20 bp, Artificial Sequence
  Antisense compound
agtgaaagacatcagcatac

SEQ ID NO: 16003 - DNA, 20 bp, Artificial Sequence
  Antisense compound
aagtgaaagacatcagcata

SEQ ID NO: 16004 - DNA, 20 bp, Artificial Sequence
  Antisense compound
caagtgaaagacatcagcat

SEQ ID NO: 16005 - DNA, 20 bp, Artificial Sequence
  Antisense compound
acaagtgaaagacatcagca

SEQ ID NO: 16006 - DNA, 20 bp, Artificial Sequence
  Antisense compound
tacaagtgaaagacatcagc

SEQ ID NO: 16007 - DNA, 20 bp, Artificial Sequence
  Antisense compound
atacaagtgaaagacatcag

SEQ ID NO: 16008 - DNA, 20 bp, Artificial Sequence
  Antisense compound
aatacaagtgaaagacatca

SEQ ID NO: 16009 - DNA, 20 bp, Artificial Sequence
  Antisense compound
aaatacaagtgaaagacatc

SEQ ID NO: 16010 - DNA, 20 bp, Artificial Sequence
  Antisense compound
taaatacaagtgaaagacat

SEQ ID NO: 16011 - DNA, 20 bp, Artificial Sequence
  Antisense compound
gtaaatacaagtgaaagaca

SEQ ID NO: 16012 - DNA, 20 bp, Artificial Sequence
  Antisense compound
tgtaaatacaagtgaaagac

SEQ ID NO: 16013 - DNA, 20 bp, Artificial Sequence
  Antisense compound
ttgtaaatacaagtgaaaga

SEQ ID NO: 16014 - DNA, 20 bp, Artificial Sequence
  Antisense compound
attgtaaatacaagtgaaag

SEQ ID NO: 16015 - DNA, 20 bp, Artificial Sequence
  Antisense compound
tattgtaaatacaagtgaaa

SEQ ID NO: 16016 - DNA, 20 bp, Artificial Sequence
  Antisense compound
gtattgtaaatacaagtgaa

SEQ ID NO: 16017 - DNA, 20 bp, Artificial Sequence
  Antisense compound
tgtattgtaaatacaagtga

SEQ ID NO: 16018 - DNA, 20 bp, Artificial Sequence
  Antisense compound
atgtattgtaaatacaagtg

SEQ ID NO: 16019 - DNA, 20 bp, Artificial Sequence
  Antisense compound
aatgtattgtaaatacaagt

SEQ ID NO: 16020 - DNA, 20 bp, Artificial Sequence
  Antisense compound
taatgtattgtaaatacaag

SEQ ID NO: 16021 - DNA, 20 bp, Artificial Sequence
  Antisense compound
ctaatgtattgtaaatacaa

SEQ ID NO: 16022 - DNA, 20 bp, Artificial Sequence
  Antisense compound
tctaatgtattgtaaataca

SEQ ID NO: 16023 - DNA, 20 bp, Artificial Sequence
  Antisense compound
ttctaatgtattgtaaatac

SEQ ID NO: 16024 - DNA, 20 bp, Artificial Sequence
  Antisense compound
tttctaatgtattgtaaata

SEQ ID NO: 16025 - DNA, 20 bp, Artificial Sequence
  Antisense compound
ctttctaatgtattgtaaat

SEQ ID NO: 16026 - DNA, 20 bp, Artificial Sequence
  Antisense compound
actttctaatgtattgtaaa

SEQ ID NO: 16027 - DNA, 20 bp, Artificial Sequence
  Antisense compound
aactttctaatgtattgtaa

SEQ ID NO: 16028 - DNA, 20 bp, Artificial Sequence
  Antisense compound
taactttctaatgtattgta

SEQ ID NO: 16029 - DNA, 20 bp, Artificial Sequence
  Antisense compound
gtaactttctaatgtattgt

SEQ ID NO: 16030 - DNA, 20 bp, Artificial Sequence
  Antisense compound
tgtaactttctaatgtattg

SEQ ID NO: 16031 - DNA, 20 bp, Artificial Sequence
  Antisense compound
atgtaactttctaatgtatt

SEQ ID NO: 16032 - DNA, 20 bp, Artificial Sequence
  Antisense compound
catgtaactttctaatgtat

SEQ ID NO: 16033 - DNA, 20 bp, Artificial Sequence
  Antisense compound
tcatgtaactttctaatgta

SEQ ID NO: 16034 - DNA, 20 bp, Artificial Sequence
  Antisense compound
atcatgtaactttctaatgt

SEQ ID NO: 16035 - DNA, 20 bp, Artificial Sequence
  Antisense compound
catcatgtaactttctaatg

SEQ ID NO: 16036 - DNA, 20 bp, Artificial Sequence
  Antisense compound
tcatcatgtaactttctaat

SEQ ID NO: 16037 - DNA, 20 bp, Artificial Sequence
  Antisense compound
ctcatcatgtaactttctaa

SEQ ID NO: 16038 - DNA, 20 bp, Artificial Sequence
  Antisense compound
gctcatcatgtaactttcta

SEQ ID NO: 16039 - DNA, 20 bp, Artificial Sequence
  Antisense compound
agctcatcatgtaactttct

SEQ ID NO: 16040 - DNA, 20 bp, Artificial Sequence
  Antisense compound
aagctcatcatgtaactttc

SEQ ID NO: 16041 - DNA, 20 bp, Artificial Sequence
  Antisense compound
taagctcatcatgtaacttt

SEQ ID NO: 16042 - DNA, 20 bp, Artificial Sequence
  Antisense compound
gtaagctcatcatgtaactt

SEQ ID NO: 16043 - DNA, 20 bp, Artificial Sequence
  Antisense compound
agtaagctcatcatgtaact

SEQ ID NO: 16044 - DNA, 20 bp, Artificial Sequence
  Antisense compound
cagtaagctcatcatgtaac

SEQ ID NO: 16045 - DNA, 20 bp, Artificial Sequence
  Antisense compound
ccagtaagctcatcatgtaa

SEQ ID NO: 16046 - DNA, 20 bp, Artificial Sequence
  Antisense compound
gccagtaagctcatcatgta

SEQ ID NO: 16047 - DNA, 20 bp, Artificial Sequence
  Antisense compound
ggccagtaagctcatcatgt

SEQ ID NO: 16048 - DNA, 20 bp, Artificial Sequence
  Antisense compound
tggccagtaagctcatcatg

SEQ ID NO: 16049 - DNA, 20 bp, Artificial Sequence
  Antisense compound
gtggccagtaagctcatcat

SEQ ID NO: 16050 - DNA, 20 bp, Artificial Sequence
  Antisense compound
tgtggccagtaagctcatca

SEQ ID NO: 16051 - DNA, 20 bp, Artificial Sequence
  Antisense compound
atgtggccagtaagctcatc

SEQ ID NO: 16052 - DNA, 20 bp, Artificial Sequence
  Antisense compound
catgtggccagtaagctcat

SEQ ID NO: 16053 - DNA, 20 bp, Artificial Sequence
  Antisense compound
acatgtggccagtaagctca

SEQ ID NO: 16054 - DNA, 20 bp, Artificial Sequence
  Antisense compound
aacatgtggccagtaagctc

SEQ ID NO: 16055 - DNA, 20 bp, Artificial Sequence
  Antisense compound
caacatgtggccagtaagct

SEQ ID NO: 16056 - DNA, 20 bp, Artificial Sequence
  Antisense compound
ccaacatgtggccagtaagc

SEQ ID NO: 16057 - DNA, 20 bp, Artificial Sequence
  Antisense compound
tccaacatgtggccagtaag

SEQ ID NO: 16058 - DNA, 20 bp, Artificial Sequence
  Antisense compound
gtccaacatgtggccagtaa

SEQ ID NO: 16059 - DNA, 20 bp, Artificial Sequence
  Antisense compound
tgtccaacatgtggccagta

SEQ ID NO: 16060 - DNA, 20 bp, Artificial Sequence
  Antisense compound
atgtccaacatgtggccagt

SEQ ID NO: 16061 - DNA, 20 bp, Artificial Sequence
  Antisense compound
catgtccaacatgtggccag

SEQ ID NO: 16062 - DNA, 20 bp, Artificial Sequence
  Antisense compound
acatgtccaacatgtggcca

SEQ ID NO: 16063 - DNA, 20 bp, Artificial Sequence
  Antisense compound
tacatgtccaacatgtggcc

SEQ ID NO: 16064 - DNA, 20 bp, Artificial Sequence
  Antisense compound
atacatgtccaacatgtggc

SEQ ID NO: 16065 - DNA, 20 bp, Artificial Sequence
  Antisense compound
aatacatgtccaacatgtgg

SEQ ID NO: 16066 - DNA, 20 bp, Artificial Sequence
  Antisense compound
gaatacatgtccaacatgtg

SEQ ID NO: 16067 - DNA, 20 bp, Artificial Sequence
  Antisense compound
ggaatacatgtccaacatgt

SEQ ID NO: 16068 - DNA, 20 bp, Artificial Sequence
  Antisense compound
cggaatacatgtccaacatg

SEQ ID NO: 16069 - DNA, 20 bp, Artificial Sequence
  Antisense compound
acggaatacatgtccaacat

SEQ ID NO: 16070 - DNA, 20 bp, Artificial Sequence
  Antisense compound
tacggaatacatgtccaaca

SEQ ID NO: 16071 - DNA, 20 bp, Artificial Sequence
  Antisense compound
ttacggaatacatgtccaac

SEQ ID NO: 16072 - DNA, 20 bp, Artificial Sequence
  Antisense compound
attacggaatacatgtccaa

SEQ ID NO: 16073 - DNA, 20 bp, Artificial Sequence
  Antisense compound
cattacggaatacatgtcca

SEQ ID NO: 16074 - DNA, 20 bp, Artificial Sequence
  Antisense compound
gcattacggaatacatgtcc

SEQ ID NO: 16075 - DNA, 20 bp, Artificial Sequence
  Antisense compound
agcattacggaatacatgtc

SEQ ID NO: 16076 - DNA, 20 bp, Artificial Sequence
  Antisense compound
tagcattacggaatacatgt

SEQ ID NO: 16077 - DNA, 20 bp, Artificial Sequence
  Antisense compound
ttagcattacggaatacatg

SEQ ID NO: 16078 - DNA, 20 bp, Artificial Sequence
  Antisense compound
gttagcattacggaatacat

SEQ ID NO: 16079 - DNA, 20 bp, Artificial Sequence
  Antisense compound
agttagcattacggaataca

SEQ ID NO: 16080 - DNA, 20 bp, Artificial Sequence
  Antisense compound
tagttagcattacggaatac

SEQ ID NO: 16081 - DNA, 20 bp, Artificial Sequence
  Antisense compound
ttagttagcattacggaata

SEQ ID NO: 16082 - DNA, 20 bp, Artificial Sequence
  Antisense compound
attagttagcattacggaat

SEQ ID NO: 16083 - DNA, 20 bp, Artificial Sequence
  Antisense compound
cattagttagcattacggaa

SEQ ID NO: 16084 - DNA, 20 bp, Artificial Sequence
  Antisense compound
tcattagttagcattacgga

SEQ ID NO: 16085 - DNA, 20 bp, Artificial Sequence
  Antisense compound
atcattagttagcattacgg

SEQ ID NO: 16086 - DNA, 20 bp, Artificial Sequence
  Antisense compound
tatcattagttagcattacg

SEQ ID NO: 16087 - DNA, 20 bp, Artificial Sequence
  Antisense compound
ttatcattagttagcattac

SEQ ID NO: 16088 - DNA, 20 bp, Artificial Sequence
  Antisense compound
gttatcattagttagcatta

SEQ ID NO: 16089 - DNA, 20 bp, Artificial Sequence
  Antisense compound
tgttatcattagttagcatt

SEQ ID NO: 16090 - DNA, 20 bp, Artificial Sequence
  Antisense compound
gtgttatcattagttagcat

SEQ ID NO: 16091 - DNA, 20 bp, Artificial Sequence
  Antisense compound
ggtgttatcattagttagca

SEQ ID NO: 16092 - DNA, 20 bp, Artificial Sequence
  Antisense compound
aggtgttatcattagttagc

SEQ ID NO: 16093 - DNA, 20 bp, Artificial Sequence
  Antisense compound
gaggtgttatcattagttag

SEQ ID NO: 16094 - DNA, 20 bp, Artificial Sequence
  Antisense compound
tgaggtgttatcattagtta

SEQ ID NO: 16095 - DNA, 20 bp, Artificial Sequence
  Antisense compound
gtgaggtgttatcattagtt

SEQ ID NO: 16096 - DNA, 20 bp, Artificial Sequence
  Antisense compound
cgtgaggtgttatcattagt

SEQ ID NO: 16097 - DNA, 20 bp, Artificial Sequence
  Antisense compound
ccgtgaggtgttatcattag

SEQ ID NO: 16098 - DNA, 20 bp, Artificial Sequence
  Antisense compound
accgtgaggtgttatcatta

SEQ ID NO: 16099 - DNA, 20 bp, Artificial Sequence
  Antisense compound
taccgtgaggtgttatcatt

SEQ ID NO: 16100 - DNA, 20 bp, Artificial Sequence
  Antisense compound
gtaccgtgaggtgttatcat

SEQ ID NO: 16101 - DNA, 20 bp, Artificial Sequence
  Antisense compound
agtaccgtgaggtgttatca

SEQ ID NO: 16102 - DNA, 20 bp, Artificial Sequence
  Antisense compound
cagtaccgtgaggtgttatc

SEQ ID NO: 16103 - DNA, 20 bp, Artificial Sequence
  Antisense compound
ccagtaccgtgaggtgttat

SEQ ID NO: 16104 - DNA, 20 bp, Artificial Sequence
  Antisense compound
cccagtaccgtgaggtgtta

SEQ ID NO: 16105 - DNA, 20 bp, Artificial Sequence
  Antisense compound
tcccagtaccgtgaggtgtt

SEQ ID NO: 16106 - DNA, 20 bp, Artificial Sequence
  Antisense compound
ttcccagtaccgtgaggtgt

SEQ ID NO: 16107 - DNA, 20 bp, Artificial Sequence
  Antisense compound
gttcccagtaccgtgaggtg

SEQ ID NO: 16108 - DNA, 20 bp, Artificial Sequence
  Antisense compound
ggttcccagtaccgtgaggt

SEQ ID NO: 16109 - DNA, 20 bp, Artificial Sequence
  Antisense compound
aggttcccagtaccgtgagg

SEQ ID NO: 16110 - DNA, 20 bp, Artificial Sequence
  Antisense compound
caggttcccagtaccgtgag

SEQ ID NO: 16111 - DNA, 20 bp, Artificial Sequence
  Antisense compound
tcaggttcccagtaccgtga

SEQ ID NO: 16112 - DNA, 20 bp, Artificial Sequence
  Antisense compound
ctcaggttcccagtaccgtg

SEQ ID NO: 16113 - DNA, 20 bp, Artificial Sequence
  Antisense compound
actcaggttcccagtaccgt

SEQ ID NO: 16114 - DNA, 20 bp, Artificial Sequence
  Antisense compound
aactcaggttcccagtaccg

SEQ ID NO: 16115 - DNA, 20 bp, Artificial Sequence
  Antisense compound
aaactcaggttcccagtacc

SEQ ID NO: 16116 - DNA, 20 bp, Artificial Sequence
  Antisense compound
aaaactcaggttcccagtac

SEQ ID NO: 16117 - DNA, 20 bp, Artificial Sequence
  Antisense compound
taaaactcaggttcccagta

SEQ ID NO: 16118 - DNA, 20 bp, Artificial Sequence
  Antisense compound
ataaaactcaggttcccagt

SEQ ID NO: 16119 - DNA, 20 bp, Artificial Sequence
  Antisense compound
cataaaactcaggttcccag

SEQ ID NO: 16120 - DNA, 20 bp, Artificial Sequence
  Antisense compound
tcataaaactcaggttccca

SEQ ID NO: 16121 - DNA, 20 bp, Artificial Sequence
  Antisense compound
ctcataaaactcaggttccc

SEQ ID NO: 16122 - DNA, 20 bp, Artificial Sequence
  Antisense compound
cctcataaaactcaggttcc

SEQ ID NO: 16123 - DNA, 20 bp, Artificial Sequence
  Antisense compound
gcctcataaaactcaggttc

SEQ ID NO: 16124 - DNA, 20 bp, Artificial Sequence
  Antisense compound
agcctcataaaactcaggtt

SEQ ID NO: 16125 - DNA, 20 bp, Artificial Sequence
  Antisense compound
tagcctcataaaactcaggt

SEQ ID NO: 16126 - DNA, 20 bp, Artificial Sequence
  Antisense compound
atagcctcataaaactcagg

SEQ ID NO: 16127 - DNA, 20 bp, Artificial Sequence
  Antisense compound
catagcctcataaaactcag

SEQ ID NO: 16128 - DNA, 20 bp, Artificial Sequence
  Antisense compound
acatagcctcataaaactca

SEQ ID NO: 16129 - DNA, 20 bp, Artificial Sequence
  Antisense compound
tacatagcctcataaaactc

SEQ ID NO: 16130 - DNA, 20 bp, Artificial Sequence
  Antisense compound
gtacatagcctcataaaact

SEQ ID NO: 16131 - DNA, 20 bp, Artificial Sequence
  Antisense compound
tgtacatagcctcataaaac

SEQ ID NO: 16132 - DNA, 20 bp, Artificial Sequence
  Antisense compound
gtgtacatagcctcataaaa

SEQ ID NO: 16133 - DNA, 20 bp, Artificial Sequence
  Antisense compound
tgtgtacatagcctcataaa

SEQ ID NO: 16134 - DNA, 20 bp, Artificial Sequence
  Antisense compound
gtgtgtacatagcctcataa

SEQ ID NO: 16135 - DNA, 20 bp, Artificial Sequence
  Antisense compound
ggtgtgtacatagcctcata

SEQ ID NO: 16136 - DNA, 20 bp, Artificial Sequence
  Antisense compound
tggtgtgtacatagcctcat

SEQ ID NO: 16137 - DNA, 20 bp, Artificial Sequence
  Antisense compound
gtggtgtgtacatagcctca

SEQ ID NO: 16138 - DNA, 20 bp, Artificial Sequence
  Antisense compound
tgtggtgtgtacatagcctc

SEQ ID NO: 16139 - DNA, 20 bp, Artificial Sequence
  Antisense compound
atgtggtgtgtacatagcct

SEQ ID NO: 16140 - DNA, 20 bp, Artificial Sequence
  Antisense compound
tatgtggtgtgtacatagcc

SEQ ID NO: 16141 - DNA, 20 bp, Artificial Sequence
  Antisense compound
gtatgtggtgtgtacatagc

SEQ ID NO: 16142 - DNA, 20 bp, Artificial Sequence
  Antisense compound
tgtatgtggtgtgtacatag

SEQ ID NO: 16143 - DNA, 20 bp, Artificial Sequence
  Antisense compound
ctgtatgtggtgtgtacata

SEQ ID NO: 16144 - DNA, 20 bp, Artificial Sequence
  Antisense compound
actgtatgtggtgtgtacat

SEQ ID NO: 16145 - DNA, 20 bp, Artificial Sequence
  Antisense compound
gactgtatgtggtgtgtaca

SEQ ID NO: 16146 - DNA, 20 bp, Artificial Sequence
  Antisense compound
agactgtatgtggtgtgtac

SEQ ID NO: 16147 - DNA, 20 bp, Artificial Sequence
  Antisense compound
aagactgtatgtggtgtgta

SEQ ID NO: 16148 - DNA, 20 bp, Artificial Sequence
  Antisense compound
caagactgtatgtggtgtgt

SEQ ID NO: 16149 - DNA, 20 bp, Artificial Sequence
  Antisense compound
gcaagactgtatgtggtgtg

SEQ ID NO: 16150 - DNA, 20 bp, Artificial Sequence
  Antisense compound
tgcaagactgtatgtggtgt

SEQ ID NO: 16151 - DNA, 20 bp, Artificial Sequence
  Antisense compound
ctgcaagactgtatgtggtg

SEQ ID NO: 16152 - DNA, 20 bp, Artificial Sequence
  Antisense compound
cctgcaagactgtatgtggt

SEQ ID NO: 16153 - DNA, 20 bp, Artificial Sequence
  Antisense compound
gcctgcaagactgtatgtgg

SEQ ID NO: 16154 - DNA, 20 bp, Artificial Sequence
  Antisense compound
agcctgcaagactgtatgtg

SEQ ID NO: 16155 - DNA, 20 bp, Artificial Sequence
  Antisense compound
cagcctgcaagactgtatgt

SEQ ID NO: 16156 - DNA, 20 bp, Artificial Sequence
  Antisense compound
acagcctgcaagactgtatg

SEQ ID NO: 16157 - DNA, 20 bp, Artificial Sequence
  Antisense compound
tacagcctgcaagactgtat

SEQ ID NO: 16158 - DNA, 20 bp, Artificial Sequence
  Antisense compound
ctacagcctgcaagactgta

SEQ ID NO: 16159 - DNA, 20 bp, Artificial Sequence
  Antisense compound
cctacagcctgcaagactgt

SEQ ID NO: 16160 - DNA, 20 bp, Artificial Sequence
  Antisense compound
acctacagcctgcaagactg

SEQ ID NO: 16161 - DNA, 20 bp, Artificial Sequence
  Antisense compound
cacctacagcctgcaagact

SEQ ID NO: 16162 - DNA, 20 bp, Artificial Sequence
  Antisense compound
gcacctacagcctgcaagac

SEQ ID NO: 16163 - DNA, 20 bp, Artificial Sequence
  Antisense compound
agcacctacagcctgcaaga

SEQ ID NO: 16164 - DNA, 20 bp, Artificial Sequence
  Antisense compound
aagcacctacagcctgcaag

SEQ ID NO: 16165 - DNA, 20 bp, Artificial Sequence
  Antisense compound
caagcacctacagcctgcaa

SEQ ID NO: 16166 - DNA, 20 bp, Artificial Sequence
  Antisense compound
acaagcacctacagcctgca

SEQ ID NO: 16167 - DNA, 20 bp, Artificial Sequence
  Antisense compound
cacaagcacctacagcctgc

SEQ ID NO: 16168 - DNA, 20 bp, Artificial Sequence
  Antisense compound
acacaagcacctacagcctg

SEQ ID NO: 16169 - DNA, 20 bp, Artificial Sequence
  Antisense compound
tacacaagcacctacagcct

SEQ ID NO: 16170 - DNA, 20 bp, Artificial Sequence
  Antisense compound
atacacaagcacctacagcc

SEQ ID NO: 16171 - DNA, 20 bp, Artificial Sequence
  Antisense compound
aatacacaagcacctacagc

SEQ ID NO: 16172 - DNA, 20 bp, Artificial Sequence
  Antisense compound
caatacacaagcacctacag

SEQ ID NO: 16173 - DNA, 20 bp, Artificial Sequence
  Antisense compound
acaatacacaagcacctaca

SEQ ID NO: 16174 - DNA, 20 bp, Artificial Sequence
  Antisense compound
cacaatacacaagcacctac

SEQ ID NO: 16175 - DNA, 20 bp, Artificial Sequence
  Antisense compound
gcacaatacacaagcaccta

SEQ ID NO: 16176 - DNA, 20 bp, Artificial Sequence
  Antisense compound
tgcacaatacacaagcacct

SEQ ID NO: 16177 - DNA, 20 bp, Artificial Sequence
  Antisense compound
ttgcacaatacacaagcacc

SEQ ID NO: 16178 - DNA, 20 bp, Artificial Sequence
  Antisense compound
attgcacaatacacaagcac

SEQ ID NO: 16179 - DNA, 20 bp, Artificial Sequence
  Antisense compound
aattgcacaatacacaagca

SEQ ID NO: 16180 - DNA, 20 bp, Artificial Sequence
  Antisense compound
gaattgcacaatacacaagc

SEQ ID NO: 16181 - DNA, 20 bp, Artificial Sequence
  Antisense compound
tgaattgcacaatacacaag

SEQ ID NO: 16182 - DNA, 20 bp, Artificial Sequence
  Antisense compound
gtgaattgcacaatacacaa

SEQ ID NO: 16183 - DNA, 20 bp, Artificial Sequence
  Antisense compound
tgtgaattgcacaatacaca

SEQ ID NO: 16184 - DNA, 20 bp, Artificial Sequence
  Antisense compound
ctgtgaattgcacaatacac

SEQ ID NO: 16185 - DNA, 20 bp, Artificial Sequence
  Antisense compound
tctgtgaattgcacaataca

SEQ ID NO: 16186 - DNA, 20 bp, Artificial Sequence
  Antisense compound
gtctgtgaattgcacaatac

SEQ ID NO: 16187 - DNA, 20 bp, Artificial Sequence
  Antisense compound
agtctgtgaattgcacaata

SEQ ID NO: 16188 - DNA, 20 bp, Artificial Sequence
  Antisense compound
aagtctgtgaattgcacaat

SEQ ID NO: 16189 - DNA, 20 bp, Artificial Sequence
  Antisense compound
gaagtctgtgaattgcacaa

SEQ ID NO: 16190 - DNA, 20 bp, Artificial Sequence
  Antisense compound
tgaagtctgtgaattgcaca

SEQ ID NO: 16191 - DNA, 20 bp, Artificial Sequence
  Antisense compound
gtgaagtctgtgaattgcac

SEQ ID NO: 16192 - DNA, 20 bp, Artificial Sequence
  Antisense compound
agtgaagtctgtgaattgca

SEQ ID NO: 16193 - DNA, 20 bp, Artificial Sequence
  Antisense compound
aagtgaagtctgtgaattgc

SEQ ID NO: 16194 - DNA, 20 bp, Artificial Sequence
  Antisense compound
gaagtgaagtctgtgaattg

SEQ ID NO: 16195 - DNA, 20 bp, Artificial Sequence
  Antisense compound
cgaagtgaagtctgtgaatt

SEQ ID NO: 16196 - DNA, 20 bp, Artificial Sequence
  Antisense compound
acgaagtgaagtctgtgaat

SEQ ID NO: 16197 - DNA, 20 bp, Artificial Sequence
  Antisense compound
aacgaagtgaagtctgtgaa

SEQ ID NO: 16198 - DNA, 20 bp, Artificial Sequence
  Antisense compound
caacgaagtgaagtctgtga

SEQ ID NO: 16199 - DNA, 20 bp, Artificial Sequence
  Antisense compound
gcaacgaagtgaagtctgtg

SEQ ID NO: 16200 - DNA, 20 bp, Artificial Sequence
  Antisense compound
cgcaacgaagtgaagtctgt

SEQ ID NO: 16201 - DNA, 20 bp, Artificial Sequence
  Antisense compound
ccgcaacgaagtgaagtctg

SEQ ID NO: 16202 - DNA, 20 bp, Artificial Sequence
  Antisense compound
accgcaacgaagtgaagtct

SEQ ID NO: 16203 - DNA, 20 bp, Artificial Sequence
  Antisense compound
caccgcaacgaagtgaagtc

SEQ ID NO: 16204 - DNA, 20 bp, Artificial Sequence
  Antisense compound
gcaccgcaacgaagtgaagt

SEQ ID NO: 16205 - DNA, 20 bp, Artificial Sequence
  Antisense compound
ggcaccgcaacgaagtgaag

SEQ ID NO: 16206 - DNA, 20 bp, Artificial Sequence
  Antisense compound
aggcaccgcaacgaagtgaa

SEQ ID NO: 16207 - DNA, 20 bp, Artificial Sequence
  Antisense compound
caggcaccgcaacgaagtga

SEQ ID NO: 16208 - DNA, 20 bp, Artificial Sequence
  Antisense compound
acaggcaccgcaacgaagtg

SEQ ID NO: 16209 - DNA, 20 bp, Artificial Sequence
  Antisense compound
tacaggcaccgcaacgaagt

SEQ ID NO: 16210 - DNA, 20 bp, Artificial Sequence
  Antisense compound
atacaggcaccgcaacgaag

SEQ ID NO: 16211 - DNA, 20 bp, Artificial Sequence
  Antisense compound
aatacaggcaccgcaacgaa

SEQ ID NO: 16212 - DNA, 20 bp, Artificial Sequence
  Antisense compound
taatacaggcaccgcaacga

SEQ ID NO: 16213 - DNA, 20 bp, Artificial Sequence
  Antisense compound
ctaatacaggcaccgcaacg

SEQ ID NO: 16214 - DNA, 20 bp, Artificial Sequence
  Antisense compound
cctaatacaggcaccgcaac

SEQ ID NO: 16215 - DNA, 20 bp, Artificial Sequence
  Antisense compound
tcctaatacaggcaccgcaa

SEQ ID NO: 16216 - DNA, 20 bp, Artificial Sequence
  Antisense compound
ctcctaatacaggcaccgca

SEQ ID NO: 16217 - DNA, 20 bp, Artificial Sequence
  Antisense compound
tctcctaatacaggcaccgc

SEQ ID NO: 16218 - DNA, 20 bp, Artificial Sequence
  Antisense compound
gtctcctaatacaggcaccg

SEQ ID NO: 16219 - DNA, 20 bp, Artificial Sequence
  Antisense compound
ggtctcctaatacaggcacc

SEQ ID NO: 16220 - DNA, 20 bp, Artificial Sequence
  Antisense compound
tggtctcctaatacaggcac

SEQ ID NO: 16221 - DNA, 20 bp, Artificial Sequence
  Antisense compound
atggtctcctaatacaggca

SEQ ID NO: 16222 - DNA, 20 bp, Artificial Sequence
  Antisense compound
aatggtctcctaatacaggc

SEQ ID NO: 16223 - DNA, 20 bp, Artificial Sequence
  Antisense compound
gaatggtctcctaatacagg

SEQ ID NO: 16224 - DNA, 20 bp, Artificial Sequence
  Antisense compound
ggaatggtctcctaatacag

SEQ ID NO: 16225 - DNA, 20 bp, Artificial Sequence
  Antisense compound
aggaatggtctcctaataca

SEQ ID NO: 16226 - DNA, 20 bp, Artificial Sequence
  Antisense compound
taggaatggtctcctaatac

SEQ ID NO: 16227 - DNA, 20 bp, Artificial Sequence
  Antisense compound
ataggaatggtctcctaata

SEQ ID NO: 16228 - DNA, 20 bp, Artificial Sequence
  Antisense compound
cataggaatggtctcctaat

SEQ ID NO: 16229 - DNA, 20 bp, Artificial Sequence
  Antisense compound
acataggaatggtctcctaa

SEQ ID NO: 16230 - DNA, 20 bp, Artificial Sequence
  Antisense compound
aacataggaatggtctccta

SEQ ID NO: 16231 - DNA, 20 bp, Artificial Sequence
  Antisense compound
caacataggaatggtctcct

SEQ ID NO: 16232 - DNA, 20 bp, Artificial Sequence
  Antisense compound
gcaacataggaatggtctcc

SEQ ID NO: 16233 - DNA, 20 bp, Artificial Sequence
  Antisense compound
tgcaacataggaatggtctc

SEQ ID NO: 16234 - DNA, 20 bp, Artificial Sequence
  Antisense compound
ttgcaacataggaatggtct

SEQ ID NO: 16235 - DNA, 20 bp, Artificial Sequence
  Antisense compound
cttgcaacataggaatggtc

SEQ ID NO: 16236 - DNA, 20 bp, Artificial Sequence
  Antisense compound
acttgcaacataggaatggt

SEQ ID NO: 16237 - DNA, 20 bp, Artificial Sequence
  Antisense compound
cacttgcaacataggaatgg

SEQ ID NO: 16238 - DNA, 20 bp, Artificial Sequence
  Antisense compound
gcacttgcaacataggaatg

SEQ ID NO: 16239 - DNA, 20 bp, Artificial Sequence
  Antisense compound
agcacttgcaacataggaat

SEQ ID NO: 16240 - DNA, 20 bp, Artificial Sequence
  Antisense compound
cagcacttgcaacataggaa

SEQ ID NO: 16241 - DNA, 20 bp, Artificial Sequence
  Antisense compound
gcagcacttgcaacatagga

SEQ ID NO: 16242 - DNA, 20 bp, Artificial Sequence
  Antisense compound
agcagcacttgcaacatagg

SEQ ID NO: 16243 - DNA, 20 bp, Artificial Sequence
  Antisense compound
tagcagcacttgcaacatag

SEQ ID NO: 16244 - DNA, 20 bp, Artificial Sequence
  Antisense compound
atagcagcacttgcaacata

SEQ ID NO: 16245 - DNA, 20 bp, Artificial Sequence
  Antisense compound
catagcagcacttgcaacat

SEQ ID NO: 16246 - DNA, 20 bp, Artificial Sequence
  Antisense compound
tcatagcagcacttgcaaca

SEQ ID NO: 16247 - DNA, 20 bp, Artificial Sequence
  Antisense compound
gtcatagcagcacttgcaac

SEQ ID NO: 16248 - DNA, 20 bp, Artificial Sequence
  Antisense compound
ggtcatagcagcacttgcaa

SEQ ID NO: 16249 - DNA, 20 bp, Artificial Sequence
  Antisense compound
tggtcatagcagcacttgca

SEQ ID NO: 16250 - DNA, 20 bp, Artificial Sequence
  Antisense compound
atggtcatagcagcacttgc

SEQ ID NO: 16251 - DNA, 20 bp, Artificial Sequence
  Antisense compound
catggtcatagcagcacttg

SEQ ID NO: 16252 - DNA, 20 bp, Artificial Sequence
  Antisense compound
acatggtcatagcagcactt

SEQ ID NO: 16253 - DNA, 20 bp, Artificial Sequence
  Antisense compound
gacatggtcatagcagcact

SEQ ID NO: 16254 - DNA, 20 bp, Artificial Sequence
  Antisense compound
tgacatggtcatagcagcac

SEQ ID NO: 16255 - DNA, 20 bp, Artificial Sequence
  Antisense compound
atgacatggtcatagcagca

SEQ ID NO: 16256 - DNA, 20 bp, Artificial Sequence
  Antisense compound
aatgacatggtcatagcagc

SEQ ID NO: 16257 - DNA, 20 bp, Artificial Sequence
  Antisense compound
aaatgacatggtcatagcag

SEQ ID NO: 16258 - DNA, 20 bp, Artificial Sequence
  Antisense compound
gaaatgacatggtcatagca

SEQ ID NO: 16259 - DNA, 20 bp, Artificial Sequence
  Antisense compound
tgaaatgacatggtcatagc

SEQ ID NO: 16260 - DNA, 20 bp, Artificial Sequence
  Antisense compound
ttgaaatgacatggtcatag

SEQ ID NO: 16261 - DNA, 20 bp, Artificial Sequence
  Antisense compound
gttgaaatgacatggtcata

SEQ ID NO: 16262 - DNA, 20 bp, Artificial Sequence
  Antisense compound
tgttgaaatgacatggtcat

SEQ ID NO: 16263 - DNA, 20 bp, Artificial Sequence
  Antisense compound
atgttgaaatgacatggtca

SEQ ID NO: 16264 - DNA, 20 bp, Artificial Sequence
  Antisense compound
gatgttgaaatgacatggtc

SEQ ID NO: 16265 - DNA, 20 bp, Artificial Sequence
  Antisense compound
tgatgttgaaatgacatggt

SEQ ID NO: 16266 - DNA, 20 bp, Artificial Sequence
  Antisense compound
gtgatgttgaaatgacatgg

SEQ ID NO: 16267 - DNA, 20 bp, Artificial Sequence
  Antisense compound
tgtgatgttgaaatgacatg

SEQ ID NO: 16268 - DNA, 20 bp, Artificial Sequence
  Antisense compound
gtgtgatgttgaaatgacat

SEQ ID NO: 16269 - DNA, 20 bp, Artificial Sequence
  Antisense compound
tgtgtgatgttgaaatgaca

SEQ ID NO: 16270 - DNA, 20 bp, Artificial Sequence
  Antisense compound
ttgtgtgatgttgaaatgac

SEQ ID NO: 16271 - DNA, 20 bp, Artificial Sequence
  Antisense compound
tttgtgtgatgttgaaatga

SEQ ID NO: 16272 - DNA, 20 bp, Artificial Sequence
  Antisense compound
atttgtgtgatgttgaaatg

SEQ ID NO: 16273 - DNA, 20 bp, Artificial Sequence
  Antisense compound
aatttgtgtgatgttgaaat

SEQ ID NO: 16274 - DNA, 20 bp, Artificial Sequence
  Antisense compound
taatttgtgtgatgttgaaa

SEQ ID NO: 16275 - DNA, 20 bp, Artificial Sequence
  Antisense compound
ctaatttgtgtgatgttgaa

SEQ ID NO: 16276 - DNA, 20 bp, Artificial Sequence
  Antisense compound
actaatttgtgtgatgttga

SEQ ID NO: 16277 - DNA, 20 bp, Artificial Sequence
  Antisense compound
cactaatttgtgtgatgttg

SEQ ID NO: 16278 - DNA, 20 bp, Artificial Sequence
  Antisense compound
acactaatttgtgtgatgtt

SEQ ID NO: 16279 - DNA, 20 bp, Artificial Sequence
  Antisense compound
aacactaatttgtgtgatgt

SEQ ID NO: 16280 - DNA, 20 bp, Artificial Sequence
  Antisense compound
caacactaatttgtgtgatg

SEQ ID NO: 16281 - DNA, 20 bp, Artificial Sequence
  Antisense compound
acaacactaatttgtgtgat

SEQ ID NO: 16282 - DNA, 20 bp, Artificial Sequence
  Antisense compound
gacaacactaatttgtgtga

SEQ ID NO: 16283 - DNA, 20 bp, Artificial Sequence
  Antisense compound
agacaacactaatttgtgtg

SEQ ID NO: 16284 - DNA, 20 bp, Artificial Sequence
  Antisense compound
cagacaacactaatttgtgt

SEQ ID NO: 16285 - DNA, 20 bp, Artificial Sequence
  Antisense compound
acagacaacactaatttgtg

SEQ ID NO: 16286 - DNA, 20 bp, Artificial Sequence
  Antisense compound
aacagacaacactaatttgt

SEQ ID NO: 16287 - DNA, 20 bp, Artificial Sequence
  Antisense compound
taacagacaacactaatttg

SEQ ID NO: 16288 - DNA, 20 bp, Artificial Sequence
  Antisense compound
ttaacagacaacactaattt

SEQ ID NO: 16289 - DNA, 20 bp, Artificial Sequence
  Antisense compound
attaacagacaacactaatt

SEQ ID NO: 16290 - DNA, 20 bp, Artificial Sequence
  Antisense compound
gattaacagacaacactaat

SEQ ID NO: 16291 - DNA, 20 bp, Artificial Sequence
  Antisense compound
ggattaacagacaacactaa

SEQ ID NO: 16292 - DNA, 20 bp, Artificial Sequence
  Antisense compound
gggattaacagacaacacta

SEQ ID NO: 16293 - DNA, 20 bp, Artificial Sequence
  Antisense compound
agggattaacagacaacact

SEQ ID NO: 16294 - DNA, 20 bp, Artificial Sequence
  Antisense compound
tagggattaacagacaacac

SEQ ID NO: 16295 - DNA, 20 bp, Artificial Sequence
  Antisense compound
atagggattaacagacaaca

SEQ ID NO: 16296 - DNA, 20 bp, Artificial Sequence
  Antisense compound
catagggattaacagacaac

SEQ ID NO: 16297 - DNA, 20 bp, Artificial Sequence
  Antisense compound
acatagggattaacagacaa

SEQ ID NO: 16298 - DNA, 20 bp, Artificial Sequence
  Antisense compound
aacatagggattaacagaca

SEQ ID NO: 16299 - DNA, 20 bp, Artificial Sequence
  Antisense compound
aaacatagggattaacagac

SEQ ID NO: 16300 - DNA, 20 bp, Artificial Sequence
  Antisense compound
caaacatagggattaacaga

SEQ ID NO: 16301 - DNA, 20 bp, Artificial Sequence
  Antisense compound
gcaaacatagggattaacag

SEQ ID NO: 16302 - DNA, 20 bp, Artificial Sequence
  Antisense compound
tgcaaacatagggattaaca

SEQ ID NO: 16303 - DNA, 20 bp, Artificial Sequence
  Antisense compound
ttgcaaacatagggattaac

SEQ ID NO: 16304 - DNA, 20 bp, Artificial Sequence
  Antisense compound
attgcaaacatagggattaa

SEQ ID NO: 16305 - DNA, 20 bp, Artificial Sequence
  Antisense compound
cattgcaaacatagggatta

SEQ ID NO: 16306 - DNA, 20 bp, Artificial Sequence
  Antisense compound
gcattgcaaacatagggatt

SEQ ID NO: 16307 - DNA, 20 bp, Artificial Sequence
  Antisense compound
ggcattgcaaacatagggat

SEQ ID NO: 16308 - DNA, 20 bp, Artificial Sequence
  Antisense compound
gggcattgcaaacataggga

SEQ ID NO: 16309 - DNA, 20 bp, Artificial Sequence
  Antisense compound
ggggcattgcaaacataggg

SEQ ID NO: 16310 - DNA, 20 bp, Artificial Sequence
  Antisense compound
tggggcattgcaaacatagg

SEQ ID NO: 16311 - DNA, 20 bp, Artificial Sequence
  Antisense compound
ctggggcattgcaaacatag

SEQ ID NO: 16312 - DNA, 20 bp, Artificial Sequence
  Antisense compound
cctggggcattgcaaacata

SEQ ID NO: 16313 - DNA, 20 bp, Artificial Sequence
  Antisense compound
acctggggcattgcaaacat

SEQ ID NO: 16314 - DNA, 20 bp, Artificial Sequence
  Antisense compound
aacctggggcattgcaaaca

SEQ ID NO: 16315 - DNA, 20 bp, Artificial Sequence
  Antisense compound
caacctggggcattgcaaac

SEQ ID NO: 16316 - DNA, 20 bp, Artificial Sequence
  Antisense compound
acaacctggggcattgcaaa

SEQ ID NO: 16317 - DNA, 20 bp, Artificial Sequence
  Antisense compound
cacaacctggggcattgcaa

SEQ ID NO: 16318 - DNA, 20 bp, Artificial Sequence
  Antisense compound
tcacaacctggggcattgca

SEQ ID NO: 16319 - DNA, 20 bp, Artificial Sequence
  Antisense compound
atcacaacctggggcattgc

SEQ ID NO: 16320 - DNA, 20 bp, Artificial Sequence
  Antisense compound
catcacaacctggggcattg

SEQ ID NO: 16321 - DNA, 20 bp, Artificial Sequence
  Antisense compound
acatcacaacctggggcatt

SEQ ID NO: 16322 - DNA, 20 bp, Artificial Sequence
  Antisense compound
gacatcacaacctggggcat

SEQ ID NO: 16323 - DNA, 20 bp, Artificial Sequence
  Antisense compound
tgacatcacaacctggggca

SEQ ID NO: 16324 - DNA, 20 bp, Artificial Sequence
  Antisense compound
gtgacatcacaacctggggc

SEQ ID NO: 16325 - DNA, 20 bp, Artificial Sequence
  Antisense compound
agtgacatcacaacctgggg

SEQ ID NO: 16326 - DNA, 20 bp, Artificial Sequence
  Antisense compound
cagtgacatcacaacctggg

SEQ ID NO: 16327 - DNA, 20 bp, Artificial Sequence
  Antisense compound
tcagtgacatcacaacctgg

SEQ ID NO: 16328 - DNA, 20 bp, Artificial Sequence
  Antisense compound
atcagtgacatcacaacctg

SEQ ID NO: 16329 - DNA, 20 bp, Artificial Sequence
  Antisense compound
catcagtgacatcacaacct

SEQ ID NO: 16330 - DNA, 20 bp, Artificial Sequence
  Antisense compound
acatcagtgacatcacaacc

SEQ ID NO: 16331 - DNA, 20 bp, Artificial Sequence
  Antisense compound
cacatcagtgacatcacaac

SEQ ID NO: 16332 - DNA, 20 bp, Artificial Sequence
  Antisense compound
tcacatcagtgacatcacaa

SEQ ID NO: 16333 - DNA, 20 bp, Artificial Sequence
  Antisense compound
gtcacatcagtgacatcaca

SEQ ID NO: 16334 - DNA, 20 bp, Artificial Sequence
  Antisense compound
tgtcacatcagtgacatcac

SEQ ID NO: 16335 - DNA, 20 bp, Artificial Sequence
  Antisense compound
gtgtcacatcagtgacatca

SEQ ID NO: 16336 - DNA, 20 bp, Artificial Sequence
  Antisense compound
tgtgtcacatcagtgacatc

SEQ ID NO: 16337 - DNA, 20 bp, Artificial Sequence
  Antisense compound
ttgtgtcacatcagtgacat

SEQ ID NO: 16338 - DNA, 20 bp, Artificial Sequence
  Antisense compound
gttgtgtcacatcagtgaca

SEQ ID NO: 16339 - DNA, 20 bp, Artificial Sequence
  Antisense compound
agttgtgtcacatcagtgac

SEQ ID NO: 16340 - DNA, 20 bp, Artificial Sequence
  Antisense compound
cagttgtgtcacatcagtga

SEQ ID NO: 16341 - DNA, 20 bp, Artificial Sequence
  Antisense compound
acagttgtgtcacatcagtg

SEQ ID NO: 16342 - DNA, 20 bp, Artificial Sequence
  Antisense compound
tacagttgtgtcacatcagt

SEQ ID NO: 16343 - DNA, 20 bp, Artificial Sequence
  Antisense compound
atacagttgtgtcacatcag

SEQ ID NO: 16344 - DNA, 20 bp, Artificial Sequence
  Antisense compound
gatacagttgtgtcacatca

SEQ ID NO: 16345 - DNA, 20 bp, Artificial Sequence
  Antisense compound
agatacagttgtgtcacatc

SEQ ID NO: 16346 - DNA, 20 bp, Artificial Sequence
  Antisense compound
tagatacagttgtgtcacat

SEQ ID NO: 16347 - DNA, 20 bp, Artificial Sequence
  Antisense compound
ctagatacagttgtgtcaca

SEQ ID NO: 16348 - DNA, 20 bp, Artificial Sequence
  Antisense compound
cctagatacagttgtgtcac

SEQ ID NO: 16349 - DNA, 20 bp, Artificial Sequence
  Antisense compound
tcctagatacagttgtgtca

SEQ ID NO: 16350 - DNA, 20 bp, Artificial Sequence
  Antisense compound
ctcctagatacagttgtgtc

SEQ ID NO: 16351 - DNA, 20 bp, Artificial Sequence
  Antisense compound
cctcctagatacagttgtgt

SEQ ID NO: 16352 - DNA, 20 bp, Artificial Sequence
  Antisense compound
acctcctagatacagttgtg

SEQ ID NO: 16353 - DNA, 20 bp, Artificial Sequence
  Antisense compound
tacctcctagatacagttgt

SEQ ID NO: 16354 - DNA, 20 bp, Artificial Sequence
  Antisense compound
atacctcctagatacagttg

SEQ ID NO: 16355 - DNA, 20 bp, Artificial Sequence
  Antisense compound
catacctcctagatacagtt

SEQ ID NO: 16356 - DNA, 20 bp, Artificial Sequence
  Antisense compound
tcatacctcctagatacagt

SEQ ID NO: 16357 - DNA, 20 bp, Artificial Sequence
  Antisense compound
ctcatacctcctagatacag

SEQ ID NO: 16358 - DNA, 20 bp, Artificial Sequence
  Antisense compound
gctcatacctcctagataca

SEQ ID NO: 16359 - DNA, 20 bp, Artificial Sequence
  Antisense compound
agctcatacctcctagatac

SEQ ID NO: 16360 - DNA, 20 bp, Artificial Sequence
  Antisense compound
tagctcatacctcctagata

SEQ ID NO: 16361 - DNA, 20 bp, Artificial Sequence
  Antisense compound
atagctcatacctcctagat

SEQ ID NO: 16362 - DNA, 20 bp, Artificial Sequence
  Antisense compound
aatagctcatacctcctaga

SEQ ID NO: 16363 - DNA, 20 bp, Artificial Sequence
  Antisense compound
taatagctcatacctcctag

SEQ ID NO: 16364 - DNA, 20 bp, Artificial Sequence
  Antisense compound
ataatagctcatacctccta

SEQ ID NO: 16365 - DNA, 20 bp, Artificial Sequence
  Antisense compound
aataatagctcatacctcct

SEQ ID NO: 16366 - DNA, 20 bp, Artificial Sequence
  Antisense compound
caataatagctcatacctcc

SEQ ID NO: 16367 - DNA, 20 bp, Artificial Sequence
  Antisense compound
gcaataatagctcatacctc

SEQ ID NO: 16368 - DNA, 20 bp, Artificial Sequence
  Antisense compound
tgcaataatagctcatacct

SEQ ID NO: 16369 - DNA, 20 bp, Artificial Sequence
  Antisense compound
ttgcaataatagctcatacc

SEQ ID NO: 16370 - DNA, 20 bp, Artificial Sequence
  Antisense compound
cttgcaataatagctcatac

SEQ ID NO: 16371 - DNA, 20 bp, Artificial Sequence
  Antisense compound
acttgcaataatagctcata

SEQ ID NO: 16372 - DNA, 20 bp, Artificial Sequence
  Antisense compound
gacttgcaataatagctcat

SEQ ID NO: 16373 - DNA, 20 bp, Artificial Sequence
  Antisense compound
tgacttgcaataatagctca

SEQ ID NO: 16374 - DNA, 20 bp, Artificial Sequence
  Antisense compound
gtgacttgcaataatagctc

SEQ ID NO: 16375 - DNA, 20 bp, Artificial Sequence
  Antisense compound
tgtgacttgcaataatagct

SEQ ID NO: 16376 - DNA, 20 bp, Artificial Sequence
  Antisense compound
atgtgacttgcaataatagc

SEQ ID NO: 16377 - DNA, 20 bp, Artificial Sequence
  Antisense compound
tatgtgacttgcaataatag

SEQ ID NO: 16378 - DNA, 20 bp, Artificial Sequence
  Antisense compound
ttatgtgacttgcaataata

SEQ ID NO: 16379 - DNA, 20 bp, Artificial Sequence
  Antisense compound
cttatgtgacttgcaataat

SEQ ID NO: 16380 - DNA, 20 bp, Artificial Sequence
  Antisense compound
gcttatgtgacttgcaataa

SEQ ID NO: 16381 - DNA, 20 bp, Artificial Sequence
  Antisense compound
ggcttatgtgacttgcaata

SEQ ID NO: 16382 - DNA, 20 bp, Artificial Sequence
  Antisense compound
aggcttatgtgacttgcaat

SEQ ID NO: 16383 - DNA, 20 bp, Artificial Sequence
  Antisense compound
gaggcttatgtgacttgcaa

SEQ ID NO: 16384 - DNA, 20 bp, Artificial Sequence
  Antisense compound
ggaggcttatgtgacttgca

SEQ ID NO: 16385 - DNA, 20 bp, Artificial Sequence
  Antisense compound
gggaggcttatgtgacttgc

SEQ ID NO: 16386 - DNA, 20 bp, Artificial Sequence
  Antisense compound
tgggaggcttatgtgacttg

SEQ ID NO: 16387 - DNA, 20 bp, Artificial Sequence
  Antisense compound
atgggaggcttatgtgactt

SEQ ID NO: 16388 - DNA, 20 bp, Artificial Sequence
  Antisense compound
aatgggaggcttatgtgact

SEQ ID NO: 16389 - DNA, 20 bp, Artificial Sequence
  Antisense compound
taatgggaggcttatgtgac

SEQ ID NO: 16390 - DNA, 20 bp, Artificial Sequence
  Antisense compound
ctaatgggaggcttatgtga

SEQ ID NO: 16391 - DNA, 20 bp, Artificial Sequence
  Antisense compound
actaatgggaggcttatgtg

SEQ ID NO: 16392 - DNA, 20 bp, Artificial Sequence
  Antisense compound
aactaatgggaggcttatgt

SEQ ID NO: 16393 - DNA, 20 bp, Artificial Sequence
  Antisense compound
aaactaatgggaggcttatg

SEQ ID NO: 16394 - DNA, 20 bp, Artificial Sequence
  Antisense compound
aaaactaatgggaggcttat

SEQ ID NO: 16395 - DNA, 20 bp, Artificial Sequence
  Antisense compound
gaaaactaatgggaggctta

SEQ ID NO: 16396 - DNA, 20 bp, Artificial Sequence
  Antisense compound
ggaaaactaatgggaggctt

SEQ ID NO: 16397 - DNA, 20 bp, Artificial Sequence
  Antisense compound
tggaaaactaatgggaggct

SEQ ID NO: 16398 - DNA, 20 bp, Artificial Sequence
  Antisense compound
atggaaaactaatgggaggc

SEQ ID NO: 16399 - DNA, 20 bp, Artificial Sequence
  Antisense compound
aatggaaaactaatgggagg

SEQ ID NO: 16400 - DNA, 20 bp, Artificial Sequence
  Antisense compound
taatggaaaactaatgggag

SEQ ID NO: 16401 - DNA, 20 bp, Artificial Sequence
  Antisense compound
ataatggaaaactaatggga

SEQ ID NO: 16402 - DNA, 20 bp, Artificial Sequence
  Antisense compound
cataatggaaaactaatggg

SEQ ID NO: 16403 - DNA, 20 bp, Artificial Sequence
  Antisense compound
acataatggaaaactaatgg

SEQ ID NO: 16404 - DNA, 20 bp, Artificial Sequence
  Antisense compound
cacataatggaaaactaatg

SEQ ID NO: 16405 - DNA, 20 bp, Artificial Sequence
  Antisense compound
gcacataatggaaaactaat

SEQ ID NO: 16406 - DNA, 20 bp, Artificial Sequence
  Antisense compound
agcacataatggaaaactaa

SEQ ID NO: 16407 - DNA, 20 bp, Artificial Sequence
  Antisense compound
tagcacataatggaaaacta

SEQ ID NO: 16408 - DNA, 20 bp, Artificial Sequence
  Antisense compound
ttagcacataatggaaaact

SEQ ID NO: 16409 - DNA, 20 bp, Artificial Sequence
  Antisense compound
attagcacataatggaaaac

SEQ ID NO: 16410 - DNA, 20 bp, Artificial Sequence
  Antisense compound
cattagcacataatggaaaa

SEQ ID NO: 16411 - DNA, 20 bp, Artificial Sequence
  Antisense compound
ccattagcacataatggaaa

SEQ ID NO: 16412 - DNA, 20 bp, Artificial Sequence
  Antisense compound
accattagcacataatggaa

SEQ ID NO: 16413 - DNA, 20 bp, Artificial Sequence
  Antisense compound
gaccattagcacataatgga

SEQ ID NO: 16414 - DNA, 20 bp, Artificial Sequence
  Antisense compound
tgaccattagcacataatgg

SEQ ID NO: 16415 - DNA, 20 bp, Artificial Sequence
  Antisense compound
ctgaccattagcacataatg

SEQ ID NO: 16416 - DNA, 20 bp, Artificial Sequence
  Antisense compound
cctgaccattagcacataat

SEQ ID NO: 16417 - DNA, 20 bp, Artificial Sequence
  Antisense compound
acctgaccattagcacataa

SEQ ID NO: 16418 - DNA, 20 bp, Artificial Sequence
  Antisense compound
aacctgaccattagcacata

SEQ ID NO: 16419 - DNA, 20 bp, Artificial Sequence
  Antisense compound
aaacctgaccattagcacat

SEQ ID NO: 16420 - DNA, 20 bp, Artificial Sequence
  Antisense compound
aaaacctgaccattagcaca

SEQ ID NO: 16421 - DNA, 20 bp, Artificial Sequence
  Antisense compound
aaaaacctgaccattagcac

SEQ ID NO: 16422 - DNA, 20 bp, Artificial Sequence
  Antisense compound
caaaaacctgaccattagca

SEQ ID NO: 16423 - DNA, 20 bp, Artificial Sequence
  Antisense compound
ccaaaaacctgaccattagc

SEQ ID NO: 16424 - DNA, 20 bp, Artificial Sequence
  Antisense compound
accaaaaacctgaccattag

SEQ ID NO: 16425 - DNA, 20 bp, Artificial Sequence
  Antisense compound
aaccaaaaacctgaccatta

SEQ ID NO: 16426 - DNA, 20 bp, Artificial Sequence
  Antisense compound
aaaccaaaaacctgaccatt

SEQ ID NO: 16427 - DNA, 20 bp, Artificial Sequence
  Antisense compound
taaaccaaaaacctgaccat

SEQ ID NO: 16428 - DNA, 20 bp, Artificial Sequence
  Antisense compound
ataaaccaaaaacctgacca

SEQ ID NO: 16429 - DNA, 20 bp, Artificial Sequence
  Antisense compound
tataaaccaaaaacctgacc

SEQ ID NO: 16430 - DNA, 20 bp, Artificial Sequence
  Antisense compound
gtataaaccaaaaacctgac

SEQ ID NO: 16431 - DNA, 20 bp, Artificial Sequence
  Antisense compound
tgtataaaccaaaaacctga

SEQ ID NO: 16432 - DNA, 20 bp, Artificial Sequence
  Antisense compound
ttgtataaaccaaaaacctg

SEQ ID NO: 16433 - DNA, 20 bp, Artificial Sequence
  Antisense compound
tttgtataaaccaaaaacct

SEQ ID NO: 16434 - DNA, 20 bp, Artificial Sequence
  Antisense compound
ttttgtataaaccaaaaacc

SEQ ID NO: 16435 - DNA, 20 bp, Artificial Sequence
  Antisense compound
tttttgtataaaccaaaaac

SEQ ID NO: 16436 - DNA, 20 bp, Artificial Sequence
  Antisense compound
gtttttgtataaaccaaaaa

SEQ ID NO: 16437 - DNA, 20 bp, Artificial Sequence
  Antisense compound
tgtttttgtataaaccaaaa

SEQ ID NO: 16438 - DNA, 20 bp, Artificial Sequence
  Antisense compound
gtgtttttgtataaaccaaa

SEQ ID NO: 16439 - DNA, 20 bp, Artificial Sequence
  Antisense compound
tgtgtttttgtataaaccaa

SEQ ID NO: 16440 - DNA, 20 bp, Artificial Sequence
  Antisense compound
atgtgtttttgtataaacca

SEQ ID NO: 16441 - DNA, 20 bp, Artificial Sequence
  Antisense compound
catgtgtttttgtataaacc

SEQ ID NO: 16442 - DNA, 20 bp, Artificial Sequence
  Antisense compound
acatgtgtttttgtataaac

SEQ ID NO: 16443 - DNA, 20 bp, Artificial Sequence
  Antisense compound
cacatgtgtttttgtataaa

SEQ ID NO: 16444 - DNA, 20 bp, Artificial Sequence
  Antisense compound
acacatgtgtttttgtataa

SEQ ID NO: 16445 - DNA, 20 bp, Artificial Sequence
  Antisense compound
tacacatgtgtttttgtata

SEQ ID NO: 16446 - DNA, 20 bp, Artificial Sequence
  Antisense compound
ctacacatgtgtttttgtat

SEQ ID NO: 16447 - DNA, 20 bp, Artificial Sequence
  Antisense compound
cctacacatgtgtttttgta

SEQ ID NO: 16448 - DNA, 20 bp, Artificial Sequence
  Antisense compound
gcctacacatgtgtttttgt

SEQ ID NO: 16449 - DNA, 20 bp, Artificial Sequence
  Antisense compound
tgcctacacatgtgtttttg

SEQ ID NO: 16450 - DNA, 20 bp, Artificial Sequence
  Antisense compound
ctgcctacacatgtgttttt

SEQ ID NO: 16451 - DNA, 20 bp, Artificial Sequence
  Antisense compound
actgcctacacatgtgtttt

SEQ ID NO: 16452 - DNA, 20 bp, Artificial Sequence
  Antisense compound
cactgcctacacatgtgttt

SEQ ID NO: 16453 - DNA, 20 bp, Artificial Sequence
  Antisense compound
tcactgcctacacatgtgtt

SEQ ID NO: 16454 - DNA, 20 bp, Artificial Sequence
  Antisense compound
gtcactgcctacacatgtgt

SEQ ID NO: 16455 - DNA, 20 bp, Artificial Sequence
  Antisense compound
tgtcactgcctacacatgtg

SEQ ID NO: 16456 - DNA, 20 bp, Artificial Sequence
  Antisense compound
ttgtcactgcctacacatgt

SEQ ID NO: 16457 - DNA, 20 bp, Artificial Sequence
  Antisense compound
attgtcactgcctacacatg

SEQ ID NO: 16458 - DNA, 20 bp, Artificial Sequence
  Antisense compound
cattgtcactgcctacacat

SEQ ID NO: 16459 - DNA, 20 bp, Artificial Sequence
  Antisense compound
acattgtcactgcctacaca

SEQ ID NO: 16460 - DNA, 20 bp, Artificial Sequence
  Antisense compound
gacattgtcactgcctacac

SEQ ID NO: 16461 - DNA, 20 bp, Artificial Sequence
  Antisense compound
tgacattgtcactgcctaca

SEQ ID NO: 16462 - DNA, 20 bp, Artificial Sequence
  Antisense compound
gtgacattgtcactgcctac

SEQ ID NO: 16463 - DNA, 20 bp, Artificial Sequence
  Antisense compound
agtgacattgtcactgccta

SEQ ID NO: 16464 - DNA, 20 bp, Artificial Sequence
  Antisense compound
cagtgacattgtcactgcct

SEQ ID NO: 16465 - DNA, 20 bp, Artificial Sequence
  Antisense compound
tcagtgacattgtcactgcc

SEQ ID NO: 16466 - DNA, 20 bp, Artificial Sequence
  Antisense compound
gtcagtgacattgtcactgc

SEQ ID NO: 16467 - DNA, 20 bp, Artificial Sequence
  Antisense compound
agtcagtgacattgtcactg

SEQ ID NO: 16468 - DNA, 20 bp, Artificial Sequence
  Antisense compound
aagtcagtgacattgtcact

SEQ ID NO: 16469 - DNA, 20 bp, Artificial Sequence
  Antisense compound
gaagtcagtgacattgtcac

SEQ ID NO: 16470 - DNA, 20 bp, Artificial Sequence
  Antisense compound
tgaagtcagtgacattgtca

SEQ ID NO: 16471 - DNA, 20 bp, Artificial Sequence
  Antisense compound
ttgaagtcagtgacattgtc

SEQ ID NO: 16472 - DNA, 20 bp, Artificial Sequence
  Antisense compound
attgaagtcagtgacattgt

SEQ ID NO: 16473 - DNA, 20 bp, Artificial Sequence
  Antisense compound
cattgaagtcagtgacattg

SEQ ID NO: 16474 - DNA, 20 bp, Artificial Sequence
  Antisense compound
gcattgaagtcagtgacatt

SEQ ID NO: 16475 - DNA, 20 bp, Artificial Sequence
  Antisense compound
cgcattgaagtcagtgacat

SEQ ID NO: 16476 - DNA, 20 bp, Artificial Sequence
  Antisense compound
tcgcattgaagtcagtgaca

SEQ ID NO: 16477 - DNA, 20 bp, Artificial Sequence
  Antisense compound
atcgcattgaagtcagtgac

SEQ ID NO: 16478 - DNA, 20 bp, Artificial Sequence
  Antisense compound
tatcgcattgaagtcagtga

SEQ ID NO: 16479 - DNA, 20 bp, Artificial Sequence
  Antisense compound
ctatcgcattgaagtcagtg

SEQ ID NO: 16480 - DNA, 20 bp, Artificial Sequence
  Antisense compound
gctatcgcattgaagtcagt

SEQ ID NO: 16481 - DNA, 20 bp, Artificial Sequence
  Antisense compound
tgctatcgcattgaagtcag

SEQ ID NO: 16482 - DNA, 20 bp, Artificial Sequence
  Antisense compound
ttgctatcgcattgaagtca

SEQ ID NO: 16483 - DNA, 20 bp, Artificial Sequence
  Antisense compound
gttgctatcgcattgaagtc

SEQ ID NO: 16484 - DNA, 20 bp, Artificial Sequence
  Antisense compound
tgttgctatcgcattgaagt

SEQ ID NO: 16485 - DNA, 20 bp, Artificial Sequence
  Antisense compound
atgttgctatcgcattgaag

SEQ ID NO: 16486 - DNA, 20 bp, Artificial Sequence
  Antisense compound
catgttgctatcgcattgaa

SEQ ID NO: 16487 - DNA, 20 bp, Artificial Sequence
  Antisense compound
acatgttgctatcgcattga

SEQ ID NO: 16488 - DNA, 20 bp, Artificial Sequence
  Antisense compound
cacatgttgctatcgcattg

SEQ ID NO: 16489 - DNA, 20 bp, Artificial Sequence
  Antisense compound
tcacatgttgctatcgcatt

SEQ ID NO: 16490 - DNA, 20 bp, Artificial Sequence
  Antisense compound
atcacatgttgctatcgcat

SEQ ID NO: 16491 - DNA, 20 bp, Artificial Sequence
  Antisense compound
aatcacatgttgctatcgca

SEQ ID NO: 16492 - DNA, 20 bp, Artificial Sequence
  Antisense compound
caatcacatgttgctatcgc

SEQ ID NO: 16493 - DNA, 20 bp, Artificial Sequence
  Antisense compound
ccaatcacatgttgctatcg

SEQ ID NO: 16494 - DNA, 20 bp, Artificial Sequence
  Antisense compound
tccaatcacatgttgctatc

SEQ ID NO: 16495 - DNA, 20 bp, Artificial Sequence
  Antisense compound
gtccaatcacatgttgctat

SEQ ID NO: 16496 - DNA, 20 bp, Artificial Sequence
  Antisense compound
agtccaatcacatgttgcta

SEQ ID NO: 16497 - DNA, 20 bp, Artificial Sequence
  Antisense compound
tagtccaatcacatgttgct

SEQ ID NO: 16498 - DNA, 20 bp, Artificial Sequence
  Antisense compound
ttagtccaatcacatgttgc

SEQ ID NO: 16499 - DNA, 20 bp, Artificial Sequence
  Antisense compound
attagtccaatcacatgttg

SEQ ID NO: 16500 - DNA, 20 bp, Artificial Sequence
  Antisense compound
cattagtccaatcacatgtt

SEQ ID NO: 16501 - DNA, 20 bp, Artificial Sequence
  Antisense compound
gcattagtccaatcacatgt

SEQ ID NO: 16502 - DNA, 20 bp, Artificial Sequence
  Antisense compound
agcattagtccaatcacatg

SEQ ID NO: 16503 - DNA, 20 bp, Artificial Sequence
  Antisense compound
cagcattagtccaatcacat

SEQ ID NO: 16504 - DNA, 20 bp, Artificial Sequence
  Antisense compound
ccagcattagtccaatcaca

SEQ ID NO: 16505 - DNA, 20 bp, Artificial Sequence
  Antisense compound
gccagcattagtccaatcac

SEQ ID NO: 16506 - DNA, 20 bp, Artificial Sequence
  Antisense compound
cgccagcattagtccaatca

SEQ ID NO: 16507 - DNA, 20 bp, Artificial Sequence
  Antisense compound
tcgccagcattagtccaatc

SEQ ID NO: 16508 - DNA, 20 bp, Artificial Sequence
  Antisense compound
atcgccagcattagtccaat

SEQ ID NO: 16509 - DNA, 20 bp, Artificial Sequence
  Antisense compound
aatcgccagcattagtccaa

SEQ ID NO: 16510 - DNA, 20 bp, Artificial Sequence
  Antisense compound
taatcgccagcattagtcca

SEQ ID NO: 16511 - DNA, 20 bp, Artificial Sequence
  Antisense compound
gtaatcgccagcattagtcc

SEQ ID NO: 16512 - DNA, 20 bp, Artificial Sequence
  Antisense compound
tgtaatcgccagcattagtc

SEQ ID NO: 16513 - DNA, 20 bp, Artificial Sequence
  Antisense compound
atgtaatcgccagcattagt

SEQ ID NO: 16514 - DNA, 20 bp, Artificial Sequence
  Antisense compound
tatgtaatcgccagcattag

SEQ ID NO: 16515 - DNA, 20 bp, Artificial Sequence
  Antisense compound
gtatgtaatcgccagcatta

SEQ ID NO: 16516 - DNA, 20 bp, Artificial Sequence
  Antisense compound
agtatgtaatcgccagcatt

SEQ ID NO: 16517 - DNA, 20 bp, Artificial Sequence
  Antisense compound
aagtatgtaatcgccagcat

SEQ ID NO: 16518 - DNA, 20 bp, Artificial Sequence
  Antisense compound
caagtatgtaatcgccagca

SEQ ID NO: 16519 - DNA, 20 bp, Artificial Sequence
  Antisense compound
gcaagtatgtaatcgccagc

SEQ ID NO: 16520 - DNA, 20 bp, Artificial Sequence
  Antisense compound
ggcaagtatgtaatcgccag

SEQ ID NO: 16521 - DNA, 20 bp, Artificial Sequence
  Antisense compound
tggcaagtatgtaatcgcca

SEQ ID NO: 16522 - DNA, 20 bp, Artificial Sequence
  Antisense compound
ttggcaagtatgtaatcgcc

SEQ ID NO: 16523 - DNA, 20 bp, Artificial Sequence
  Antisense compound
gttggcaagtatgtaatcgc

SEQ ID NO: 16524 - DNA, 20 bp, Artificial Sequence
  Antisense compound
tgttggcaagtatgtaatcg

SEQ ID NO: 16525 - DNA, 20 bp, Artificial Sequence
  Antisense compound
gtgttggcaagtatgtaatc

SEQ ID NO: 16526 - DNA, 20 bp, Artificial Sequence
  Antisense compound
agtgttggcaagtatgtaat

SEQ ID NO: 16527 - DNA, 20 bp, Artificial Sequence
  Antisense compound
aagtgttggcaagtatgtaa

SEQ ID NO: 16528 - DNA, 20 bp, Artificial Sequence
  Antisense compound
caagtgttggcaagtatgta

SEQ ID NO: 16529 - DNA, 20 bp, Artificial Sequence
  Antisense compound
acaagtgttggcaagtatgt

SEQ ID NO: 16530 - DNA, 20 bp, Artificial Sequence
  Antisense compound
tacaagtgttggcaagtatg

SEQ ID NO: 16531 - DNA, 20 bp, Artificial Sequence
  Antisense compound
gtacaagtgttggcaagtat

SEQ ID NO: 16532 - DNA, 20 bp, Artificial Sequence
  Antisense compound
agtacaagtgttggcaagta

SEQ ID NO: 16533 - DNA, 20 bp, Artificial Sequence
  Antisense compound
cagtacaagtgttggcaagt

SEQ ID NO: 16534 - DNA, 20 bp, Artificial Sequence
  Antisense compound
tcagtacaagtgttggcaag

SEQ ID NO: 16535 - DNA, 20 bp, Artificial Sequence
  Antisense compound
ctcagtacaagtgttggcaa

SEQ ID NO: 16536 - DNA, 20 bp, Artificial Sequence
  Antisense compound
tctcagtacaagtgttggca

SEQ ID NO: 16537 - DNA, 20 bp, Artificial Sequence
  Antisense compound
ctctcagtacaagtgttggc

SEQ ID NO: 16538 - DNA, 20 bp, Artificial Sequence
  Antisense compound
tctctcagtacaagtgttgg

SEQ ID NO: 16539 - DNA, 20 bp, Artificial Sequence
  Antisense compound
gtctctcagtacaagtgttg

SEQ ID NO: 16540 - DNA, 20 bp, Artificial Sequence
  Antisense compound
agtctctcagtacaagtgtt

SEQ ID NO: 16541 - DNA, 20 bp, Artificial Sequence
  Antisense compound
gagtctctcagtacaagtgt

SEQ ID NO: 16542 - DNA, 20 bp, Artificial Sequence
  Antisense compound
tgagtctctcagtacaagtg

SEQ ID NO: 16543 - DNA, 20 bp, Artificial Sequence
  Antisense compound
ttgagtctctcagtacaagt

SEQ ID NO: 16544 - DNA, 20 bp, Artificial Sequence
  Antisense compound
cttgagtctctcagtacaag

SEQ ID NO: 16545 - DNA, 20 bp, Artificial Sequence
  Antisense compound
gcttgagtctctcagtacaa

SEQ ID NO: 16546 - DNA, 20 bp, Artificial Sequence
  Antisense compound
agcttgagtctctcagtaca

SEQ ID NO: 16547 - DNA, 20 bp, Artificial Sequence
  Antisense compound
aagcttgagtctctcagtac

SEQ ID NO: 16548 - DNA, 20 bp, Artificial Sequence
  Antisense compound
aaagcttgagtctctcagta

SEQ ID NO: 16549 - DNA, 20 bp, Artificial Sequence
  Antisense compound
aaaagcttgagtctctcagt

SEQ ID NO: 16550 - DNA, 20 bp, Artificial Sequence
  Antisense compound
gaaaagcttgagtctctcag

SEQ ID NO: 16551 - DNA, 20 bp, Artificial Sequence
  Antisense compound
cgaaaagcttgagtctctca

SEQ ID NO: 16552 - DNA, 20 bp, Artificial Sequence
  Antisense compound
gcgaaaagcttgagtctctc

SEQ ID NO: 16553 - DNA, 20 bp, Artificial Sequence
  Antisense compound
tgcgaaaagcttgagtctct

SEQ ID NO: 16554 - DNA, 20 bp, Artificial Sequence
  Antisense compound
ctgcgaaaagcttgagtctc

SEQ ID NO: 16555 - DNA, 20 bp, Artificial Sequence
  Antisense compound
gctgcgaaaagcttgagtct

SEQ ID NO: 16556 - DNA, 20 bp, Artificial Sequence
  Antisense compound
tgctgcgaaaagcttgagtc

SEQ ID NO: 16557 - DNA, 20 bp, Artificial Sequence
  Antisense compound
ctgctgcgaaaagcttgagt

SEQ ID NO: 16558 - DNA, 20 bp, Artificial Sequence
  Antisense compound
tctgctgcgaaaagcttgag

SEQ ID NO: 16559 - DNA, 20 bp, Artificial Sequence
  Antisense compound
ttctgctgcgaaaagcttga

SEQ ID NO: 16560 - DNA, 20 bp, Artificial Sequence
  Antisense compound
tttctgctgcgaaaagcttg

SEQ ID NO: 16561 - DNA, 20 bp, Artificial Sequence
  Antisense compound
gtttctgctgcgaaaagctt

SEQ ID NO: 16562 - DNA, 20 bp, Artificial Sequence
  Antisense compound
cgtttctgctgcgaaaagct

SEQ ID NO: 16563 - DNA, 20 bp, Artificial Sequence
  Antisense compound
gcgtttctgctgcgaaaagc

SEQ ID NO: 16564 - DNA, 20 bp, Artificial Sequence
  Antisense compound
agcgtttctgctgcgaaaag

SEQ ID NO: 16565 - DNA, 20 bp, Artificial Sequence
  Antisense compound
gagcgtttctgctgcgaaaa

SEQ ID NO: 16566 - DNA, 20 bp, Artificial Sequence
  Antisense compound
tgagcgtttctgctgcgaaa

SEQ ID NO: 16567 - DNA, 20 bp, Artificial Sequence
  Antisense compound
ttgagcgtttctgctgcgaa

SEQ ID NO: 16568 - DNA, 20 bp, Artificial Sequence
  Antisense compound
tttgagcgtttctgctgcga

SEQ ID NO: 16569 - DNA, 20 bp, Artificial Sequence
  Antisense compound
ctttgagcgtttctgctgcg

SEQ ID NO: 16570 - DNA, 20 bp, Artificial Sequence
  Antisense compound
gctttgagcgtttctgctgc

SEQ ID NO: 16571 - DNA, 20 bp, Artificial Sequence
  Antisense compound
ggctttgagcgtttctgctg

SEQ ID NO: 16572 - DNA, 20 bp, Artificial Sequence
  Antisense compound
tggctttgagcgtttctgct

SEQ ID NO: 16573 - DNA, 20 bp, Artificial Sequence
  Antisense compound
gtggctttgagcgtttctgc

SEQ ID NO: 16574 - DNA, 20 bp, Artificial Sequence
  Antisense compound
agtggctttgagcgtttctg

SEQ ID NO: 16575 - DNA, 20 bp, Artificial Sequence
  Antisense compound
cagtggctttgagcgtttct

SEQ ID NO: 16576 - DNA, 20 bp, Artificial Sequence
  Antisense compound
tcagtggctttgagcgtttc

SEQ ID NO: 16577 - DNA, 20 bp, Artificial Sequence
  Antisense compound
ctcagtggctttgagcgttt

SEQ ID NO: 16578 - DNA, 20 bp, Artificial Sequence
  Antisense compound
cctcagtggctttgagcgtt

SEQ ID NO: 16579 - DNA, 20 bp, Artificial Sequence
  Antisense compound
tcctcagtggctttgagcgt

SEQ ID NO: 16580 - DNA, 20 bp, Artificial Sequence
  Antisense compound
ttcctcagtggctttgagcg

SEQ ID NO: 16581 - DNA, 20 bp, Artificial Sequence
  Antisense compound
tttcctcagtggctttgagc

SEQ ID NO: 16582 - DNA, 20 bp, Artificial Sequence
  Antisense compound
gtttcctcagtggctttgag

SEQ ID NO: 16583 - DNA, 20 bp, Artificial Sequence
  Antisense compound
tgtttcctcagtggctttga

SEQ ID NO: 16584 - DNA, 20 bp, Artificial Sequence
  Antisense compound
atgtttcctcagtggctttg

SEQ ID NO: 16585 - DNA, 20 bp, Artificial Sequence
  Antisense compound
aatgtttcctcagtggcttt

SEQ ID NO: 16586 - DNA, 20 bp, Artificial Sequence
  Antisense compound
aaatgtttcctcagtggctt

SEQ ID NO: 16587 - DNA, 20 bp, Artificial Sequence
  Antisense compound
taaatgtttcctcagtggct

SEQ ID NO: 16588 - DNA, 20 bp, Artificial Sequence
  Antisense compound
ttaaatgtttcctcagtggc

SEQ ID NO: 16589 - DNA, 20 bp, Artificial Sequence
  Antisense compound
cttaaatgtttcctcagtgg

SEQ ID NO: 16590 - DNA, 20 bp, Artificial Sequence
  Antisense compound
gcttaaatgtttcctcagtg

SEQ ID NO: 16591 - DNA, 20 bp, Artificial Sequence
  Antisense compound
agcttaaatgtttcctcagt

SEQ ID NO: 16592 - DNA, 20 bp, Artificial Sequence
  Antisense compound
cagcttaaatgtttcctcag

SEQ ID NO: 16593 - DNA, 20 bp, Artificial Sequence
  Antisense compound
acagcttaaatgtttcctca

SEQ ID NO: 16594 - DNA, 20 bp, Artificial Sequence
  Antisense compound
gacagcttaaatgtttcctc

SEQ ID NO: 16595 - DNA, 20 bp, Artificial Sequence
  Antisense compound
tgacagcttaaatgtttcct

SEQ ID NO: 16596 - DNA, 20 bp, Artificial Sequence
  Antisense compound
atgacagcttaaatgtttcc

SEQ ID NO: 16597 - DNA, 20 bp, Artificial Sequence
  Antisense compound
tatgacagcttaaatgtttc

SEQ ID NO: 16598 - DNA, 20 bp, Artificial Sequence
  Antisense compound
atatgacagcttaaatgttt

SEQ ID NO: 16599 - DNA, 20 bp, Artificial Sequence
  Antisense compound
catatgacagcttaaatgtt

SEQ ID NO: 16600 - DNA, 20 bp, Artificial Sequence
  Antisense compound
ccatatgacagcttaaatgt

SEQ ID NO: 16601 - DNA, 20 bp, Artificial Sequence
  Antisense compound
accatatgacagcttaaatg

SEQ ID NO: 16602 - DNA, 20 bp, Artificial Sequence
  Antisense compound
taccatatgacagcttaaat

SEQ ID NO: 16603 - DNA, 20 bp, Artificial Sequence
  Antisense compound
ataccatatgacagcttaaa

SEQ ID NO: 16604 - DNA, 20 bp, Artificial Sequence
  Antisense compound
aataccatatgacagcttaa

SEQ ID NO: 16605 - DNA, 20 bp, Artificial Sequence
  Antisense compound
caataccatatgacagctta

SEQ ID NO: 16606 - DNA, 20 bp, Artificial Sequence
  Antisense compound
gcaataccatatgacagctt

SEQ ID NO: 16607 - DNA, 20 bp, Artificial Sequence
  Antisense compound
ggcaataccatatgacagct

SEQ ID NO: 16608 - DNA, 20 bp, Artificial Sequence
  Antisense compound
tggcaataccatatgacagc

SEQ ID NO: 16609 - DNA, 20 bp, Artificial Sequence
  Antisense compound
gtggcaataccatatgacag

SEQ ID NO: 16610 - DNA, 20 bp, Artificial Sequence
  Antisense compound
agtggcaataccatatgaca

SEQ ID NO: 16611 - DNA, 20 bp, Artificial Sequence
  Antisense compound
cagtggcaataccatatgac

SEQ ID NO: 16612 - DNA, 20 bp, Artificial Sequence
  Antisense compound
acagtggcaataccatatga

SEQ ID NO: 16613 - DNA, 20 bp, Artificial Sequence
  Antisense compound
tacagtggcaataccatatg

SEQ ID NO: 16614 - DNA, 20 bp, Artificial Sequence
  Antisense compound
gtacagtggcaataccatat

SEQ ID NO: 16615 - DNA, 20 bp, Artificial Sequence
  Antisense compound
cgtacagtggcaataccata

SEQ ID NO: 16616 - DNA, 20 bp, Artificial Sequence
  Antisense compound
gcgtacagtggcaataccat

SEQ ID NO: 16617 - DNA, 20 bp, Artificial Sequence
  Antisense compound
cgcgtacagtggcaatacca

SEQ ID NO: 16618 - DNA, 20 bp, Artificial Sequence
  Antisense compound
tcgcgtacagtggcaatacc

SEQ ID NO: 16619 - DNA, 20 bp, Artificial Sequence
  Antisense compound
ttcgcgtacagtggcaatac

SEQ ID NO: 16620 - DNA, 20 bp, Artificial Sequence
  Antisense compound
cttcgcgtacagtggcaata

SEQ ID NO: 16621 - DNA, 20 bp, Artificial Sequence
  Antisense compound
acttcgcgtacagtggcaat

SEQ ID NO: 16622 - DNA, 20 bp, Artificial Sequence
  Antisense compound
tacttcgcgtacagtggcaa

SEQ ID NO: 16623 - DNA, 20 bp, Artificial Sequence
  Antisense compound
gtacttcgcgtacagtggca

SEQ ID NO: 16624 - DNA, 20 bp, Artificial Sequence
  Antisense compound
agtacttcgcgtacagtggc

SEQ ID NO: 16625 - DNA, 20 bp, Artificial Sequence
  Antisense compound
gagtacttcgcgtacagtgg

SEQ ID NO: 16626 - DNA, 20 bp, Artificial Sequence
  Antisense compound
agagtacttcgcgtacagtg

SEQ ID NO: 16627 - DNA, 20 bp, Artificial Sequence
  Antisense compound
gagagtacttcgcgtacagt

SEQ ID NO: 16628 - DNA, 20 bp, Artificial Sequence
  Antisense compound
agagagtacttcgcgtacag

SEQ ID NO: 16629 - DNA, 20 bp, Artificial Sequence
  Antisense compound
cagagagtacttcgcgtaca

SEQ ID NO: 16630 - DNA, 20 bp, Artificial Sequence
  Antisense compound
tcagagagtacttcgcgtac

SEQ ID NO: 16631 - DNA, 20 bp, Artificial Sequence
  Antisense compound
gtcagagagtacttcgcgta

SEQ ID NO: 16632 - DNA, 20 bp, Artificial Sequence
  Antisense compound
tgtcagagagtacttcgcgt

SEQ ID NO: 16633 - DNA, 20 bp, Artificial Sequence
  Antisense compound
ctgtcagagagtacttcgcg

SEQ ID NO: 16634 - DNA, 20 bp, Artificial Sequence
  Antisense compound
tctgtcagagagtacttcgc

SEQ ID NO: 16635 - DNA, 20 bp, Artificial Sequence
  Antisense compound
ctctgtcagagagtacttcg

SEQ ID NO: 16636 - DNA, 20 bp, Artificial Sequence
  Antisense compound
tctctgtcagagagtacttc

SEQ ID NO: 16637 - DNA, 20 bp, Artificial Sequence
  Antisense compound
ttctctgtcagagagtactt

SEQ ID NO: 16638 - DNA, 20 bp, Artificial Sequence
  Antisense compound
attctctgtcagagagtact

SEQ ID NO: 16639 - DNA, 20 bp, Artificial Sequence
  Antisense compound
aattctctgtcagagagtac

SEQ ID NO: 16640 - DNA, 20 bp, Artificial Sequence
  Antisense compound
caattctctgtcagagagta

SEQ ID NO: 16641 - DNA, 20 bp, Artificial Sequence
  Antisense compound
gcaattctctgtcagagagt

SEQ ID NO: 16642 - DNA, 20 bp, Artificial Sequence
  Antisense compound
tgcaattctctgtcagagag

SEQ ID NO: 16643 - DNA, 20 bp, Artificial Sequence
  Antisense compound
atgcaattctctgtcagaga

SEQ ID NO: 16644 - DNA, 20 bp, Artificial Sequence
  Antisense compound
gatgcaattctctgtcagag

SEQ ID NO: 16645 - DNA, 20 bp, Artificial Sequence
  Antisense compound
agatgcaattctctgtcaga

SEQ ID NO: 16646 - DNA, 20 bp, Artificial Sequence
  Antisense compound
aagatgcaattctctgtcag

SEQ ID NO: 16647 - DNA, 20 bp, Artificial Sequence
  Antisense compound
aaagatgcaattctctgtca

SEQ ID NO: 16648 - DNA, 20 bp, Artificial Sequence
  Antisense compound
gaaagatgcaattctctgtc

SEQ ID NO: 16649 - DNA, 20 bp, Artificial Sequence
  Antisense compound
tgaaagatgcaattctctgt

SEQ ID NO: 16650 - DNA, 20 bp, Artificial Sequence
  Antisense compound
atgaaagatgcaattctctg

SEQ ID NO: 16651 - DNA, 20 bp, Artificial Sequence
  Antisense compound
catgaaagatgcaattctct

SEQ ID NO: 16652 - DNA, 20 bp, Artificial Sequence
  Antisense compound
ccatgaaagatgcaattctc

SEQ ID NO: 16653 - DNA, 20 bp, Artificial Sequence
  Antisense compound
cccatgaaagatgcaattct

SEQ ID NO: 16654 - DNA, 20 bp, Artificial Sequence
  Antisense compound
tcccatgaaagatgcaattc

SEQ ID NO: 16655 - DNA, 20 bp, Artificial Sequence
  Antisense compound
ctcccatgaaagatgcaatt

SEQ ID NO: 16656 - DNA, 20 bp, Artificial Sequence
  Antisense compound
cctcccatgaaagatgcaat

SEQ ID NO: 16657 - DNA, 20 bp, Artificial Sequence
  Antisense compound
acctcccatgaaagatgcaa

SEQ ID NO: 16658 - DNA, 20 bp, Artificial Sequence
  Antisense compound
aacctcccatgaaagatgca

SEQ ID NO: 16659 - DNA, 20 bp, Artificial Sequence
  Antisense compound
caacctcccatgaaagatgc

SEQ ID NO: 16660 - DNA, 20 bp, Artificial Sequence
  Antisense compound
ccaacctcccatgaaagatg

SEQ ID NO: 16661 - DNA, 20 bp, Artificial Sequence
  Antisense compound
tccaacctcccatgaaagat

SEQ ID NO: 16662 - DNA, 20 bp, Artificial Sequence
  Antisense compound
ttccaacctcccatgaaaga

SEQ ID NO: 16663 - DNA, 20 bp, Artificial Sequence
  Antisense compound
tttccaacctcccatgaaag

SEQ ID NO: 16664 - DNA, 20 bp, Artificial Sequence
  Antisense compound
ttttccaacctcccatgaaa

SEQ ID NO: 16665 - DNA, 20 bp, Artificial Sequence
  Antisense compound
gttttccaacctcccatgaa

SEQ ID NO: 16666 - DNA, 20 bp, Artificial Sequence
  Antisense compound
ggttttccaacctcccatga

SEQ ID NO: 16667 - DNA, 20 bp, Artificial Sequence
  Antisense compound
aggttttccaacctcccatg

SEQ ID NO: 16668 - DNA, 20 bp, Artificial Sequence
  Antisense compound
taggttttccaacctcccat

SEQ ID NO: 16669 - DNA, 20 bp, Artificial Sequence
  Antisense compound
ctaggttttccaacctccca

SEQ ID NO: 16670 - DNA, 20 bp, Artificial Sequence
  Antisense compound
tctaggttttccaacctccc

SEQ ID NO: 16671 - DNA, 20 bp, Artificial Sequence
  Antisense compound
gtctaggttttccaacctcc

SEQ ID NO: 16672 - DNA, 20 bp, Artificial Sequence
  Antisense compound
ggtctaggttttccaacctc

SEQ ID NO: 16673 - DNA, 20 bp, Artificial Sequence
  Antisense compound
tggtctaggttttccaacct

SEQ ID NO: 16674 - DNA, 20 bp, Artificial Sequence
  Antisense compound
gtggtctaggttttccaacc

SEQ ID NO: 16675 - DNA, 20 bp, Artificial Sequence
  Antisense compound
ggtggtctaggttttccaac

SEQ ID NO: 16676 - DNA, 20 bp, Artificial Sequence
  Antisense compound
tggtggtctaggttttccaa

SEQ ID NO: 16677 - DNA, 20 bp, Artificial Sequence
  Antisense compound
atggtggtctaggttttcca

SEQ ID NO: 16678 - DNA, 20 bp, Artificial Sequence
  Antisense compound
aatggtggtctaggttttcc

SEQ ID NO: 16679 - DNA, 20 bp, Artificial Sequence
  Antisense compound
caatggtggtctaggttttc

SEQ ID NO: 16680 - DNA, 20 bp, Artificial Sequence
  Antisense compound
tcaatggtggtctaggtttt

SEQ ID NO: 16681 - DNA, 20 bp, Artificial Sequence
  Antisense compound
ttcaatggtggtctaggttt

SEQ ID NO: 16682 - DNA, 20 bp, Artificial Sequence
  Antisense compound
gttcaatggtggtctaggtt

SEQ ID NO: 16683 - DNA, 20 bp, Artificial Sequence
  Antisense compound
tgttcaatggtggtctaggt

SEQ ID NO: 16684 - DNA, 20 bp, Artificial Sequence
  Antisense compound
ctgttcaatggtggtctagg

SEQ ID NO: 16685 - DNA, 20 bp, Artificial Sequence
  Antisense compound
tctgttcaatggtggtctag

SEQ ID NO: 16686 - DNA, 20 bp, Artificial Sequence
  Antisense compound
ttctgttcaatggtggtcta

SEQ ID NO: 16687 - DNA, 20 bp, Artificial Sequence
  Antisense compound
tttctgttcaatggtggtct

SEQ ID NO: 16688 - DNA, 20 bp, Artificial Sequence
  Antisense compound
gtttctgttcaatggtggtc

SEQ ID NO: 16689 - DNA, 20 bp, Artificial Sequence
  Antisense compound
agtttctgttcaatggtggt

SEQ ID NO: 16690 - DNA, 20 bp, Artificial Sequence
  Antisense compound
tagtttctgttcaatggtgg

SEQ ID NO: 16691 - DNA, 20 bp, Artificial Sequence
  Antisense compound
atagtttctgttcaatggtg

SEQ ID NO: 16692 - DNA, 20 bp, Artificial Sequence
  Antisense compound
catagtttctgttcaatggt

SEQ ID NO: 16693 - DNA, 20 bp, Artificial Sequence
  Antisense compound
acatagtttctgttcaatgg

SEQ ID NO: 16694 - DNA, 20 bp, Artificial Sequence
  Antisense compound
gacatagtttctgttcaatg

SEQ ID NO: 16695 - DNA, 20 bp, Artificial Sequence
  Antisense compound
agacatagtttctgttcaat

SEQ ID NO: 16696 - DNA, 20 bp, Artificial Sequence
  Antisense compound
aagacatagtttctgttcaa

SEQ ID NO: 16697 - DNA, 20 bp, Artificial Sequence
  Antisense compound
aaagacatagtttctgttca

SEQ ID NO: 16698 - DNA, 20 bp, Artificial Sequence
  Antisense compound
taaagacatagtttctgttc

SEQ ID NO: 16699 - DNA, 20 bp, Artificial Sequence
  Antisense compound
gtaaagacatagtttctgtt

SEQ ID NO: 16700 - DNA, 20 bp, Artificial Sequence
  Antisense compound
agtaaagacatagtttctgt

SEQ ID NO: 16701 - DNA, 20 bp, Artificial Sequence
  Antisense compound
cagtaaagacatagtttctg

SEQ ID NO: 16702 - DNA, 20 bp, Artificial Sequence
  Antisense compound
ccagtaaagacatagtttct

SEQ ID NO: 16703 - DNA, 20 bp, Artificial Sequence
  Antisense compound
accagtaaagacatagtttc

SEQ ID NO: 16704 - DNA, 20 bp, Artificial Sequence
  Antisense compound
aaccagtaaagacatagttt

SEQ ID NO: 16705 - DNA, 20 bp, Artificial Sequence
  Antisense compound
taaccagtaaagacatagtt

SEQ ID NO: 16706 - DNA, 20 bp, Artificial Sequence
  Antisense compound
gtaaccagtaaagacatagt

SEQ ID NO: 16707 - DNA, 20 bp, Artificial Sequence
  Antisense compound
ggtaaccagtaaagacatag

SEQ ID NO: 16708 - DNA, 20 bp, Artificial Sequence
  Antisense compound
cggtaaccagtaaagacata

SEQ ID NO: 16709 - DNA, 20 bp, Artificial Sequence
  Antisense compound
acggtaaccagtaaagacat

SEQ ID NO: 16710 - DNA, 20 bp, Artificial Sequence
  Antisense compound
cacggtaaccagtaaagaca

SEQ ID NO: 16711 - DNA, 20 bp, Artificial Sequence
  Antisense compound
acacggtaaccagtaaagac

SEQ ID NO: 16712 - DNA, 20 bp, Artificial Sequence
  Antisense compound
tacacggtaaccagtaaaga

SEQ ID NO: 16713 - DNA, 20 bp, Artificial Sequence
  Antisense compound
ttacacggtaaccagtaaag

SEQ ID NO: 16714 - DNA, 20 bp, Artificial Sequence
  Antisense compound
gttacacggtaaccagtaaa

SEQ ID NO: 16715 - DNA, 20 bp, Artificial Sequence
  Antisense compound
agttacacggtaaccagtaa

SEQ ID NO: 16716 - DNA, 20 bp, Artificial Sequence
  Antisense compound
tagttacacggtaaccagta

SEQ ID NO: 16717 - DNA, 20 bp, Artificial Sequence
  Antisense compound
ttagttacacggtaaccagt

SEQ ID NO: 16718 - DNA, 20 bp, Artificial Sequence
  Antisense compound
tttagttacacggtaaccag

SEQ ID NO: 16719 - DNA, 20 bp, Artificial Sequence
  Antisense compound
ttttagttacacggtaacca

SEQ ID NO: 16720 - DNA, 20 bp, Artificial Sequence
  Antisense compound
tttttagttacacggtaacc

SEQ ID NO: 16721 - DNA, 20 bp, Artificial Sequence
  Antisense compound
atttttagttacacggtaac

SEQ ID NO: 16722 - DNA, 20 bp, Artificial Sequence
  Antisense compound
tatttttagttacacggtaa

SEQ ID NO: 16723 - DNA, 20 bp, Artificial Sequence
  Antisense compound
ctatttttagttacacggta

SEQ ID NO: 16724 - DNA, 20 bp, Artificial Sequence
  Antisense compound
actatttttagttacacggt

SEQ ID NO: 16725 - DNA, 20 bp, Artificial Sequence
  Antisense compound
tactatttttagttacacgg

SEQ ID NO: 16726 - DNA, 20 bp, Artificial Sequence
  Antisense compound
ttactatttttagttacacg

SEQ ID NO: 16727 - DNA, 20 bp, Artificial Sequence
  Antisense compound
tttactatttttagttacac

SEQ ID NO: 16728 - DNA, 20 bp, Artificial Sequence
  Antisense compound
ctttactatttttagttaca

SEQ ID NO: 16729 - DNA, 20 bp, Artificial Sequence
  Antisense compound
actttactatttttagttac

SEQ ID NO: 16730 - DNA, 20 bp, Artificial Sequence
  Antisense compound
tactttactatttttagtta

SEQ ID NO: 16731 - DNA, 20 bp, Artificial Sequence
  Antisense compound
gtactttactatttttagtt

SEQ ID NO: 16732 - DNA, 20 bp, Artificial Sequence
  Antisense compound
tgtactttactatttttagt

SEQ ID NO: 16733 - DNA, 20 bp, Artificial Sequence
  Antisense compound
ctgtactttactatttttag

SEQ ID NO: 16734 - DNA, 20 bp, Artificial Sequence
  Antisense compound
tctgtactttactattttta

SEQ ID NO: 16735 - DNA, 20 bp, Artificial Sequence
  Antisense compound
atctgtactttactattttt

SEQ ID NO: 16736 - DNA, 20 bp, Artificial Sequence
  Antisense compound
aatctgtactttactatttt

SEQ ID NO: 16737 - DNA, 20 bp, Artificial Sequence
  Antisense compound
caatctgtactttactattt

SEQ ID NO: 16738 - DNA, 20 bp, Artificial Sequence
  Antisense compound
ccaatctgtactttactatt

SEQ ID NO: 16739 - DNA, 20 bp, Artificial Sequence
  Antisense compound
tccaatctgtactttactat

SEQ ID NO: 16740 - DNA, 20 bp, Artificial Sequence
  Antisense compound
ctccaatctgtactttacta

SEQ ID NO: 16741 - DNA, 20 bp, Artificial Sequence
  Antisense compound
tctccaatctgtactttact

SEQ ID NO: 16742 - DNA, 20 bp, Artificial Sequence
  Antisense compound
ctctccaatctgtactttac

SEQ ID NO: 16743 - DNA, 20 bp, Artificial Sequence
  Antisense compound
actctccaatctgtacttta

SEQ ID NO: 16744 - DNA, 20 bp, Artificial Sequence
  Antisense compound
tactctccaatctgtacttt

SEQ ID NO: 16745 - DNA, 20 bp, Artificial Sequence
  Antisense compound
gtactctccaatctgtactt

SEQ ID NO: 16746 - DNA, 20 bp, Artificial Sequence
  Antisense compound
tgtactctccaatctgtact

SEQ ID NO: 16747 - DNA, 20 bp, Artificial Sequence
  Antisense compound
gtgtactctccaatctgtac

SEQ ID NO: 16748 - DNA, 20 bp, Artificial Sequence
  Antisense compound
ggtgtactctccaatctgta

SEQ ID NO: 16749 - DNA, 20 bp, Artificial Sequence
  Antisense compound
aggtgtactctccaatctgt

SEQ ID NO: 16750 - DNA, 20 bp, Artificial Sequence
  Antisense compound
aaggtgtactctccaatctg

SEQ ID NO: 16751 - DNA, 20 bp, Artificial Sequence
  Antisense compound
aaaggtgtactctccaatct

SEQ ID NO: 16752 - DNA, 20 bp, Artificial Sequence
  Antisense compound
caaaggtgtactctccaatc

SEQ ID NO: 16753 - DNA, 20 bp, Artificial Sequence
  Antisense compound
tcaaaggtgtactctccaat

SEQ ID NO: 16754 - DNA, 20 bp, Artificial Sequence
  Antisense compound
ttcaaaggtgtactctccaa

SEQ ID NO: 16755 - DNA, 20 bp, Artificial Sequence
  Antisense compound
tttcaaaggtgtactctcca

SEQ ID NO: 16756 - DNA, 20 bp, Artificial Sequence
  Antisense compound
ttttcaaaggtgtactctcc

SEQ ID NO: 16757 - DNA, 20 bp, Artificial Sequence
  Antisense compound
tttttcaaaggtgtactctc

SEQ ID NO: 16758 - DNA, 20 bp, Artificial Sequence
  Antisense compound
ctttttcaaaggtgtactct

SEQ ID NO: 16759 - DNA, 20 bp, Artificial Sequence
  Antisense compound
cctttttcaaaggtgtactc

SEQ ID NO: 16760 - DNA, 20 bp, Artificial Sequence
  Antisense compound
acctttttcaaaggtgtact

SEQ ID NO: 16761 - DNA, 20 bp, Artificial Sequence
  Antisense compound
cacctttttcaaaggtgtac

SEQ ID NO: 16762 - DNA, 20 bp, Artificial Sequence
  Antisense compound
tcacctttttcaaaggtgta

SEQ ID NO: 16763 - DNA, 20 bp, Artificial Sequence
  Antisense compound
gtcacctttttcaaaggtgt

SEQ ID NO: 16764 - DNA, 20 bp, Artificial Sequence
  Antisense compound
agtcacctttttcaaaggtg

SEQ ID NO: 16765 - DNA, 20 bp, Artificial Sequence
  Antisense compound
tagtcacctttttcaaaggt

SEQ ID NO: 16766 - DNA, 20 bp, Artificial Sequence
  Antisense compound
atagtcacctttttcaaagg

SEQ ID NO: 16767 - DNA, 20 bp, Artificial Sequence
  Antisense compound
catagtcacctttttcaaag

SEQ ID NO: 16768 - DNA, 20 bp, Artificial Sequence
  Antisense compound
ccatagtcacctttttcaaa

SEQ ID NO: 16769 - DNA, 20 bp, Artificial Sequence
  Antisense compound
accatagtcacctttttcaa

SEQ ID NO: 16770 - DNA, 20 bp, Artificial Sequence
  Antisense compound
caccatagtcacctttttca

SEQ ID NO: 16771 - DNA, 20 bp, Artificial Sequence
  Antisense compound
tcaccatagtcacctttttc

SEQ ID NO: 16772 - DNA, 20 bp, Artificial Sequence
  Antisense compound
atcaccatagtcaccttttt

SEQ ID NO: 16773 - DNA, 20 bp, Artificial Sequence
  Antisense compound
catcaccatagtcacctttt

SEQ ID NO: 16774 - DNA, 20 bp, Artificial Sequence
  Antisense compound
gcatcaccatagtcaccttt

SEQ ID NO: 16775 - DNA, 20 bp, Artificial Sequence
  Antisense compound
agcatcaccatagtcacctt

SEQ ID NO: 16776 - DNA, 20 bp, Artificial Sequence
  Antisense compound
cagcatcaccatagtcacct

SEQ ID NO: 16777 - DNA, 20 bp, Artificial Sequence
  Antisense compound
acagcatcaccatagtcacc

SEQ ID NO: 16778 - DNA, 20 bp, Artificial Sequence
  Antisense compound
aacagcatcaccatagtcac

SEQ ID NO: 16779 - DNA, 20 bp, Artificial Sequence
  Antisense compound
caacagcatcaccatagtca

SEQ ID NO: 16780 - DNA, 20 bp, Artificial Sequence
  Antisense compound
acaacagcatcaccatagtc

SEQ ID NO: 16781 - DNA, 20 bp, Artificial Sequence
  Antisense compound
cacaacagcatcaccatagt

SEQ ID NO: 16782 - DNA, 20 bp, Artificial Sequence
  Antisense compound
acacaacagcatcaccatag

SEQ ID NO: 16783 - DNA, 20 bp, Artificial Sequence
  Antisense compound
tacacaacagcatcaccata

SEQ ID NO: 16784 - DNA, 20 bp, Artificial Sequence
  Antisense compound
gtacacaacagcatcaccat

SEQ ID NO: 16785 - DNA, 20 bp, Artificial Sequence
  Antisense compound
tgtacacaacagcatcacca

SEQ ID NO: 16786 - DNA, 20 bp, Artificial Sequence
  Antisense compound
ctgtacacaacagcatcacc

SEQ ID NO: 16787 - DNA, 20 bp, Artificial Sequence
  Antisense compound
tctgtacacaacagcatcac

SEQ ID NO: 16788 - DNA, 20 bp, Artificial Sequence
  Antisense compound
ctctgtacacaacagcatca

SEQ ID NO: 16789 - DNA, 20 bp, Artificial Sequence
  Antisense compound
cctctgtacacaacagcatc

SEQ ID NO: 16790 - DNA, 20 bp, Artificial Sequence
  Antisense compound
acctctgtacacaacagcat

SEQ ID NO: 16791 - DNA, 20 bp, Artificial Sequence
  Antisense compound
tacctctgtacacaacagca

SEQ ID NO: 16792 - DNA, 20 bp, Artificial Sequence
  Antisense compound
gtacctctgtacacaacagc

SEQ ID NO: 16793 - DNA, 20 bp, Artificial Sequence
  Antisense compound
agtacctctgtacacaacag

SEQ ID NO: 16794 - DNA, 20 bp, Artificial Sequence
  Antisense compound
tagtacctctgtacacaaca

SEQ ID NO: 16795 - DNA, 20 bp, Artificial Sequence
  Antisense compound
gtagtacctctgtacacaac

SEQ ID NO: 16796 - DNA, 20 bp, Artificial Sequence
  Antisense compound
cgtagtacctctgtacacaa

SEQ ID NO: 16797 - DNA, 20 bp, Artificial Sequence
  Antisense compound
tcgtagtacctctgtacaca

SEQ ID NO: 16798 - DNA, 20 bp, Artificial Sequence
  Antisense compound
gtcgtagtacctctgtacac

SEQ ID NO: 16799 - DNA, 20 bp, Artificial Sequence
  Antisense compound
tgtcgtagtacctctgtaca

SEQ ID NO: 16800 - DNA, 20 bp, Artificial Sequence
  Antisense compound
atgtcgtagtacctctgtac

SEQ ID NO: 16801 - DNA, 20 bp, Artificial Sequence
  Antisense compound
tatgtcgtagtacctctgta

SEQ ID NO: 16802 - DNA, 20 bp, Artificial Sequence
  Antisense compound
gtatgtcgtagtacctctgt

SEQ ID NO: 16803 - DNA, 20 bp, Artificial Sequence
  Antisense compound
tgtatgtcgtagtacctctg

SEQ ID NO: 16804 - DNA, 20 bp, Artificial Sequence
  Antisense compound
ttgtatgtcgtagtacctct

SEQ ID NO: 16805 - DNA, 20 bp, Artificial Sequence
  Antisense compound
cttgtatgtcgtagtacctc

SEQ ID NO: 16806 - DNA, 20 bp, Artificial Sequence
  Antisense compound
acttgtatgtcgtagtacct

SEQ ID NO: 16807 - DNA, 20 bp, Artificial Sequence
  Antisense compound
aacttgtatgtcgtagtacc

SEQ ID NO: 16808 - DNA, 20 bp, Artificial Sequence
  Antisense compound
caacttgtatgtcgtagtac

SEQ ID NO: 16809 - DNA, 20 bp, Artificial Sequence
  Antisense compound
tcaacttgtatgtcgtagta

SEQ ID NO: 16810 - DNA, 20 bp, Artificial Sequence
  Antisense compound
ttcaacttgtatgtcgtagt

SEQ ID NO: 16811 - DNA, 20 bp, Artificial Sequence
  Antisense compound
attcaacttgtatgtcgtag

SEQ ID NO: 16812 - DNA, 20 bp, Artificial Sequence
  Antisense compound
cattcaacttgtatgtcgta

SEQ ID NO: 16813 - DNA, 20 bp, Artificial Sequence
  Antisense compound
acattcaacttgtatgtcgt

SEQ ID NO: 16814 - DNA, 20 bp, Artificial Sequence
  Antisense compound
aacattcaacttgtatgtcg

SEQ ID NO: 16815 - DNA, 20 bp, Artificial Sequence
  Antisense compound
caacattcaacttgtatgtc

SEQ ID NO: 16816 - DNA, 20 bp, Artificial Sequence
  Antisense compound
ccaacattcaacttgtatgt

SEQ ID NO: 16817 - DNA, 20 bp, Artificial Sequence
  Antisense compound
accaacattcaacttgtatg

SEQ ID NO: 16818 - DNA, 20 bp, Artificial Sequence
  Antisense compound
caccaacattcaacttgtat

SEQ ID NO: 16819 - DNA, 20 bp, Artificial Sequence
  Antisense compound
tcaccaacattcaacttgta

SEQ ID NO: 16820 - DNA, 20 bp, Artificial Sequence
  Antisense compound
atcaccaacattcaacttgt

SEQ ID NO: 16821 - DNA, 20 bp, Artificial Sequence
  Antisense compound
aatcaccaacattcaacttg

SEQ ID NO: 16822 - DNA, 20 bp, Artificial Sequence
  Antisense compound
taatcaccaacattcaactt

SEQ ID NO: 16823 - DNA, 20 bp, Artificial Sequence
  Antisense compound
gtaatcaccaacattcaact

SEQ ID NO: 16824 - DNA, 20 bp, Artificial Sequence
  Antisense compound
agtaatcaccaacattcaac

SEQ ID NO: 16825 - DNA, 20 bp, Artificial Sequence
  Antisense compound
aagtaatcaccaacattcaa

SEQ ID NO: 16826 - DNA, 20 bp, Artificial Sequence
  Antisense compound
aaagtaatcaccaacattca

SEQ ID NO: 16827 - DNA, 20 bp, Artificial Sequence
  Antisense compound
caaagtaatcaccaacattc

SEQ ID NO: 16828 - DNA, 20 bp, Artificial Sequence
  Antisense compound
acaaagtaatcaccaacatt

SEQ ID NO: 16829 - DNA, 20 bp, Artificial Sequence
  Antisense compound
cacaaagtaatcaccaacat

SEQ ID NO: 16830 - DNA, 20 bp, Artificial Sequence
  Antisense compound
acacaaagtaatcaccaaca

SEQ ID NO: 16831 - DNA, 20 bp, Artificial Sequence
  Antisense compound
aacacaaagtaatcaccaac

SEQ ID NO: 16832 - DNA, 20 bp, Artificial Sequence
  Antisense compound
caacacaaagtaatcaccaa

SEQ ID NO: 16833 - DNA, 20 bp, Artificial Sequence
  Antisense compound
tcaacacaaagtaatcacca

SEQ ID NO: 16834 - DNA, 20 bp, Artificial Sequence
  Antisense compound
gtcaacacaaagtaatcacc

SEQ ID NO: 16835 - DNA, 20 bp, Artificial Sequence
  Antisense compound
tgtcaacacaaagtaatcac

SEQ ID NO: 16836 - DNA, 20 bp, Artificial Sequence
  Antisense compound
atgtcaacacaaagtaatca

SEQ ID NO: 16837 - DNA, 20 bp, Artificial Sequence
  Antisense compound
gatgtcaacacaaagtaatc

SEQ ID NO: 16838 - DNA, 20 bp, Artificial Sequence
  Antisense compound
agatgtcaacacaaagtaat

SEQ ID NO: 16839 - DNA, 20 bp, Artificial Sequence
  Antisense compound
gagatgtcaacacaaagtaa

SEQ ID NO: 16840 - DNA, 20 bp, Artificial Sequence
  Antisense compound
tgagatgtcaacacaaagta

SEQ ID NO: 16841 - DNA, 20 bp, Artificial Sequence
  Antisense compound
gtgagatgtcaacacaaagt

SEQ ID NO: 16842 - DNA, 20 bp, Artificial Sequence
  Antisense compound
tgtgagatgtcaacacaaag

SEQ ID NO: 16843 - DNA, 20 bp, Artificial Sequence
  Antisense compound
gtgtgagatgtcaacacaaa

SEQ ID NO: 16844 - DNA, 20 bp, Artificial Sequence
  Antisense compound
agtgtgagatgtcaacacaa

SEQ ID NO: 16845 - DNA, 20 bp, Artificial Sequence
  Antisense compound
cagtgtgagatgtcaacaca

SEQ ID NO: 16846 - DNA, 20 bp, Artificial Sequence
  Antisense compound
acagtgtgagatgtcaacac

SEQ ID NO: 16847 - DNA, 20 bp, Artificial Sequence
  Antisense compound
tacagtgtgagatgtcaaca

SEQ ID NO: 16848 - DNA, 20 bp, Artificial Sequence
  Antisense compound
ttacagtgtgagatgtcaac

SEQ ID NO: 16849 - DNA, 20 bp, Artificial Sequence
  Antisense compound
attacagtgtgagatgtcaa

SEQ ID NO: 16850 - DNA, 20 bp, Artificial Sequence
  Antisense compound
cattacagtgtgagatgtca

SEQ ID NO: 16851 - DNA, 20 bp, Artificial Sequence
  Antisense compound
gcattacagtgtgagatgtc

SEQ ID NO: 16852 - DNA, 20 bp, Artificial Sequence
  Antisense compound
ggcattacagtgtgagatgt

SEQ ID NO: 16853 - DNA, 20 bp, Artificial Sequence
  Antisense compound
tggcattacagtgtgagatg

SEQ ID NO: 16854 - DNA, 20 bp, Artificial Sequence
  Antisense compound
gtggcattacagtgtgagat

SEQ ID NO: 16855 - DNA, 20 bp, Artificial Sequence
  Antisense compound
agtggcattacagtgtgaga

SEQ ID NO: 16856 - DNA, 20 bp, Artificial Sequence
  Antisense compound
aagtggcattacagtgtgag

SEQ ID NO: 16857 - DNA, 20 bp, Artificial Sequence
  Antisense compound
taagtggcattacagtgtga

SEQ ID NO: 16858 - DNA, 20 bp, Artificial Sequence
  Antisense compound
ctaagtggcattacagtgtg

SEQ ID NO: 16859 - DNA, 20 bp, Artificial Sequence
  Antisense compound
actaagtggcattacagtgt

SEQ ID NO: 16860 - DNA, 20 bp, Artificial Sequence
  Antisense compound
cactaagtggcattacagtg

SEQ ID NO: 16861 - DNA, 20 bp, Artificial Sequence
  Antisense compound
gcactaagtggcattacagt

SEQ ID NO: 16862 - DNA, 20 bp, Artificial Sequence
  Antisense compound
tgcactaagtggcattacag

SEQ ID NO: 16863 - DNA, 20 bp, Artificial Sequence
  Antisense compound
gtgcactaagtggcattaca

SEQ ID NO: 16864 - DNA, 20 bp, Artificial Sequence
  Antisense compound
ggtgcactaagtggcattac

SEQ ID NO: 16865 - DNA, 20 bp, Artificial Sequence
  Antisense compound
aggtgcactaagtggcatta

SEQ ID NO: 16866 - DNA, 20 bp, Artificial Sequence
  Antisense compound
taggtgcactaagtggcatt

SEQ ID NO: 16867 - DNA, 20 bp, Artificial Sequence
  Antisense compound
gtaggtgcactaagtggcat

SEQ ID NO: 16868 - DNA, 20 bp, Artificial Sequence
  Antisense compound
agtaggtgcactaagtggca

SEQ ID NO: 16869 - DNA, 20 bp, Artificial Sequence
  Antisense compound
gagtaggtgcactaagtggc

SEQ ID NO: 16870 - DNA, 20 bp, Artificial Sequence
  Antisense compound
agagtaggtgcactaagtgg

SEQ ID NO: 16871 - DNA, 20 bp, Artificial Sequence
  Antisense compound
tagagtaggtgcactaagtg

SEQ ID NO: 16872 - DNA, 20 bp, Artificial Sequence
  Antisense compound
ctagagtaggtgcactaagt

SEQ ID NO: 16873 - DNA, 20 bp, Artificial Sequence
  Antisense compound
actagagtaggtgcactaag

SEQ ID NO: 16874 - DNA, 20 bp, Artificial Sequence
  Antisense compound
cactagagtaggtgcactaa

SEQ ID NO: 16875 - DNA, 20 bp, Artificial Sequence
  Antisense compound
gcactagagtaggtgcacta

SEQ ID NO: 16876 - DNA, 20 bp, Artificial Sequence
  Antisense compound
ggcactagagtaggtgcact

SEQ ID NO: 16877 - DNA, 20 bp, Artificial Sequence
  Antisense compound
tggcactagagtaggtgcac

SEQ ID NO: 16878 - DNA, 20 bp, Artificial Sequence
  Antisense compound
gtggcactagagtaggtgca

SEQ ID NO: 16879 - DNA, 20 bp, Artificial Sequence
  Antisense compound
tgtggcactagagtaggtgc

SEQ ID NO: 16880 - DNA, 20 bp, Artificial Sequence
  Antisense compound
ttgtggcactagagtaggtg

SEQ ID NO: 16881 - DNA, 20 bp, Artificial Sequence
  Antisense compound
cttgtggcactagagtaggt

SEQ ID NO: 16882 - DNA, 20 bp, Artificial Sequence
  Antisense compound
tcttgtggcactagagtagg

SEQ ID NO: 16883 - DNA, 20 bp, Artificial Sequence
  Antisense compound
ctcttgtggcactagagtag

SEQ ID NO: 16884 - DNA, 20 bp, Artificial Sequence
  Antisense compound
gctcttgtggcactagagta

SEQ ID NO: 16885 - DNA, 20 bp, Artificial Sequence
  Antisense compound
tgctcttgtggcactagagt

SEQ ID NO: 16886 - DNA, 20 bp, Artificial Sequence
  Antisense compound
gtgctcttgtggcactagag

SEQ ID NO: 16887 - DNA, 20 bp, Artificial Sequence
  Antisense compound
agtgctcttgtggcactaga

SEQ ID NO: 16888 - DNA, 20 bp, Artificial Sequence
  Antisense compound
tagtgctcttgtggcactag

SEQ ID NO: 16889 - DNA, 20 bp, Artificial Sequence
  Antisense compound
atagtgctcttgtggcacta

SEQ ID NO: 16890 - DNA, 20 bp, Artificial Sequence
  Antisense compound
catagtgctcttgtggcact

SEQ ID NO: 16891 - DNA, 20 bp, Artificial Sequence
  Antisense compound
acatagtgctcttgtggcac

SEQ ID NO: 16892 - DNA, 20 bp, Artificial Sequence
  Antisense compound
cacatagtgctcttgtggca

SEQ ID NO: 16893 - DNA, 20 bp, Artificial Sequence
  Antisense compound
tcacatagtgctcttgtggc

SEQ ID NO: 16894 - DNA, 20 bp, Artificial Sequence
  Antisense compound
ctcacatagtgctcttgtgg

SEQ ID NO: 16895 - DNA, 20 bp, Artificial Sequence
  Antisense compound
tctcacatagtgctcttgtg

SEQ ID NO: 16896 - DNA, 20 bp, Artificial Sequence
  Antisense compound
ttctcacatagtgctcttgt

SEQ ID NO: 16897 - DNA, 20 bp, Artificial Sequence
  Antisense compound
attctcacatagtgctcttg

SEQ ID NO: 16898 - DNA, 20 bp, Artificial Sequence
  Antisense compound
aattctcacatagtgctctt

SEQ ID NO: 16899 - DNA, 20 bp, Artificial Sequence
  Antisense compound
taattctcacatagtgctct

SEQ ID NO: 16900 - DNA, 20 bp, Artificial Sequence
  Antisense compound
gtaattctcacatagtgctc

SEQ ID NO: 16901 - DNA, 20 bp, Artificial Sequence
  Antisense compound
agtaattctcacatagtgct

SEQ ID NO: 16902 - DNA, 20 bp, Artificial Sequence
  Antisense compound
cagtaattctcacatagtgc

SEQ ID NO: 16903 - DNA, 20 bp, Artificial Sequence
  Antisense compound
ccagtaattctcacatagtg

SEQ ID NO: 16904 - DNA, 20 bp, Artificial Sequence
  Antisense compound
gccagtaattctcacatagt

SEQ ID NO: 16905 - DNA, 20 bp, Artificial Sequence
  Antisense compound
agccagtaattctcacatag

SEQ ID NO: 16906 - DNA, 20 bp, Artificial Sequence
  Antisense compound
aagccagtaattctcacata

SEQ ID NO: 16907 - DNA, 20 bp, Artificial Sequence
  Antisense compound
caagccagtaattctcacat

SEQ ID NO: 16908 - DNA, 20 bp, Artificial Sequence
  Antisense compound
acaagccagtaattctcaca

SEQ ID NO: 16909 - DNA, 20 bp, Artificial Sequence
  Antisense compound
tacaagccagtaattctcac

SEQ ID NO: 16910 - DNA, 20 bp, Artificial Sequence
  Antisense compound
gtacaagccagtaattctca

SEQ ID NO: 16911 - DNA, 20 bp, Artificial Sequence
  Antisense compound
ggtacaagccagtaattctc

SEQ ID NO: 16912 - DNA, 20 bp, Artificial Sequence
  Antisense compound
gggtacaagccagtaattct

SEQ ID NO: 16913 - DNA, 20 bp, Artificial Sequence
  Antisense compound
tgggtacaagccagtaattc

SEQ ID NO: 16914 - DNA, 20 bp, Artificial Sequence
  Antisense compound
ttgggtacaagccagtaatt

SEQ ID NO: 16915 - DNA, 20 bp, Artificial Sequence
  Antisense compound
gttgggtacaagccagtaat

SEQ ID NO: 16916 - DNA, 20 bp, Artificial Sequence
  Antisense compound
tgttgggtacaagccagtaa

SEQ ID NO: 16917 - DNA, 20 bp, Artificial Sequence
  Antisense compound
gtgttgggtacaagccagta

SEQ ID NO: 16918 - DNA, 20 bp, Artificial Sequence
  Antisense compound
agtgttgggtacaagccagt

SEQ ID NO: 16919 - DNA, 20 bp, Artificial Sequence
  Antisense compound
gagtgttgggtacaagccag

SEQ ID NO: 16920 - DNA, 20 bp, Artificial Sequence
  Antisense compound
tgagtgttgggtacaagcca

SEQ ID NO: 16921 - DNA, 20 bp, Artificial Sequence
  Antisense compound
ttgagtgttgggtacaagcc

SEQ ID NO: 16922 - DNA, 20 bp, Artificial Sequence
  Antisense compound
gttgagtgttgggtacaagc

SEQ ID NO: 16923 - DNA, 20 bp, Artificial Sequence
  Antisense compound
tgttgagtgttgggtacaag

SEQ ID NO: 16924 - DNA, 20 bp, Artificial Sequence
  Antisense compound
atgttgagtgttgggtacaa

SEQ ID NO: 16925 - DNA, 20 bp, Artificial Sequence
  Antisense compound
gatgttgagtgttgggtaca

SEQ ID NO: 16926 - DNA, 20 bp, Artificial Sequence
  Antisense compound
agatgttgagtgttgggtac

SEQ ID NO: 16927 - DNA, 20 bp, Artificial Sequence
  Antisense compound
gagatgttgagtgttgggta

SEQ ID NO: 16928 - DNA, 20 bp, Artificial Sequence
  Antisense compound
tgagatgttgagtgttgggt

SEQ ID NO: 16929 - DNA, 20 bp, Artificial Sequence
  Antisense compound
ctgagatgttgagtgttggg

SEQ ID NO: 16930 - DNA, 20 bp, Artificial Sequence
  Antisense compound
tctgagatgttgagtgttgg

SEQ ID NO: 16931 - DNA, 20 bp, Artificial Sequence
  Antisense compound
atctgagatgttgagtgttg

SEQ ID NO: 16932 - DNA, 20 bp, Artificial Sequence
  Antisense compound
catctgagatgttgagtgtt

SEQ ID NO: 16933 - DNA, 20 bp, Artificial Sequence
  Antisense compound
tcatctgagatgttgagtgt

SEQ ID NO: 16934 - DNA, 20 bp, Artificial Sequence
  Antisense compound
ctcatctgagatgttgagtg

SEQ ID NO: 16935 - DNA, 20 bp, Artificial Sequence
  Antisense compound
actcatctgagatgttgagt

SEQ ID NO: 16936 - DNA, 20 bp, Artificial Sequence
  Antisense compound
aactcatctgagatgttgag

SEQ ID NO: 16937 - DNA, 20 bp, Artificial Sequence
  Antisense compound
aaactcatctgagatgttga

SEQ ID NO: 16938 - DNA, 20 bp, Artificial Sequence
  Antisense compound
aaaactcatctgagatgttg

SEQ ID NO: 16939 - DNA, 20 bp, Artificial Sequence
  Antisense compound
gaaaactcatctgagatgtt

SEQ ID NO: 16940 - DNA, 20 bp, Artificial Sequence
  Antisense compound
agaaaactcatctgagatgt

SEQ ID NO: 16941 - DNA, 20 bp, Artificial Sequence
  Antisense compound
tagaaaactcatctgagatg

SEQ ID NO: 16942 - DNA, 20 bp, Artificial Sequence
  Antisense compound
ctagaaaactcatctgagat

SEQ ID NO: 16943 - DNA, 20 bp, Artificial Sequence
  Antisense compound
gctagaaaactcatctgaga

SEQ ID NO: 16944 - DNA, 20 bp, Artificial Sequence
  Antisense compound
tgctagaaaactcatctgag

SEQ ID NO: 16945 - DNA, 20 bp, Artificial Sequence
  Antisense compound
ttgctagaaaactcatctga

SEQ ID NO: 16946 - DNA, 20 bp, Artificial Sequence
  Antisense compound
attgctagaaaactcatctg

SEQ ID NO: 16947 - DNA, 20 bp, Artificial Sequence
  Antisense compound
cattgctagaaaactcatct

SEQ ID NO: 16948 - DNA, 20 bp, Artificial Sequence
  Antisense compound
acattgctagaaaactcatc

SEQ ID NO: 16949 - DNA, 20 bp, Artificial Sequence
  Antisense compound
aacattgctagaaaactcat

SEQ ID NO: 16950 - DNA, 20 bp, Artificial Sequence
  Antisense compound
caacattgctagaaaactca

SEQ ID NO: 16951 - DNA, 20 bp, Artificial Sequence
  Antisense compound
gcaacattgctagaaaactc

SEQ ID NO: 16952 - DNA, 20 bp, Artificial Sequence
  Antisense compound
tgcaacattgctagaaaact

SEQ ID NO: 16953 - DNA, 20 bp, Artificial Sequence
  Antisense compound
ttgcaacattgctagaaaac

SEQ ID NO: 16954 - DNA, 20 bp, Artificial Sequence
  Antisense compound
tttgcaacattgctagaaaa

SEQ ID NO: 16955 - DNA, 20 bp, Artificial Sequence
  Antisense compound
atttgcaacattgctagaaa

SEQ ID NO: 16956 - DNA, 20 bp, Artificial Sequence
  Antisense compound
aatttgcaacattgctagaa

SEQ ID NO: 16957 - DNA, 20 bp, Artificial Sequence
  Antisense compound
taatttgcaacattgctaga

SEQ ID NO: 16958 - DNA, 20 bp, Artificial Sequence
  Antisense compound
ataatttgcaacattgctag

SEQ ID NO: 16959 - DNA, 20 bp, Artificial Sequence
  Antisense compound
gataatttgcaacattgcta

SEQ ID NO: 16960 - DNA, 20 bp, Artificial Sequence
  Antisense compound
tgataatttgcaacattgct

SEQ ID NO: 16961 - DNA, 20 bp, Artificial Sequence
  Antisense compound
ttgataatttgcaacattgc

SEQ ID NO: 16962 - DNA, 20 bp, Artificial Sequence
  Antisense compound
tttgataatttgcaacattg

SEQ ID NO: 16963 - DNA, 20 bp, Artificial Sequence
  Antisense compound
ttttgataatttgcaacatt

SEQ ID NO: 16964 - DNA, 20 bp, Artificial Sequence
  Antisense compound
cttttgataatttgcaacat

SEQ ID NO: 16965 - DNA, 20 bp, Artificial Sequence
  Antisense compound
ccttttgataatttgcaaca

SEQ ID NO: 16966 - DNA, 20 bp, Artificial Sequence
  Antisense compound
accttttgataatttgcaac

SEQ ID NO: 16967 - DNA, 20 bp, Artificial Sequence
  Antisense compound
gaccttttgataatttgcaa

SEQ ID NO: 16968 - DNA, 20 bp, Artificial Sequence
  Antisense compound
cgaccttttgataatttgca

SEQ ID NO: 16969 - DNA, 20 bp, Artificial Sequence
  Antisense compound
ccgaccttttgataatttgc

SEQ ID NO: 16970 - DNA, 20 bp, Artificial Sequence
  Antisense compound
gccgaccttttgataatttg

SEQ ID NO: 16971 - DNA, 20 bp, Artificial Sequence
  Antisense compound
tgccgaccttttgataattt

SEQ ID NO: 16972 - DNA, 20 bp, Artificial Sequence
  Antisense compound
atgccgaccttttgataatt

SEQ ID NO: 16973 - DNA, 20 bp, Artificial Sequence
  Antisense compound
catgccgaccttttgataat

SEQ ID NO: 16974 - DNA, 20 bp, Artificial Sequence
  Antisense compound
gcatgccgaccttttgataa

SEQ ID NO: 16975 - DNA, 20 bp, Artificial Sequence
  Antisense compound
tgcatgccgaccttttgata

SEQ ID NO: 16976 - DNA, 20 bp, Artificial Sequence
  Antisense compound
ttgcatgccgaccttttgat

SEQ ID NO: 16977 - DNA, 20 bp, Artificial Sequence
  Antisense compound
tttgcatgccgaccttttga

SEQ ID NO: 16978 - DNA, 20 bp, Artificial Sequence
  Antisense compound
ttttgcatgccgaccttttg

SEQ ID NO: 16979 - DNA, 20 bp, Artificial Sequence
  Antisense compound
cttttgcatgccgacctttt

SEQ ID NO: 16980 - DNA, 20 bp, Artificial Sequence
  Antisense compound
acttttgcatgccgaccttt

SEQ ID NO: 16981 - DNA, 20 bp, Artificial Sequence
  Antisense compound
tacttttgcatgccgacctt

SEQ ID NO: 16982 - DNA, 20 bp, Artificial Sequence
  Antisense compound
gtacttttgcatgccgacct

SEQ ID NO: 16983 - DNA, 20 bp, Artificial Sequence
  Antisense compound
agtacttttgcatgccgacc

SEQ ID NO: 16984 - DNA, 20 bp, Artificial Sequence
  Antisense compound
gagtacttttgcatgccgac

SEQ ID NO: 16985 - DNA, 20 bp, Artificial Sequence
  Antisense compound
agagtacttttgcatgccga

SEQ ID NO: 16986 - DNA, 20 bp, Artificial Sequence
  Antisense compound
tagagtacttttgcatgccg

SEQ ID NO: 16987 - DNA, 20 bp, Artificial Sequence
  Antisense compound
gtagagtacttttgcatgcc

SEQ ID NO: 16988 - DNA, 20 bp, Artificial Sequence
  Antisense compound
tgtagagtacttttgcatgc

SEQ ID NO: 16989 - DNA, 20 bp, Artificial Sequence
  Antisense compound
gtgtagagtacttttgcatg

SEQ ID NO: 16990 - DNA, 20 bp, Artificial Sequence
  Antisense compound
agtgtagagtacttttgcat

SEQ ID NO: 16991 - DNA, 20 bp, Artificial Sequence
  Antisense compound
gagtgtagagtacttttgca

SEQ ID NO: 16992 - DNA, 20 bp, Artificial Sequence
  Antisense compound
ggagtgtagagtacttttgc

SEQ ID NO: 16993 - DNA, 20 bp, Artificial Sequence
  Antisense compound
tggagtgtagagtacttttg

SEQ ID NO: 16994 - DNA, 20 bp, Artificial Sequence
  Antisense compound
ttggagtgtagagtactttt

SEQ ID NO: 16995 - DNA, 20 bp, Artificial Sequence
  Antisense compound
cttggagtgtagagtacttt

SEQ ID NO: 16996 - DNA, 20 bp, Artificial Sequence
  Antisense compound
ccttggagtgtagagtactt

SEQ ID NO: 16997 - DNA, 20 bp, Artificial Sequence
  Antisense compound
tccttggagtgtagagtact

SEQ ID NO: 16998 - DNA, 20 bp, Artificial Sequence
  Antisense compound
gtccttggagtgtagagtac

SEQ ID NO: 16999 - DNA, 20 bp, Artificial Sequence
  Antisense compound
ggtccttggagtgtagagta

SEQ ID NO: 17000 - DNA, 20 bp, Artificial Sequence
  Antisense compound
tggtccttggagtgtagagt

SEQ ID NO: 17001 - DNA, 20 bp, Artificial Sequence
  Antisense compound
gtggtccttggagtgtagag

SEQ ID NO: 17002 - DNA, 20 bp, Artificial Sequence
  Antisense compound
ggtggtccttggagtgtaga

SEQ ID NO: 17003 - DNA, 20 bp, Artificial Sequence
  Antisense compound
aggtggtccttggagtgtag

SEQ ID NO: 17004 - DNA, 20 bp, Artificial Sequence
  Antisense compound
caggtggtccttggagtgta

SEQ ID NO: 17005 - DNA, 20 bp, Artificial Sequence
  Antisense compound
ccaggtggtccttggagtgt

SEQ ID NO: 17006 - DNA, 20 bp, Artificial Sequence
  Antisense compound
accaggtggtccttggagtg

SEQ ID NO: 17007 - DNA, 20 bp, Artificial Sequence
  Antisense compound
taccaggtggtccttggagt

SEQ ID NO: 17008 - DNA, 20 bp, Artificial Sequence
  Antisense compound
gtaccaggtggtccttggag

SEQ ID NO: 17009 - DNA, 20 bp, Artificial Sequence
  Antisense compound
agtaccaggtggtccttgga

SEQ ID NO: 17010 - DNA, 20 bp, Artificial Sequence
  Antisense compound
cagtaccaggtggtccttgg

SEQ ID NO: 17011 - DNA, 20 bp, Artificial Sequence
  Antisense compound
ccagtaccaggtggtccttg

SEQ ID NO: 17012 - DNA, 20 bp, Artificial Sequence
  Antisense compound
accagtaccaggtggtcctt

SEQ ID NO: 17013 - DNA, 20 bp, Artificial Sequence
  Antisense compound
taccagtaccaggtggtcct

SEQ ID NO: 17014 - DNA, 20 bp, Artificial Sequence
  Antisense compound
ttaccagtaccaggtggtcc

SEQ ID NO: 17015 - DNA, 20 bp, Artificial Sequence
  Antisense compound
cttaccagtaccaggtggtc

SEQ ID NO: 17016 - DNA, 20 bp, Artificial Sequence
  Antisense compound
tcttaccagtaccaggtggt

SEQ ID NO: 17017 - DNA, 20 bp, Artificial Sequence
  Antisense compound
ctcttaccagtaccaggtgg

SEQ ID NO: 17018 - DNA, 20 bp, Artificial Sequence
  Antisense compound
actcttaccagtaccaggtg

SEQ ID NO: 17019 - DNA, 20 bp, Artificial Sequence
  Antisense compound
gactcttaccagtaccaggt

SEQ ID NO: 17020 - DNA, 20 bp, Artificial Sequence
  Antisense compound
tgactcttaccagtaccagg

SEQ ID NO: 17021 - DNA, 20 bp, Artificial Sequence
  Antisense compound
atgactcttaccagtaccag

SEQ ID NO: 17022 - DNA, 20 bp, Artificial Sequence
  Antisense compound
aatgactcttaccagtacca

SEQ ID NO: 17023 - DNA, 20 bp, Artificial Sequence
  Antisense compound
aaatgactcttaccagtacc

SEQ ID NO: 17024 - DNA, 20 bp, Artificial Sequence
  Antisense compound
aaaatgactcttaccagtac

SEQ ID NO: 17025 - DNA, 20 bp, Artificial Sequence
  Antisense compound
caaaatgactcttaccagta

SEQ ID NO: 17026 - DNA, 20 bp, Artificial Sequence
  Antisense compound
gcaaaatgactcttaccagt

SEQ ID NO: 17027 - DNA, 20 bp, Artificial Sequence
  Antisense compound
ggcaaaatgactcttaccag

SEQ ID NO: 17028 - DNA, 20 bp, Artificial Sequence
  Antisense compound
tggcaaaatgactcttacca

SEQ ID NO: 17029 - DNA, 20 bp, Artificial Sequence
  Antisense compound
atggcaaaatgactcttacc

SEQ ID NO: 17030 - DNA, 20 bp, Artificial Sequence
  Antisense compound
gatggcaaaatgactcttac

SEQ ID NO: 17031 - DNA, 20 bp, Artificial Sequence
  Antisense compound
cgatggcaaaatgactctta

SEQ ID NO: 17032 - DNA, 20 bp, Artificial Sequence
  Antisense compound
ccgatggcaaaatgactctt

SEQ ID NO: 17033 - DNA, 20 bp, Artificial Sequence
  Antisense compound
tccgatggcaaaatgactct

SEQ ID NO: 17034 - DNA, 20 bp, Artificial Sequence
  Antisense compound
gtccgatggcaaaatgactc

SEQ ID NO: 17035 - DNA, 20 bp, Artificial Sequence
  Antisense compound
agtccgatggcaaaatgact

SEQ ID NO: 17036 - DNA, 20 bp, Artificial Sequence
  Antisense compound
aagtccgatggcaaaatgac

SEQ ID NO: 17037 - DNA, 20 bp, Artificial Sequence
  Antisense compound
caagtccgatggcaaaatga

SEQ ID NO: 17038 - DNA, 20 bp, Artificial Sequence
  Antisense compound
gcaagtccgatggcaaaatg

SEQ ID NO: 17039 - DNA, 20 bp, Artificial Sequence
  Antisense compound
agcaagtccgatggcaaaat

SEQ ID NO: 17040 - DNA, 20 bp, Artificial Sequence
  Antisense compound
gagcaagtccgatggcaaaa

SEQ ID NO: 17041 - DNA, 20 bp, Artificial Sequence
  Antisense compound
agagcaagtccgatggcaaa

SEQ ID NO: 17042 - DNA, 20 bp, Artificial Sequence
  Antisense compound
gagagcaagtccgatggcaa

SEQ ID NO: 17043 - DNA, 20 bp, Artificial Sequence
  Antisense compound
agagagcaagtccgatggca

SEQ ID NO: 17044 - DNA, 20 bp, Artificial Sequence
  Antisense compound
tagagagcaagtccgatggc

SEQ ID NO: 17045 - DNA, 20 bp, Artificial Sequence
  Antisense compound
atagagagcaagtccgatgg

SEQ ID NO: 17046 - DNA, 20 bp, Artificial Sequence
  Antisense compound
aatagagagcaagtccgatg

SEQ ID NO: 17047 - DNA, 20 bp, Artificial Sequence
  Antisense compound
taatagagagcaagtccgat

SEQ ID NO: 17048 - DNA, 20 bp, Artificial Sequence
  Antisense compound
gtaatagagagcaagtccga

SEQ ID NO: 17049 - DNA, 20 bp, Artificial Sequence
  Antisense compound
ggtaatagagagcaagtccg

SEQ ID NO: 17050 - DNA, 20 bp, Artificial Sequence
  Antisense compound
gggtaatagagagcaagtcc

SEQ ID NO: 17051 - DNA, 20 bp, Artificial Sequence
  Antisense compound
tgggtaatagagagcaagtc

SEQ ID NO: 17052 - DNA, 20 bp, Artificial Sequence
  Antisense compound
atgggtaatagagagcaagt

SEQ ID NO: 17053 - DNA, 20 bp, Artificial Sequence
  Antisense compound
gatgggtaatagagagcaag

SEQ ID NO: 17054 - DNA, 20 bp, Artificial Sequence
  Antisense compound
agatgggtaatagagagcaa

SEQ ID NO: 17055 - DNA, 20 bp, Artificial Sequence
  Antisense compound
cagatgggtaatagagagca

SEQ ID NO: 17056 - DNA, 20 bp, Artificial Sequence
  Antisense compound
gcagatgggtaatagagagc

SEQ ID NO: 17057 - DNA, 20 bp, Artificial Sequence
  Antisense compound
agcagatgggtaatagagag

SEQ ID NO: 17058 - DNA, 20 bp, Artificial Sequence
  Antisense compound
gagcagatgggtaatagaga

SEQ ID NO: 17059 - DNA, 20 bp, Artificial Sequence
  Antisense compound
cgagcagatgggtaatagag

SEQ ID NO: 17060 - DNA, 20 bp, Artificial Sequence
  Antisense compound
gcgagcagatgggtaataga

SEQ ID NO: 17061 - DNA, 20 bp, Artificial Sequence
  Antisense compound
tgcgagcagatgggtaatag

SEQ ID NO: 17062 - DNA, 20 bp, Artificial Sequence
  Antisense compound
atgcgagcagatgggtaata

SEQ ID NO: 17063 - DNA, 20 bp, Artificial Sequence
  Antisense compound
tatgcgagcagatgggtaat

SEQ ID NO: 17064 - DNA, 20 bp, Artificial Sequence
  Antisense compound
ctatgcgagcagatgggtaa

SEQ ID NO: 17065 - DNA, 20 bp, Artificial Sequence
  Antisense compound
actatgcgagcagatgggta

SEQ ID NO: 17066 - DNA, 20 bp, Artificial Sequence
  Antisense compound
cactatgcgagcagatgggt

SEQ ID NO: 17067 - DNA, 20 bp, Artificial Sequence
  Antisense compound
acactatgcgagcagatggg

SEQ ID NO: 17068 - DNA, 20 bp, Artificial Sequence
  Antisense compound
tacactatgcgagcagatgg

SEQ ID NO: 17069 - DNA, 20 bp, Artificial Sequence
  Antisense compound
atacactatgcgagcagatg

SEQ ID NO: 17070 - DNA, 20 bp, Artificial Sequence
  Antisense compound
tatacactatgcgagcagat

SEQ ID NO: 17071 - DNA, 20 bp, Artificial Sequence
  Antisense compound
gtatacactatgcgagcaga

SEQ ID NO: 17072 - DNA, 20 bp, Artificial Sequence
  Antisense compound
cgtatacactatgcgagcag

SEQ ID NO: 17073 - DNA, 20 bp, Artificial Sequence
  Antisense compound
ccgtatacactatgcgagca

SEQ ID NO: 17074 - DNA, 20 bp, Artificial Sequence
  Antisense compound
gccgtatacactatgcgagc

SEQ ID NO: 17075 - DNA, 20 bp, Artificial Sequence
  Antisense compound
tgccgtatacactatgcgag

SEQ ID NO: 17076 - DNA, 20 bp, Artificial Sequence
  Antisense compound
atgccgtatacactatgcga

SEQ ID NO: 17077 - DNA, 20 bp, Artificial Sequence
  Antisense compound
catgccgtatacactatgcg

SEQ ID NO: 17078 - DNA, 20 bp, Artificial Sequence
  Antisense compound
gcatgccgtatacactatgc

SEQ ID NO: 17079 - DNA, 20 bp, Artificial Sequence
  Antisense compound
agcatgccgtatacactatg

SEQ ID NO: 17080 - DNA, 20 bp, Artificial Sequence
  Antisense compound
gagcatgccgtatacactat

SEQ ID NO: 17081 - DNA, 20 bp, Artificial Sequence
  Antisense compound
agagcatgccgtatacacta

SEQ ID NO: 17082 - DNA, 20 bp, Artificial Sequence
  Antisense compound
gagagcatgccgtatacact

SEQ ID NO: 17083 - DNA, 20 bp, Artificial Sequence
  Antisense compound
tgagagcatgccgtatacac

SEQ ID NO: 17084 - DNA, 20 bp, Artificial Sequence
  Antisense compound
atgagagcatgccgtataca

SEQ ID NO: 17085 - DNA, 20 bp, Artificial Sequence
  Antisense compound
catgagagcatgccgtatac

SEQ ID NO: 17086 - DNA, 20 bp, Artificial Sequence
  Antisense compound
gcatgagagcatgccgtata

SEQ ID NO: 17087 - DNA, 20 bp, Artificial Sequence
  Antisense compound
tgcatgagagcatgccgtat

SEQ ID NO: 17088 - DNA, 20 bp, Artificial Sequence
  Antisense compound
ctgcatgagagcatgccgta

SEQ ID NO: 17089 - DNA, 20 bp, Artificial Sequence
  Antisense compound
gctgcatgagagcatgccgt

SEQ ID NO: 17090 - DNA, 20 bp, Artificial Sequence
  Antisense compound
agctgcatgagagcatgccg

SEQ ID NO: 17091 - DNA, 20 bp, Artificial Sequence
  Antisense compound
cagctgcatgagagcatgcc

SEQ ID NO: 17092 - DNA, 20 bp, Artificial Sequence
  Antisense compound
acagctgcatgagagcatgc

SEQ ID NO: 17093 - DNA, 20 bp, Artificial Sequence
  Antisense compound
aacagctgcatgagagcatg

SEQ ID NO: 17094 - DNA, 20 bp, Artificial Sequence
  Antisense compound
caacagctgcatgagagcat

SEQ ID NO: 17095 - DNA, 20 bp, Artificial Sequence
  Antisense compound
tcaacagctgcatgagagca

SEQ ID NO: 17096 - DNA, 20 bp, Artificial Sequence
  Antisense compound
atcaacagctgcatgagagc

SEQ ID NO: 17097 - DNA, 20 bp, Artificial Sequence
  Antisense compound
catcaacagctgcatgagag

SEQ ID NO: 17098 - DNA, 20 bp, Artificial Sequence
  Antisense compound
gcatcaacagctgcatgaga

SEQ ID NO: 17099 - DNA, 20 bp, Artificial Sequence
  Antisense compound
ggcatcaacagctgcatgag

SEQ ID NO: 17100 - DNA, 20 bp, Artificial Sequence
  Antisense compound
gggcatcaacagctgcatga

SEQ ID NO: 17101 - DNA, 20 bp, Artificial Sequence
  Antisense compound
agggcatcaacagctgcatg

SEQ ID NO: 17102 - DNA, 20 bp, Artificial Sequence
  Antisense compound
tagggcatcaacagctgcat

SEQ ID NO: 17103 - DNA, 20 bp, Artificial Sequence
  Antisense compound
atagggcatcaacagctgca

SEQ ID NO: 17104 - DNA, 20 bp, Artificial Sequence
  Antisense compound
catagggcatcaacagctgc

SEQ ID NO: 17105 - DNA, 20 bp, Artificial Sequence
  Antisense compound
acatagggcatcaacagctg

SEQ ID NO: 17106 - DNA, 20 bp, Artificial Sequence
  Antisense compound
cacatagggcatcaacagct

SEQ ID NO: 17107 - DNA, 20 bp, Artificial Sequence
  Antisense compound
tcacatagggcatcaacagc

SEQ ID NO: 17108 - DNA, 20 bp, Artificial Sequence
  Antisense compound
ttcacatagggcatcaacag

SEQ ID NO: 17109 - DNA, 20 bp, Artificial Sequence
  Antisense compound
tttcacatagggcatcaaca

SEQ ID NO: 17110 - DNA, 20 bp, Artificial Sequence
  Antisense compound
ttttcacatagggcatcaac

SEQ ID NO: 17111 - DNA, 20 bp, Artificial Sequence
  Antisense compound
cttttcacatagggcatcaa

SEQ ID NO: 17112 - DNA, 20 bp, Artificial Sequence
  Antisense compound
ccttttcacatagggcatca

SEQ ID NO: 17113 - DNA, 20 bp, Artificial Sequence
  Antisense compound
gccttttcacatagggcatc

SEQ ID NO: 17114 - DNA, 20 bp, Artificial Sequence
  Antisense compound
tgccttttcacatagggcat

SEQ ID NO: 17115 - DNA, 20 bp, Artificial Sequence
  Antisense compound
atgccttttcacatagggca

SEQ ID NO: 17116 - DNA, 20 bp, Artificial Sequence
  Antisense compound
aatgccttttcacatagggc

SEQ ID NO: 17117 - DNA, 20 bp, Artificial Sequence
  Antisense compound
taatgccttttcacataggg

SEQ ID NO: 17118 - DNA, 20 bp, Artificial Sequence
  Antisense compound
ttaatgccttttcacatagg

SEQ ID NO: 17119 - DNA, 20 bp, Artificial Sequence
  Antisense compound
tttaatgccttttcacatag

SEQ ID NO: 17120 - DNA, 20 bp, Artificial Sequence
  Antisense compound
ttttaatgccttttcacata

SEQ ID NO: 17121 - DNA, 20 bp, Artificial Sequence
  Antisense compound
attttaatgccttttcacat

SEQ ID NO: 17122 - DNA, 20 bp, Artificial Sequence
  Antisense compound
tattttaatgccttttcaca

SEQ ID NO: 17123 - DNA, 20 bp, Artificial Sequence
  Antisense compound
atattttaatgccttttcac

SEQ ID NO: 17124 - DNA, 20 bp, Artificial Sequence
  Antisense compound
aatattttaatgccttttca

SEQ ID NO: 17125 - DNA, 20 bp, Artificial Sequence
  Antisense compound
aaatattttaatgccttttc

SEQ ID NO: 17126 - DNA, 20 bp, Artificial Sequence
  Antisense compound
caaatattttaatgcctttt

SEQ ID NO: 17127 - DNA, 20 bp, Artificial Sequence
  Antisense compound
gcaaatattttaatgccttt

SEQ ID NO: 17128 - DNA, 20 bp, Artificial Sequence
  Antisense compound
ggcaaatattttaatgcctt

SEQ ID NO: 17129 - DNA, 20 bp, Artificial Sequence
  Antisense compound
gggcaaatattttaatgcct

SEQ ID NO: 17130 - DNA, 20 bp, Artificial Sequence
  Antisense compound
tgggcaaatattttaatgcc

SEQ ID NO: 17131 - DNA, 20 bp, Artificial Sequence
  Antisense compound
atgggcaaatattttaatgc

SEQ ID NO: 17132 - DNA, 20 bp, Artificial Sequence
  Antisense compound
tatgggcaaatattttaatg

SEQ ID NO: 17133 - DNA, 20 bp, Artificial Sequence
  Antisense compound
ctatgggcaaatattttaat

SEQ ID NO: 17134 - DNA, 20 bp, Artificial Sequence
  Antisense compound
tctatgggcaaatattttaa

SEQ ID NO: 17135 - DNA, 20 bp, Artificial Sequence
  Antisense compound
atctatgggcaaatatttta

SEQ ID NO: 17136 - DNA, 20 bp, Artificial Sequence
  Antisense compound
tatctatgggcaaatatttt

SEQ ID NO: 17137 - DNA, 20 bp, Artificial Sequence
  Antisense compound
ttatctatgggcaaatattt

SEQ ID NO: 17138 - DNA, 20 bp, Artificial Sequence
  Antisense compound
tttatctatgggcaaatatt

SEQ ID NO: 17139 - DNA, 20 bp, Artificial Sequence
  Antisense compound
atttatctatgggcaaatat

SEQ ID NO: 17140 - DNA, 20 bp, Artificial Sequence
  Antisense compound
catttatctatgggcaaata

SEQ ID NO: 17141 - DNA, 20 bp, Artificial Sequence
  Antisense compound
acatttatctatgggcaaat

SEQ ID NO: 17142 - DNA, 20 bp, Artificial Sequence
  Antisense compound
tacatttatctatgggcaaa

SEQ ID NO: 17143 - DNA, 20 bp, Artificial Sequence
  Antisense compound
ctacatttatctatgggcaa

SEQ ID NO: 17144 - DNA, 20 bp, Artificial Sequence
  Antisense compound
actacatttatctatgggca

SEQ ID NO: 17145 - DNA, 20 bp, Artificial Sequence
  Antisense compound
tactacatttatctatgggc

SEQ ID NO: 17146 - DNA, 20 bp, Artificial Sequence
  Antisense compound
ctactacatttatctatggg

SEQ ID NO: 17147 - DNA, 20 bp, Artificial Sequence
  Antisense compound
tctactacatttatctatgg

SEQ ID NO: 17148 - DNA, 20 bp, Artificial Sequence
  Antisense compound
ttctactacatttatctatg

SEQ ID NO: 17149 - DNA, 20 bp, Artificial Sequence
  Antisense compound
attctactacatttatctat

SEQ ID NO: 17150 - DNA, 20 bp, Artificial Sequence
  Antisense compound
gattctactacatttatcta

SEQ ID NO: 17151 - DNA, 20 bp, Artificial Sequence
  Antisense compound
tgattctactacatttatct

SEQ ID NO: 17152 - DNA, 20 bp, Artificial Sequence
  Antisense compound
atgattctactacatttatc

SEQ ID NO: 17153 - DNA, 20 bp, Artificial Sequence
  Antisense compound
tatgattctactacatttat

SEQ ID NO: 17154 - DNA, 20 bp, Artificial Sequence
  Antisense compound
gtatgattctactacattta

SEQ ID NO: 17155 - DNA, 20 bp, Artificial Sequence
  Antisense compound
ggtatgattctactacattt

SEQ ID NO: 17156 - DNA, 20 bp, Artificial Sequence
  Antisense compound
aggtatgattctactacatt

SEQ ID NO: 17157 - DNA, 20 bp, Artificial Sequence
  Antisense compound
caggtatgattctactacat

SEQ ID NO: 17158 - DNA, 20 bp, Artificial Sequence
  Antisense compound
gcaggtatgattctactaca

SEQ ID NO: 17159 - DNA, 20 bp, Artificial Sequence
  Antisense compound
cgcaggtatgattctactac

SEQ ID NO: 17160 - DNA, 20 bp, Artificial Sequence
  Antisense compound
gcgcaggtatgattctacta

SEQ ID NO: 17161 - DNA, 20 bp, Artificial Sequence
  Antisense compound
cgcgcaggtatgattctact

SEQ ID NO: 17162 - DNA, 20 bp, Artificial Sequence
  Antisense compound
acgcgcaggtatgattctac

SEQ ID NO: 17163 - DNA, 20 bp, Artificial Sequence
  Antisense compound
cacgcgcaggtatgattcta

SEQ ID NO: 17164 - DNA, 20 bp, Artificial Sequence
  Antisense compound
gcacgcgcaggtatgattct

SEQ ID NO: 17165 - DNA, 20 bp, Artificial Sequence
  Antisense compound
cgcacgcgcaggtatgattc

SEQ ID NO: 17166 - DNA, 20 bp, Artificial Sequence
  Antisense compound
gcgcacgcgcaggtatgatt

SEQ ID NO: 17167 - DNA, 20 bp, Artificial Sequence
  Antisense compound
cgcgcacgcgcaggtatgat

SEQ ID NO: 17168 - DNA, 20 bp, Artificial Sequence
  Antisense compound
gcgcgcacgcgcaggtatga

SEQ ID NO: 17169 - DNA, 20 bp, Artificial Sequence
  Antisense compound
cgcgcgcacgcgcaggtatg

SEQ ID NO: 17170 - DNA, 20 bp, Artificial Sequence
  Antisense compound
acgcgcgcacgcgcaggtat

SEQ ID NO: 17171 - DNA, 20 bp, Artificial Sequence
  Antisense compound
tacgcgcgcacgcgcaggta

SEQ ID NO: 17172 - DNA, 20 bp, Artificial Sequence
  Antisense compound
ctacgcgcgcacgcgcaggt

SEQ ID NO: 17173 - DNA, 20 bp, Artificial Sequence
  Antisense compound
tctacgcgcgcacgcgcagg

SEQ ID NO: 17174 - DNA, 20 bp, Artificial Sequence
  Antisense compound
ctctacgcgcgcacgcgcag

SEQ ID NO: 17175 - DNA, 20 bp, Artificial Sequence
  Antisense compound
actctacgcgcgcacgcgca

SEQ ID NO: 17176 - DNA, 20 bp, Artificial Sequence
  Antisense compound
cactctacgcgcgcacgcgc

SEQ ID NO: 17177 - DNA, 20 bp, Artificial Sequence
  Antisense compound
acactctacgcgcgcacgcg

SEQ ID NO: 17178 - DNA, 20 bp, Artificial Sequence
  Antisense compound
aacactctacgcgcgcacgc

SEQ ID NO: 17179 - DNA, 20 bp, Artificial Sequence
  Antisense compound
aaacactctacgcgcgcacg

SEQ ID NO: 17180 - DNA, 20 bp, Artificial Sequence
  Antisense compound
aaaacactctacgcgcgcac

SEQ ID NO: 17181 - DNA, 20 bp, Artificial Sequence
  Antisense compound
caaaacactctacgcgcgca

SEQ ID NO: 17182 - DNA, 20 bp, Artificial Sequence
  Antisense compound
tcaaaacactctacgcgcgc

SEQ ID NO: 17183 - DNA, 20 bp, Artificial Sequence
  Antisense compound
atcaaaacactctacgcgcg

SEQ ID NO: 17184 - DNA, 20 bp, Artificial Sequence
  Antisense compound
tatcaaaacactctacgcgc

SEQ ID NO: 17185 - DNA, 20 bp, Artificial Sequence
  Antisense compound
ttatcaaaacactctacgcg

SEQ ID NO: 17186 - DNA, 20 bp, Artificial Sequence
  Antisense compound
tttatcaaaacactctacgc

SEQ ID NO: 17187 - DNA, 20 bp, Artificial Sequence
  Antisense compound
atttatcaaaacactctacg

SEQ ID NO: 17188 - DNA, 20 bp, Artificial Sequence
  Antisense compound
aatttatcaaaacactctac

SEQ ID NO: 17189 - DNA, 20 bp, Artificial Sequence
  Antisense compound
gaatttatcaaaacactcta

SEQ ID NO: 17190 - DNA, 20 bp, Artificial Sequence
  Antisense compound
tgaatttatcaaaacactct

SEQ ID NO: 17191 - DNA, 20 bp, Artificial Sequence
  Antisense compound
ttgaatttatcaaaacactc

SEQ ID NO: 17192 - DNA, 20 bp, Artificial Sequence
  Antisense compound
tttgaatttatcaaaacact

SEQ ID NO: 17193 - DNA, 20 bp, Artificial Sequence
  Antisense compound
ctttgaatttatcaaaacac

SEQ ID NO: 17194 - DNA, 20 bp, Artificial Sequence
  Antisense compound
actttgaatttatcaaaaca

SEQ ID NO: 17195 - DNA, 20 bp, Artificial Sequence
  Antisense compound
cactttgaatttatcaaaac

SEQ ID NO: 17196 - DNA, 20 bp, Artificial Sequence
  Antisense compound
tcactttgaatttatcaaaa

SEQ ID NO: 17197 - DNA, 20 bp, Artificial Sequence
  Antisense compound
ttcactttgaatttatcaaa

SEQ ID NO: 17198 - DNA, 20 bp, Artificial Sequence
  Antisense compound
attcactttgaatttatcaa

SEQ ID NO: 17199 - DNA, 20 bp, Artificial Sequence
  Antisense compound
aattcactttgaatttatca

SEQ ID NO: 17200 - DNA, 20 bp, Artificial Sequence
  Antisense compound
gaattcactttgaatttatc

SEQ ID NO: 17201 - DNA, 20 bp, Artificial Sequence
  Antisense compound
tgaattcactttgaatttat

SEQ ID NO: 17202 - DNA, 20 bp, Artificial Sequence
  Antisense compound
ttgaattcactttgaattta

SEQ ID NO: 17203 - DNA, 20 bp, Artificial Sequence
  Antisense compound
gttgaattcactttgaattt

SEQ ID NO: 17204 - DNA, 20 bp, Artificial Sequence
  Antisense compound
tgttgaattcactttgaatt

SEQ ID NO: 17205 - DNA, 20 bp, Artificial Sequence
  Antisense compound
gtgttgaattcactttgaat

SEQ ID NO: 17206 - DNA, 20 bp, Artificial Sequence
  Antisense compound
agtgttgaattcactttgaa

SEQ ID NO: 17207 - DNA, 20 bp, Artificial Sequence
  Antisense compound
tagtgttgaattcactttga

SEQ ID NO: 17208 - DNA, 20 bp, Artificial Sequence
  Antisense compound
ctagtgttgaattcactttg

SEQ ID NO: 17209 - DNA, 20 bp, Artificial Sequence
  Antisense compound
tctagtgttgaattcacttt

SEQ ID NO: 17210 - DNA, 20 bp, Artificial Sequence
  Antisense compound
ttctagtgttgaattcactt

SEQ ID NO: 17211 - DNA, 20 bp, Artificial Sequence
  Antisense compound
gttctagtgttgaattcact

SEQ ID NO: 17212 - DNA, 20 bp, Artificial Sequence
  Antisense compound
tgttctagtgttgaattcac

SEQ ID NO: 17213 - DNA, 20 bp, Artificial Sequence
  Antisense compound
ctgttctagtgttgaattca

SEQ ID NO: 17214 - DNA, 20 bp, Artificial Sequence
  Antisense compound
actgttctagtgttgaattc

SEQ ID NO: 17215 - DNA, 20 bp, Artificial Sequence
  Antisense compound
tactgttctagtgttgaatt

SEQ ID NO: 17216 - DNA, 20 bp, Artificial Sequence
  Antisense compound
atactgttctagtgttgaat

SEQ ID NO: 17217 - DNA, 20 bp, Artificial Sequence
  Antisense compound
catactgttctagtgttgaa

SEQ ID NO: 17218 - DNA, 20 bp, Artificial Sequence
  Antisense compound
acatactgttctagtgttga

SEQ ID NO: 17219 - DNA, 20 bp, Artificial Sequence
  Antisense compound
aacatactgttctagtgttg

SEQ ID NO: 17220 - DNA, 20 bp, Artificial Sequence
  Antisense compound
aaacatactgttctagtgtt

SEQ ID NO: 17221 - DNA, 20 bp, Artificial Sequence
  Antisense compound
aaaacatactgttctagtgt

SEQ ID NO: 17222 - DNA, 20 bp, Artificial Sequence
  Antisense compound
gaaaacatactgttctagtg

SEQ ID NO: 17223 - DNA, 20 bp, Artificial Sequence
  Antisense compound
agaaaacatactgttctagt

SEQ ID NO: 17224 - DNA, 20 bp, Artificial Sequence
  Antisense compound
cagaaaacatactgttctag

SEQ ID NO: 17225 - DNA, 20 bp, Artificial Sequence
  Antisense compound
gcagaaaacatactgttcta

SEQ ID NO: 17226 - DNA, 20 bp, Artificial Sequence
  Antisense compound
tgcagaaaacatactgttct

SEQ ID NO: 17227 - DNA, 20 bp, Artificial Sequence
  Antisense compound
gtgcagaaaacatactgttc

SEQ ID NO: 17228 - DNA, 20 bp, Artificial Sequence
  Antisense compound
agtgcagaaaacatactgtt

SEQ ID NO: 17229 - DNA, 20 bp, Artificial Sequence
  Antisense compound
cagtgcagaaaacatactgt

SEQ ID NO: 17230 - DNA, 20 bp, Artificial Sequence
  Antisense compound
acagtgcagaaaacatactg

SEQ ID NO: 17231 - DNA, 20 bp, Artificial Sequence
  Antisense compound
tacagtgcagaaaacatact

SEQ ID NO: 17232 - DNA, 20 bp, Artificial Sequence
  Antisense compound
ttacagtgcagaaaacatac

SEQ ID NO: 17233 - DNA, 20 bp, Artificial Sequence
  Antisense compound
tttacagtgcagaaaacata

SEQ ID NO: 17234 - DNA, 20 bp, Artificial Sequence
  Antisense compound
atttacagtgcagaaaacat

SEQ ID NO: 17235 - DNA, 20 bp, Artificial Sequence
  Antisense compound
catttacagtgcagaaaaca

SEQ ID NO: 17236 - DNA, 20 bp, Artificial Sequence
  Antisense compound
gcatttacagtgcagaaaac

SEQ ID NO: 17237 - DNA, 20 bp, Artificial Sequence
  Antisense compound
tgcatttacagtgcagaaaa

SEQ ID NO: 17238 - DNA, 20 bp, Artificial Sequence
  Antisense compound
atgcatttacagtgcagaaa

SEQ ID NO: 17239 - DNA, 20 bp, Artificial Sequence
  Antisense compound
aatgcatttacagtgcagaa

SEQ ID NO: 17240 - DNA, 20 bp, Artificial Sequence
  Antisense compound
caatgcatttacagtgcaga

SEQ ID NO: 17241 - DNA, 20 bp, Artificial Sequence
  Antisense compound
gcaatgcatttacagtgcag

SEQ ID NO: 17242 - DNA, 20 bp, Artificial Sequence
  Antisense compound
ggcaatgcatttacagtgca

SEQ ID NO: 17243 - DNA, 20 bp, Artificial Sequence
  Antisense compound
tggcaatgcatttacagtgc

SEQ ID NO: 17244 - DNA, 20 bp, Artificial Sequence
  Antisense compound
ctggcaatgcatttacagtg

SEQ ID NO: 17245 - DNA, 20 bp, Artificial Sequence
  Antisense compound
tctggcaatgcatttacagt

SEQ ID NO: 17246 - DNA, 20 bp, Artificial Sequence
  Antisense compound
ttctggcaatgcatttacag

SEQ ID NO: 17247 - DNA, 20 bp, Artificial Sequence
  Antisense compound
tttctggcaatgcatttaca

SEQ ID NO: 17248 - DNA, 20 bp, Artificial Sequence
  Antisense compound
gtttctggcaatgcatttac

SEQ ID NO: 17249 - DNA, 20 bp, Artificial Sequence
  Antisense compound
tgtttctggcaatgcattta

SEQ ID NO: 17250 - DNA, 20 bp, Artificial Sequence
  Antisense compound
ttgtttctggcaatgcattt

SEQ ID NO: 17251 - DNA, 20 bp, Artificial Sequence
  Antisense compound
gttgtttctggcaatgcatt

SEQ ID NO: 17252 - DNA, 20 bp, Artificial Sequence
  Antisense compound
agttgtttctggcaatgcat

SEQ ID NO: 17253 - DNA, 20 bp, Artificial Sequence
  Antisense compound
cagttgtttctggcaatgca

SEQ ID NO: 17254 - DNA, 20 bp, Artificial Sequence
  Antisense compound
gcagttgtttctggcaatgc

SEQ ID NO: 17255 - DNA, 20 bp, Artificial Sequence
  Antisense compound
agcagttgtttctggcaatg

SEQ ID NO: 17256 - DNA, 20 bp, Artificial Sequence
  Antisense compound
cagcagttgtttctggcaat

SEQ ID NO: 17257 - DNA, 20 bp, Artificial Sequence
  Antisense compound
tcagcagttgtttctggcaa

SEQ ID NO: 17258 - DNA, 20 bp, Artificial Sequence
  Antisense compound
gtcagcagttgtttctggca

SEQ ID NO: 17259 - DNA, 20 bp, Artificial Sequence
  Antisense compound
tgtcagcagttgtttctggc

SEQ ID NO: 17260 - DNA, 20 bp, Artificial Sequence
  Antisense compound
atgtcagcagttgtttctgg

SEQ ID NO: 17261 - DNA, 20 bp, Artificial Sequence
  Antisense compound
aatgtcagcagttgtttctg

SEQ ID NO: 17262 - DNA, 20 bp, Artificial Sequence
  Antisense compound
caatgtcagcagttgtttct

SEQ ID NO: 17263 - DNA, 20 bp, Artificial Sequence
  Antisense compound
acaatgtcagcagttgtttc

SEQ ID NO: 17264 - DNA, 20 bp, Artificial Sequence
  Antisense compound
tacaatgtcagcagttgttt

SEQ ID NO: 17265 - DNA, 20 bp, Artificial Sequence
  Antisense compound
ctacaatgtcagcagttgtt

SEQ ID NO: 17266 - DNA, 20 bp, Artificial Sequence
  Antisense compound
actacaatgtcagcagttgt

SEQ ID NO: 17267 - DNA, 20 bp, Artificial Sequence
  Antisense compound
gactacaatgtcagcagttg

SEQ ID NO: 17268 - DNA, 20 bp, Artificial Sequence
  Antisense compound
agactacaatgtcagcagtt

SEQ ID NO: 17269 - DNA, 20 bp, Artificial Sequence
  Antisense compound
aagactacaatgtcagcagt

SEQ ID NO: 17270 - DNA, 20 bp, Artificial Sequence
  Antisense compound
aaagactacaatgtcagcag

SEQ ID NO: 17271 - DNA, 20 bp, Artificial Sequence
  Antisense compound
caaagactacaatgtcagca

SEQ ID NO: 17272 - DNA, 20 bp, Artificial Sequence
  Antisense compound
tcaaagactacaatgtcagc

SEQ ID NO: 17273 - DNA, 20 bp, Artificial Sequence
  Antisense compound
atcaaagactacaatgtcag

SEQ ID NO: 17274 - DNA, 20 bp, Artificial Sequence
  Antisense compound
catcaaagactacaatgtca

SEQ ID NO: 17275 - DNA, 20 bp, Artificial Sequence
  Antisense compound
tcatcaaagactacaatgtc

SEQ ID NO: 17276 - DNA, 20 bp, Artificial Sequence
  Antisense compound
ttcatcaaagactacaatgt

SEQ ID NO: 17277 - DNA, 20 bp, Artificial Sequence
  Antisense compound
tttcatcaaagactacaatg

SEQ ID NO: 17278 - DNA, 20 bp, Artificial Sequence
  Antisense compound
atttcatcaaagactacaat

SEQ ID NO: 17279 - DNA, 20 bp, Artificial Sequence
  Antisense compound
gatttcatcaaagactacaa

SEQ ID NO: 17280 - DNA, 20 bp, Artificial Sequence
  Antisense compound
agatttcatcaaagactaca

SEQ ID NO: 17281 - DNA, 20 bp, Artificial Sequence
  Antisense compound
gagatttcatcaaagactac

SEQ ID NO: 17282 - DNA, 20 bp, Artificial Sequence
  Antisense compound
agagatttcatcaaagacta

SEQ ID NO: 17283 - DNA, 20 bp, Artificial Sequence
  Antisense compound
tagagatttcatcaaagact

SEQ ID NO: 17284 - DNA, 20 bp, Artificial Sequence
  Antisense compound
atagagatttcatcaaagac

SEQ ID NO: 17285 - DNA, 20 bp, Artificial Sequence
  Antisense compound
catagagatttcatcaaaga

SEQ ID NO: 17286 - DNA, 20 bp, Artificial Sequence
  Antisense compound
ccatagagatttcatcaaag

SEQ ID NO: 17287 - DNA, 20 bp, Artificial Sequence
  Antisense compound
gccatagagatttcatcaaa

SEQ ID NO: 17288 - DNA, 20 bp, Artificial Sequence
  Antisense compound
agccatagagatttcatcaa

SEQ ID NO: 17289 - DNA, 20 bp, Artificial Sequence
  Antisense compound
tagccatagagatttcatca

SEQ ID NO: 17290 - DNA, 20 bp, Artificial Sequence
  Antisense compound
gtagccatagagatttcatc

SEQ ID NO: 17291 - DNA, 20 bp, Artificial Sequence
  Antisense compound
agtagccatagagatttcat

SEQ ID NO: 17292 - DNA, 20 bp, Artificial Sequence
  Antisense compound
tagtagccatagagatttca

SEQ ID NO: 17293 - DNA, 20 bp, Artificial Sequence
  Antisense compound
ttagtagccatagagatttc

SEQ ID NO: 17294 - DNA, 20 bp, Artificial Sequence
  Antisense compound
attagtagccatagagattt

SEQ ID NO: 17295 - DNA, 20 bp, Artificial Sequence
  Antisense compound
aattagtagccatagagatt

SEQ ID NO: 17296 - DNA, 20 bp, Artificial Sequence
  Antisense compound
taattagtagccatagagat

SEQ ID NO: 17297 - DNA, 20 bp, Artificial Sequence
  Antisense compound
ataattagtagccatagaga

SEQ ID NO: 17298 - DNA, 20 bp, Artificial Sequence
  Antisense compound
cataattagtagccatagag

SEQ ID NO: 17299 - DNA, 20 bp, Artificial Sequence
  Antisense compound
tcataattagtagccataga

SEQ ID NO: 17300 - DNA, 20 bp, Artificial Sequence
  Antisense compound
gtcataattagtagccatag

SEQ ID NO: 17301 - DNA, 20 bp, Artificial Sequence
  Antisense compound
agtcataattagtagccata

SEQ ID NO: 17302 - DNA, 20 bp, Artificial Sequence
  Antisense compound
aagtcataattagtagccat

SEQ ID NO: 17303 - DNA, 20 bp, Artificial Sequence
  Antisense compound
caagtcataattagtagcca

SEQ ID NO: 17304 - DNA, 20 bp, Artificial Sequence
  Antisense compound
tcaagtcataattagtagcc

SEQ ID NO: 17305 - DNA, 20 bp, Artificial Sequence
  Antisense compound
ctcaagtcataattagtagc

SEQ ID NO: 17306 - DNA, 20 bp, Artificial Sequence
  Antisense compound
actcaagtcataattagtag

SEQ ID NO: 17307 - DNA, 20 bp, Artificial Sequence
  Antisense compound
cactcaagtcataattagta

SEQ ID NO: 17308 - DNA, 20 bp, Artificial Sequence
  Antisense compound
acactcaagtcataattagt

SEQ ID NO: 17309 - DNA, 20 bp, Artificial Sequence
  Antisense compound
aacactcaagtcataattag

SEQ ID NO: 17310 - DNA, 20 bp, Artificial Sequence
  Antisense compound
caacactcaagtcataatta

SEQ ID NO: 17311 - DNA, 20 bp, Artificial Sequence
  Antisense compound
acaacactcaagtcataatt

SEQ ID NO: 17312 - DNA, 20 bp, Artificial Sequence
  Antisense compound
gacaacactcaagtcataat

SEQ ID NO: 17313 - DNA, 20 bp, Artificial Sequence
  Antisense compound
tgacaacactcaagtcataa

SEQ ID NO: 17314 - DNA, 20 bp, Artificial Sequence
  Antisense compound
ttgacaacactcaagtcata

SEQ ID NO: 17315 - DNA, 20 bp, Artificial Sequence
  Antisense compound
attgacaacactcaagtcat

SEQ ID NO: 17316 - DNA, 20 bp, Artificial Sequence
  Antisense compound
cattgacaacactcaagtca

SEQ ID NO: 17317 - DNA, 20 bp, Artificial Sequence
  Antisense compound
gcattgacaacactcaagtc

SEQ ID NO: 17318 - DNA, 20 bp, Artificial Sequence
  Antisense compound
agcattgacaacactcaagt

SEQ ID NO: 17319 - DNA, 20 bp, Artificial Sequence
  Antisense compound
tagcattgacaacactcaag

SEQ ID NO: 17320 - DNA, 20 bp, Artificial Sequence
  Antisense compound
ctagcattgacaacactcaa

SEQ ID NO: 17321 - DNA, 20 bp, Artificial Sequence
  Antisense compound
tctagcattgacaacactca

SEQ ID NO: 17322 - DNA, 20 bp, Artificial Sequence
  Antisense compound
gtctagcattgacaacactc

SEQ ID NO: 17323 - DNA, 20 bp, Artificial Sequence
  Antisense compound
agtctagcattgacaacact

SEQ ID NO: 17324 - DNA, 20 bp, Artificial Sequence
  Antisense compound
aagtctagcattgacaacac

SEQ ID NO: 17325 - DNA, 20 bp, Artificial Sequence
  Antisense compound
gaagtctagcattgacaaca

SEQ ID NO: 17326 - DNA, 20 bp, Artificial Sequence
  Antisense compound
cgaagtctagcattgacaac

SEQ ID NO: 17327 - DNA, 20 bp, Artificial Sequence
  Antisense compound
acgaagtctagcattgacaa

SEQ ID NO: 17328 - DNA, 20 bp, Artificial Sequence
  Antisense compound
cacgaagtctagcattgaca

SEQ ID NO: 17329 - DNA, 20 bp, Artificial Sequence
  Antisense compound
gcacgaagtctagcattgac

SEQ ID NO: 17330 - DNA, 20 bp, Artificial Sequence
  Antisense compound
tgcacgaagtctagcattga

SEQ ID NO: 17331 - DNA, 20 bp, Artificial Sequence
  Antisense compound
ttgcacgaagtctagcattg

SEQ ID NO: 17332 - DNA, 20 bp, Artificial Sequence
  Antisense compound
tttgcacgaagtctagcatt

SEQ ID NO: 17333 - DNA, 20 bp, Artificial Sequence
  Antisense compound
ttttgcacgaagtctagcat

SEQ ID NO: 17334 - DNA, 20 bp, Artificial Sequence
  Antisense compound
gttttgcacgaagtctagca

SEQ ID NO: 17335 - DNA, 20 bp, Artificial Sequence
  Antisense compound
tgttttgcacgaagtctagc

SEQ ID NO: 17336 - DNA, 20 bp, Artificial Sequence
  Antisense compound
gtgttttgcacgaagtctag

SEQ ID NO: 17337 - DNA, 20 bp, Artificial Sequence
  Antisense compound
agtgttttgcacgaagtcta

SEQ ID NO: 17338 - DNA, 20 bp, Artificial Sequence
  Antisense compound
tagtgttttgcacgaagtct

SEQ ID NO: 17339 - DNA, 20 bp, Artificial Sequence
  Antisense compound
gtagtgttttgcacgaagtc

SEQ ID NO: 17340 - DNA, 20 bp, Artificial Sequence
  Antisense compound
cgtagtgttttgcacgaagt

SEQ ID NO: 17341 - DNA, 20 bp, Artificial Sequence
  Antisense compound
acgtagtgttttgcacgaag

SEQ ID NO: 17342 - DNA, 20 bp, Artificial Sequence
  Antisense compound
gacgtagtgttttgcacgaa

SEQ ID NO: 17343 - DNA, 20 bp, Artificial Sequence
  Antisense compound
agacgtagtgttttgcacga

SEQ ID NO: 17344 - DNA, 20 bp, Artificial Sequence
  Antisense compound
tagacgtagtgttttgcacg

SEQ ID NO: 17345 - DNA, 20 bp, Artificial Sequence
  Antisense compound
atagacgtagtgttttgcac

SEQ ID NO: 17346 - DNA, 20 bp, Artificial Sequence
  Antisense compound
tatagacgtagtgttttgca

SEQ ID NO: 17347 - DNA, 20 bp, Artificial Sequence
  Antisense compound
atatagacgtagtgttttgc

SEQ ID NO: 17348 - DNA, 20 bp, Artificial Sequence
  Antisense compound
aatatagacgtagtgttttg

SEQ ID NO: 17349 - DNA, 20 bp, Artificial Sequence
  Antisense compound
caatatagacgtagtgtttt

SEQ ID NO: 17350 - DNA, 20 bp, Artificial Sequence
  Antisense compound
ccaatatagacgtagtgttt

SEQ ID NO: 17351 - DNA, 20 bp, Artificial Sequence
  Antisense compound
gccaatatagacgtagtgtt

SEQ ID NO: 17352 - DNA, 20 bp, Artificial Sequence
  Antisense compound
cgccaatatagacgtagtgt

SEQ ID NO: 17353 - DNA, 20 bp, Artificial Sequence
  Antisense compound
tcgccaatatagacgtagtg

SEQ ID NO: 17354 - DNA, 20 bp, Artificial Sequence
  Antisense compound
atcgccaatatagacgtagt

SEQ ID NO: 17355 - DNA, 20 bp, Artificial Sequence
  Antisense compound
gatcgccaatatagacgtag

SEQ ID NO: 17356 - DNA, 20 bp, Artificial Sequence
  Antisense compound
ggatcgccaatatagacgta

SEQ ID NO: 17357 - DNA, 20 bp, Artificial Sequence
  Antisense compound
aggatcgccaatatagacgt

SEQ ID NO: 17358 - DNA, 20 bp, Artificial Sequence
  Antisense compound
caggatcgccaatatagacg

SEQ ID NO: 17359 - DNA, 20 bp, Artificial Sequence
  Antisense compound
gcaggatcgccaatatagac

SEQ ID NO: 17360 - DNA, 20 bp, Artificial Sequence
  Antisense compound
agcaggatcgccaatataga

SEQ ID NO: 17361 - DNA, 20 bp, Artificial Sequence
  Antisense compound
gagcaggatcgccaatatag

SEQ ID NO: 17362 - DNA, 20 bp, Artificial Sequence
  Antisense compound
tgagcaggatcgccaatata

SEQ ID NO: 17363 - DNA, 20 bp, Artificial Sequence
  Antisense compound
ttgagcaggatcgccaatat

SEQ ID NO: 17364 - DNA, 20 bp, Artificial Sequence
  Antisense compound
attgagcaggatcgccaata

SEQ ID NO: 17365 - DNA, 20 bp, Artificial Sequence
  Antisense compound
aattgagcaggatcgccaat

SEQ ID NO: 17366 - DNA, 20 bp, Artificial Sequence
  Antisense compound
taattgagcaggatcgccaa

SEQ ID NO: 17367 - DNA, 20 bp, Artificial Sequence
  Antisense compound
gtaattgagcaggatcgcca

SEQ ID NO: 17368 - DNA, 20 bp, Artificial Sequence
  Antisense compound
ggtaattgagcaggatcgcc

SEQ ID NO: 17369 - DNA, 20 bp, Artificial Sequence
  Antisense compound
tggtaattgagcaggatcgc

SEQ ID NO: 17370 - DNA, 20 bp, Artificial Sequence
  Antisense compound
ctggtaattgagcaggatcg

SEQ ID NO: 17371 - DNA, 20 bp, Artificial Sequence
  Antisense compound
gctggtaattgagcaggatc

SEQ ID NO: 17372 - DNA, 20 bp, Artificial Sequence
  Antisense compound
ggctggtaattgagcaggat

SEQ ID NO: 17373 - DNA, 20 bp, Artificial Sequence
  Antisense compound
gggctggtaattgagcagga

SEQ ID NO: 17374 - DNA, 20 bp, Artificial Sequence
  Antisense compound
ggggctggtaattgagcagg

SEQ ID NO: 17375 - DNA, 20 bp, Artificial Sequence
  Antisense compound
gggggctggtaattgagcag

SEQ ID NO: 17376 - DNA, 20 bp, Artificial Sequence
  Antisense compound
ggggggctggtaattgagca

SEQ ID NO: 17377 - DNA, 20 bp, Artificial Sequence
  Antisense compound
cggggggctggtaattgagc

SEQ ID NO: 17378 - DNA, 20 bp, Artificial Sequence
  Antisense compound
gcggggggctggtaattgag

SEQ ID NO: 17379 - DNA, 20 bp, Artificial Sequence
  Antisense compound
tgcggggggctggtaattga

SEQ ID NO: 17380 - DNA, 20 bp, Artificial Sequence
  Antisense compound
gtgcggggggctggtaattg

SEQ ID NO: 17381 - DNA, 20 bp, Artificial Sequence
  Antisense compound
tgtgcggggggctggtaatt

SEQ ID NO: 17382 - DNA, 20 bp, Artificial Sequence
  Antisense compound
atgtgcggggggctggtaat

SEQ ID NO: 17383 - DNA, 20 bp, Artificial Sequence
  Antisense compound
aatgtgcggggggctggtaa

SEQ ID NO: 17384 - DNA, 20 bp, Artificial Sequence
  Antisense compound
caatgtgcggggggctggta

SEQ ID NO: 17385 - DNA, 20 bp, Artificial Sequence
  Antisense compound
gcaatgtgcggggggctggt

SEQ ID NO: 17386 - DNA, 20 bp, Artificial Sequence
  Antisense compound
agcaatgtgcggggggctgg

SEQ ID NO: 17387 - DNA, 20 bp, Artificial Sequence
  Antisense compound
cagcaatgtgcggggggctg

SEQ ID NO: 17388 - DNA, 20 bp, Artificial Sequence
  Antisense compound
tcagcaatgtgcggggggct

SEQ ID NO: 17389 - DNA, 20 bp, Artificial Sequence
  Antisense compound
gtcagcaatgtgcggggggc

SEQ ID NO: 17390 - DNA, 20 bp, Artificial Sequence
  Antisense compound
agtcagcaatgtgcgggggg

SEQ ID NO: 17391 - DNA, 20 bp, Artificial Sequence
  Antisense compound
tagtcagcaatgtgcggggg

SEQ ID NO: 17392 - DNA, 20 bp, Artificial Sequence
  Antisense compound
ttagtcagcaatgtgcgggg

SEQ ID NO: 17393 - DNA, 20 bp, Artificial Sequence
  Antisense compound
tttagtcagcaatgtgcggg

SEQ ID NO: 17394 - DNA, 20 bp, Artificial Sequence
  Antisense compound
ctttagtcagcaatgtgcgg

SEQ ID NO: 17395 - DNA, 20 bp, Artificial Sequence
  Antisense compound
cctttagtcagcaatgtgcg

SEQ ID NO: 17396 - DNA, 20 bp, Artificial Sequence
  Antisense compound
gcctttagtcagcaatgtgc

SEQ ID NO: 17397 - DNA, 20 bp, Artificial Sequence
  Antisense compound
tgcctttagtcagcaatgtg

SEQ ID NO: 17398 - DNA, 20 bp, Artificial Sequence
  Antisense compound
gtgcctttagtcagcaatgt

SEQ ID NO: 17399 - DNA, 20 bp, Artificial Sequence
  Antisense compound
tgtgcctttagtcagcaatg

SEQ ID NO: 17400 - DNA, 20 bp, Artificial Sequence
  Antisense compound
gtgtgcctttagtcagcaat

SEQ ID NO: 17401 - DNA, 20 bp, Artificial Sequence
  Antisense compound
agtgtgcctttagtcagcaa

SEQ ID NO: 17402 - DNA, 20 bp, Artificial Sequence
  Antisense compound
tagtgtgcctttagtcagca

SEQ ID NO: 17403 - DNA, 20 bp, Artificial Sequence
  Antisense compound
ctagtgtgcctttagtcagc

SEQ ID NO: 17404 - DNA, 20 bp, Artificial Sequence
  Antisense compound
tctagtgtgcctttagtcag

SEQ ID NO: 17405 - DNA, 20 bp, Artificial Sequence
  Antisense compound
ttctagtgtgcctttagtca

SEQ ID NO: 17406 - DNA, 20 bp, Artificial Sequence
  Antisense compound
gttctagtgtgcctttagtc

SEQ ID NO: 17407 - DNA, 20 bp, Artificial Sequence
  Antisense compound
ggttctagtgtgcctttagt

SEQ ID NO: 17408 - DNA, 20 bp, Artificial Sequence
  Antisense compound
tggttctagtgtgcctttag

SEQ ID NO: 17409 - DNA, 20 bp, Artificial Sequence
  Antisense compound
ctggttctagtgtgccttta

SEQ ID NO: 17410 - DNA, 20 bp, Artificial Sequence
  Antisense compound
tctggttctagtgtgccttt

SEQ ID NO: 17411 - DNA, 20 bp, Artificial Sequence
  Antisense compound
ttctggttctagtgtgcctt

SEQ ID NO: 17412 - DNA, 20 bp, Artificial Sequence
  Antisense compound
attctggttctagtgtgcct

SEQ ID NO: 17413 - DNA, 20 bp, Artificial Sequence
  Antisense compound
tattctggttctagtgtgcc

SEQ ID NO: 17414 - DNA, 20 bp, Artificial Sequence
  Antisense compound
atattctggttctagtgtgc

SEQ ID NO: 17415 - DNA, 20 bp, Artificial Sequence
  Antisense compound
aatattctggttctagtgtg

SEQ ID NO: 17416 - DNA, 20 bp, Artificial Sequence
  Antisense compound
aaatattctggttctagtgt

SEQ ID NO: 17417 - DNA, 20 bp, Artificial Sequence
  Antisense compound
aaaatattctggttctagtg

SEQ ID NO: 17418 - DNA, 20 bp, Artificial Sequence
  Antisense compound
taaaatattctggttctagt

SEQ ID NO: 17419 - DNA, 20 bp, Artificial Sequence
  Antisense compound
ttaaaatattctggttctag

SEQ ID NO: 17420 - DNA, 20 bp, Artificial Sequence
  Antisense compound
attaaaatattctggttcta

SEQ ID NO: 17421 - DNA, 20 bp, Artificial Sequence
  Antisense compound
aattaaaatattctggttct

SEQ ID NO: 17422 - DNA, 20 bp, Artificial Sequence
  Antisense compound
gaattaaaatattctggttc

SEQ ID NO: 17423 - DNA, 20 bp, Artificial Sequence
  Antisense compound
tgaattaaaatattctggtt

SEQ ID NO: 17424 - DNA, 20 bp, Artificial Sequence
  Antisense compound
ctgaattaaaatattctggt

SEQ ID NO: 17425 - DNA, 20 bp, Artificial Sequence
  Antisense compound
actgaattaaaatattctgg

SEQ ID NO: 17426 - DNA, 20 bp, Artificial Sequence
  Antisense compound
cactgaattaaaatattctg

SEQ ID NO: 17427 - DNA, 20 bp, Artificial Sequence
  Antisense compound
acactgaattaaaatattct

SEQ ID NO: 17428 - DNA, 20 bp, Artificial Sequence
  Antisense compound
cacactgaattaaaatattc

SEQ ID NO: 17429 - DNA, 20 bp, Artificial Sequence
  Antisense compound
gcacactgaattaaaatatt

SEQ ID NO: 17430 - DNA, 20 bp, Artificial Sequence
  Antisense compound
tgcacactgaattaaaatat

SEQ ID NO: 17431 - DNA, 20 bp, Artificial Sequence
  Antisense compound
ctgcacactgaattaaaata

SEQ ID NO: 17432 - DNA, 20 bp, Artificial Sequence
  Antisense compound
tctgcacactgaattaaaat

SEQ ID NO: 17433 - DNA, 20 bp, Artificial Sequence
  Antisense compound
gtctgcacactgaattaaaa

SEQ ID NO: 17434 - DNA, 20 bp, Artificial Sequence
  Antisense compound
agtctgcacactgaattaaa

SEQ ID NO: 17435 - DNA, 20 bp, Artificial Sequence
  Antisense compound
aagtctgcacactgaattaa

SEQ ID NO: 17436 - DNA, 20 bp, Artificial Sequence
  Antisense compound
taagtctgcacactgaatta

SEQ ID NO: 17437 - DNA, 20 bp, Artificial Sequence
  Antisense compound
ataagtctgcacactgaatt

SEQ ID NO: 17438 - DNA, 20 bp, Artificial Sequence
  Antisense compound
cataagtctgcacactgaat

SEQ ID NO: 17439 - DNA, 20 bp, Artificial Sequence
  Antisense compound
tcataagtctgcacactgaa

SEQ ID NO: 17440 - DNA, 20 bp, Artificial Sequence
  Antisense compound
ttcataagtctgcacactga

SEQ ID NO: 17441 - DNA, 20 bp, Artificial Sequence
  Antisense compound
tttcataagtctgcacactg

SEQ ID NO: 17442 - DNA, 20 bp, Artificial Sequence
  Antisense compound
ttttcataagtctgcacact

SEQ ID NO: 17443 - DNA, 20 bp, Artificial Sequence
  Antisense compound
gttttcataagtctgcacac

SEQ ID NO: 17444 - DNA, 20 bp, Artificial Sequence
  Antisense compound
tgttttcataagtctgcaca

SEQ ID NO: 17445 - DNA, 20 bp, Artificial Sequence
  Antisense compound
ttgttttcataagtctgcac

SEQ ID NO: 17446 - DNA, 20 bp, Artificial Sequence
  Antisense compound
attgttttcataagtctgca

SEQ ID NO: 17447 - DNA, 20 bp, Artificial Sequence
  Antisense compound
tattgttttcataagtctgc

SEQ ID NO: 17448 - DNA, 20 bp, Artificial Sequence
  Antisense compound
ctattgttttcataagtctg

SEQ ID NO: 17449 - DNA, 20 bp, Artificial Sequence
  Antisense compound
cctattgttttcataagtct

SEQ ID NO: 17450 - DNA, 20 bp, Artificial Sequence
  Antisense compound
acctattgttttcataagtc

SEQ ID NO: 17451 - DNA, 20 bp, Artificial Sequence
  Antisense compound
gacctattgttttcataagt

SEQ ID NO: 17452 - DNA, 20 bp, Artificial Sequence
  Antisense compound
ggacctattgttttcataag

SEQ ID NO: 17453 - DNA, 20 bp, Artificial Sequence
  Antisense compound
tggacctattgttttcataa

SEQ ID NO: 17454 - DNA, 20 bp, Artificial Sequence
  Antisense compound
ctggacctattgttttcata

SEQ ID NO: 17455 - DNA, 20 bp, Artificial Sequence
  Antisense compound
tctggacctattgttttcat

SEQ ID NO: 17456 - DNA, 20 bp, Artificial Sequence
  Antisense compound
gtctggacctattgttttca

SEQ ID NO: 17457 - DNA, 20 bp, Artificial Sequence
  Antisense compound
tgtctggacctattgttttc

SEQ ID NO: 17458 - DNA, 20 bp, Artificial Sequence
  Antisense compound
atgtctggacctattgtttt

SEQ ID NO: 17459 - DNA, 20 bp, Artificial Sequence
  Antisense compound
catgtctggacctattgttt

SEQ ID NO: 17460 - DNA, 20 bp, Artificial Sequence
  Antisense compound
acatgtctggacctattgtt

SEQ ID NO: 17461 - DNA, 20 bp, Artificial Sequence
  Antisense compound
aacatgtctggacctattgt

SEQ ID NO: 17462 - DNA, 20 bp, Artificial Sequence
  Antisense compound
gaacatgtctggacctattg

SEQ ID NO: 17463 - DNA, 20 bp, Artificial Sequence
  Antisense compound
ggaacatgtctggacctatt

SEQ ID NO: 17464 - DNA, 20 bp, Artificial Sequence
  Antisense compound
aggaacatgtctggacctat

SEQ ID NO: 17465 - DNA, 20 bp, Artificial Sequence
  Antisense compound
aaggaacatgtctggaccta

SEQ ID NO: 17466 - DNA, 20 bp, Artificial Sequence
  Antisense compound
caaggaacatgtctggacct

SEQ ID NO: 17467 - DNA, 20 bp, Artificial Sequence
  Antisense compound
ccaaggaacatgtctggacc

SEQ ID NO: 17468 - DNA, 20 bp, Artificial Sequence
  Antisense compound
tccaaggaacatgtctggac

SEQ ID NO: 17469 - DNA, 20 bp, Artificial Sequence
  Antisense compound
ttccaaggaacatgtctgga

SEQ ID NO: 17470 - DNA, 20 bp, Artificial Sequence
  Antisense compound
gttccaaggaacatgtctgg

SEQ ID NO: 17471 - DNA, 20 bp, Artificial Sequence
  Antisense compound
agttccaaggaacatgtctg

SEQ ID NO: 17472 - DNA, 20 bp, Artificial Sequence
  Antisense compound
aagttccaaggaacatgtct

SEQ ID NO: 17473 - DNA, 20 bp, Artificial Sequence
  Antisense compound
caagttccaaggaacatgtc

SEQ ID NO: 17474 - DNA, 20 bp, Artificial Sequence
  Antisense compound
acaagttccaaggaacatgt

SEQ ID NO: 17475 - DNA, 20 bp, Artificial Sequence
  Antisense compound
gacaagttccaaggaacatg

SEQ ID NO: 17476 - DNA, 20 bp, Artificial Sequence
  Antisense compound
cgacaagttccaaggaacat

SEQ ID NO: 17477 - DNA, 20 bp, Artificial Sequence
  Antisense compound
gcgacaagttccaaggaaca

SEQ ID NO: 17478 - DNA, 20 bp, Artificial Sequence
  Antisense compound
ggcgacaagttccaaggaac

SEQ ID NO: 17479 - DNA, 20 bp, Artificial Sequence
  Antisense compound
cggcgacaagttccaaggaa

SEQ ID NO: 17480 - DNA, 20 bp, Artificial Sequence
  Antisense compound
acggcgacaagttccaagga

SEQ ID NO: 17481 - DNA, 20 bp, Artificial Sequence
  Antisense compound
aacggcgacaagttccaagg

SEQ ID NO: 17482 - DNA, 20 bp, Artificial Sequence
  Antisense compound
caacggcgacaagttccaag

SEQ ID NO: 17483 - DNA, 20 bp, Artificial Sequence
  Antisense compound
acaacggcgacaagttccaa

SEQ ID NO: 17484 - DNA, 20 bp, Artificial Sequence
  Antisense compound
gacaacggcgacaagttcca

SEQ ID NO: 17485 - DNA, 20 bp, Artificial Sequence
  Antisense compound
ggacaacggcgacaagttcc

SEQ ID NO: 17486 - DNA, 20 bp, Artificial Sequence
  Antisense compound
aggacaacggcgacaagttc

SEQ ID NO: 17487 - DNA, 20 bp, Artificial Sequence
  Antisense compound
caggacaacggcgacaagtt

SEQ ID NO: 17488 - DNA, 20 bp, Artificial Sequence
  Antisense compound
gcaggacaacggcgacaagt

SEQ ID NO: 17489 - DNA, 20 bp, Artificial Sequence
  Antisense compound
agcaggacaacggcgacaag

SEQ ID NO: 17490 - DNA, 20 bp, Artificial Sequence
  Antisense compound
cagcaggacaacggcgacaa

SEQ ID NO: 17491 - DNA, 20 bp, Artificial Sequence
  Antisense compound
tcagcaggacaacggcgaca

SEQ ID NO: 17492 - DNA, 20 bp, Artificial Sequence
  Antisense compound
ttcagcaggacaacggcgac

SEQ ID NO: 17493 - DNA, 20 bp, Artificial Sequence
  Antisense compound
tttcagcaggacaacggcga

SEQ ID NO: 17494 - DNA, 20 bp, Artificial Sequence
  Antisense compound
atttcagcaggacaacggcg

SEQ ID NO: 17495 - DNA, 20 bp, Artificial Sequence
  Antisense compound
aatttcagcaggacaacggc

SEQ ID NO: 17496 - DNA, 20 bp, Artificial Sequence
  Antisense compound
caatttcagcaggacaacgg

SEQ ID NO: 17497 - DNA, 20 bp, Artificial Sequence
  Antisense compound
acaatttcagcaggacaacg

SEQ ID NO: 17498 - DNA, 20 bp, Artificial Sequence
  Antisense compound
aacaatttcagcaggacaac

SEQ ID NO: 17499 - DNA, 20 bp, Artificial Sequence
  Antisense compound
caacaatttcagcaggacaa

SEQ ID NO: 17500 - DNA, 20 bp, Artificial Sequence
  Antisense compound
tcaacaatttcagcaggaca

SEQ ID NO: 17501 - DNA, 20 bp, Artificial Sequence
  Antisense compound
gtcaacaatttcagcaggac

SEQ ID NO: 17502 - DNA, 20 bp, Artificial Sequence
  Antisense compound
tgtcaacaatttcagcagga

SEQ ID NO: 17503 - DNA, 20 bp, Artificial Sequence
  Antisense compound
gtgtcaacaatttcagcagg

SEQ ID NO: 17504 - DNA, 20 bp, Artificial Sequence
  Antisense compound
agtgtcaacaatttcagcag

SEQ ID NO: 17505 - DNA, 20 bp, Artificial Sequence
  Antisense compound
cagtgtcaacaatttcagca

SEQ ID NO: 17506 - DNA, 20 bp, Artificial Sequence
  Antisense compound
acagtgtcaacaatttcagc

SEQ ID NO: 17507 - DNA, 20 bp, Artificial Sequence
  Antisense compound
cacagtgtcaacaatttcag

SEQ ID NO: 17508 - DNA, 20 bp, Artificial Sequence
  Antisense compound
tcacagtgtcaacaatttca

SEQ ID NO: 17509 - DNA, 20 bp, Artificial Sequence
  Antisense compound
ctcacagtgtcaacaatttc

SEQ ID NO: 17510 - DNA, 20 bp, Artificial Sequence
  Antisense compound
actcacagtgtcaacaattt

SEQ ID NO: 17511 - DNA, 20 bp, Artificial Sequence
  Antisense compound
cactcacagtgtcaacaatt

SEQ ID NO: 17512 - DNA, 20 bp, Artificial Sequence
  Antisense compound
gcactcacagtgtcaacaat

SEQ ID NO: 17513 - DNA, 20 bp, Artificial Sequence
  Antisense compound
agcactcacagtgtcaacaa

SEQ ID NO: 17514 - DNA, 20 bp, Artificial Sequence
  Antisense compound
aagcactcacagtgtcaaca

SEQ ID NO: 17515 - DNA, 20 bp, Artificial Sequence
  Antisense compound
aaagcactcacagtgtcaac

SEQ ID NO: 17516 - DNA, 20 bp, Artificial Sequence
  Antisense compound
taaagcactcacagtgtcaa

SEQ ID NO: 17517 - DNA, 20 bp, Artificial Sequence
  Antisense compound
ctaaagcactcacagtgtca

SEQ ID NO: 17518 - DNA, 20 bp, Artificial Sequence
  Antisense compound
actaaagcactcacagtgtc

SEQ ID NO: 17519 - DNA, 20 bp, Artificial Sequence
  Antisense compound
aactaaagcactcacagtgt

SEQ ID NO: 17520 - DNA, 20 bp, Artificial Sequence
  Antisense compound
aaactaaagcactcacagtg

SEQ ID NO: 17521 - DNA, 20 bp, Artificial Sequence
  Antisense compound
taaactaaagcactcacagt

SEQ ID NO: 17522 - DNA, 20 bp, Artificial Sequence
  Antisense compound
ataaactaaagcactcacag

SEQ ID NO: 17523 - DNA, 20 bp, Artificial Sequence
  Antisense compound
cataaactaaagcactcaca

SEQ ID NO: 17524 - DNA, 20 bp, Artificial Sequence
  Antisense compound
tcataaactaaagcactcac

SEQ ID NO: 17525 - DNA, 20 bp, Artificial Sequence
  Antisense compound
gtcataaactaaagcactca

SEQ ID NO: 17526 - DNA, 20 bp, Artificial Sequence
  Antisense compound
tgtcataaactaaagcactc

SEQ ID NO: 17527 - DNA, 20 bp, Artificial Sequence
  Antisense compound
ttgtcataaactaaagcact

SEQ ID NO: 17528 - DNA, 20 bp, Artificial Sequence
  Antisense compound
attgtcataaactaaagcac

SEQ ID NO: 17529 - DNA, 20 bp, Artificial Sequence
  Antisense compound
tattgtcataaactaaagca

SEQ ID NO: 17530 - DNA, 20 bp, Artificial Sequence
  Antisense compound
ttattgtcataaactaaagc

SEQ ID NO: 17531 - DNA, 20 bp, Artificial Sequence
  Antisense compound
cttattgtcataaactaaag

SEQ ID NO: 17532 - DNA, 20 bp, Artificial Sequence
  Antisense compound
gcttattgtcataaactaaa

SEQ ID NO: 17533 - DNA, 20 bp, Artificial Sequence
  Antisense compound
agcttattgtcataaactaa

SEQ ID NO: 17534 - DNA, 20 bp, Artificial Sequence
  Antisense compound
tagcttattgtcataaacta

SEQ ID NO: 17535 - DNA, 20 bp, Artificial Sequence
  Antisense compound
ttagcttattgtcataaact

SEQ ID NO: 17536 - DNA, 20 bp, Artificial Sequence
  Antisense compound
tttagcttattgtcataaac

SEQ ID NO: 17537 - DNA, 20 bp, Artificial Sequence
  Antisense compound
ttttagcttattgtcataaa

SEQ ID NO: 17538 - DNA, 20 bp, Artificial Sequence
  Antisense compound
cttttagcttattgtcataa

SEQ ID NO: 17539 - DNA, 20 bp, Artificial Sequence
  Antisense compound
gcttttagcttattgtcata

SEQ ID NO: 17540 - DNA, 20 bp, Artificial Sequence
  Antisense compound
tgcttttagcttattgtcat

SEQ ID NO: 17541 - DNA, 20 bp, Artificial Sequence
  Antisense compound
gtgcttttagcttattgtca

SEQ ID NO: 17542 - DNA, 20 bp, Artificial Sequence
  Antisense compound
tgtgcttttagcttattgtc

SEQ ID NO: 17543 - DNA, 20 bp, Artificial Sequence
  Antisense compound
gtgtgcttttagcttattgt

SEQ ID NO: 17544 - DNA, 20 bp, Artificial Sequence
  Antisense compound
tgtgtgcttttagcttattg

SEQ ID NO: 17545 - DNA, 20 bp, Artificial Sequence
  Antisense compound
ttgtgtgcttttagcttatt

SEQ ID NO: 17546 - DNA, 20 bp, Artificial Sequence
  Antisense compound
cttgtgtgcttttagcttat

SEQ ID NO: 17547 - DNA, 20 bp, Artificial Sequence
  Antisense compound
ccttgtgtgcttttagctta

SEQ ID NO: 17548 - DNA, 20 bp, Artificial Sequence
  Antisense compound
tccttgtgtgcttttagctt

SEQ ID NO: 17549 - DNA, 20 bp, Artificial Sequence
  Antisense compound
atccttgtgtgcttttagct

SEQ ID NO: 17550 - DNA, 20 bp, Artificial Sequence
  Antisense compound
tatccttgtgtgcttttagc

SEQ ID NO: 17551 - DNA, 20 bp, Artificial Sequence
  Antisense compound
ttatccttgtgtgcttttag

SEQ ID NO: 17552 - DNA, 20 bp, Artificial Sequence
  Antisense compound
cttatccttgtgtgctttta

SEQ ID NO: 17553 - DNA, 20 bp, Artificial Sequence
  Antisense compound
acttatccttgtgtgctttt

SEQ ID NO: 17554 - DNA, 20 bp, Artificial Sequence
  Antisense compound
gacttatccttgtgtgcttt

SEQ ID NO: 17555 - DNA, 20 bp, Artificial Sequence
  Antisense compound
tgacttatccttgtgtgctt

SEQ ID NO: 17556 - DNA, 20 bp, Artificial Sequence
  Antisense compound
ctgacttatccttgtgtgct

SEQ ID NO: 17557 - DNA, 20 bp, Artificial Sequence
  Antisense compound
gctgacttatccttgtgtgc

SEQ ID NO: 17558 - DNA, 20 bp, Artificial Sequence
  Antisense compound
agctgacttatccttgtgtg

SEQ ID NO: 17559 - DNA, 20 bp, Artificial Sequence
  Antisense compound
gagctgacttatccttgtgt

SEQ ID NO: 17560 - DNA, 20 bp, Artificial Sequence
  Antisense compound
tgagctgacttatccttgtg

SEQ ID NO: 17561 - DNA, 20 bp, Artificial Sequence
  Antisense compound
ttgagctgacttatccttgt

SEQ ID NO: 17562 - DNA, 20 bp, Artificial Sequence
  Antisense compound
attgagctgacttatccttg

SEQ ID NO: 17563 - DNA, 20 bp, Artificial Sequence
  Antisense compound
cattgagctgacttatcctt

SEQ ID NO: 17564 - DNA, 20 bp, Artificial Sequence
  Antisense compound
gcattgagctgacttatcct

SEQ ID NO: 17565 - DNA, 20 bp, Artificial Sequence
  Antisense compound
agcattgagctgacttatcc

SEQ ID NO: 17566 - DNA, 20 bp, Artificial Sequence
  Antisense compound
aagcattgagctgacttatc

SEQ ID NO: 17567 - DNA, 20 bp, Artificial Sequence
  Antisense compound
gaagcattgagctgacttat

SEQ ID NO: 17568 - DNA, 20 bp, Artificial Sequence
  Antisense compound
tgaagcattgagctgactta

SEQ ID NO: 17569 - DNA, 20 bp, Artificial Sequence
  Antisense compound
ttgaagcattgagctgactt

SEQ ID NO: 17570 - DNA, 20 bp, Artificial Sequence
  Antisense compound
tttgaagcattgagctgact

SEQ ID NO: 17571 - DNA, 20 bp, Artificial Sequence
  Antisense compound
ttttgaagcattgagctgac

SEQ ID NO: 17572 - DNA, 20 bp, Artificial Sequence
  Antisense compound
attttgaagcattgagctga

SEQ ID NO: 17573 - DNA, 20 bp, Artificial Sequence
  Antisense compound
cattttgaagcattgagctg

SEQ ID NO: 17574 - DNA, 20 bp, Artificial Sequence
  Antisense compound
acattttgaagcattgagct

SEQ ID NO: 17575 - DNA, 20 bp, Artificial Sequence
  Antisense compound
aacattttgaagcattgagc

SEQ ID NO: 17576 - DNA, 20 bp, Artificial Sequence
  Antisense compound
gaacattttgaagcattgag

SEQ ID NO: 17577 - DNA, 20 bp, Artificial Sequence
  Antisense compound
agaacattttgaagcattga

SEQ ID NO: 17578 - DNA, 20 bp, Artificial Sequence
  Antisense compound
tagaacattttgaagcattg

SEQ ID NO: 17579 - DNA, 20 bp, Artificial Sequence
  Antisense compound
gtagaacattttgaagcatt

SEQ ID NO: 17580 - DNA, 20 bp, Artificial Sequence
  Antisense compound
tgtagaacattttgaagcat

SEQ ID NO: 17581 - DNA, 20 bp, Artificial Sequence
  Antisense compound
ttgtagaacattttgaagca

SEQ ID NO: 17582 - DNA, 20 bp, Artificial Sequence
  Antisense compound
tttgtagaacattttgaagc

SEQ ID NO: 17583 - DNA, 20 bp, Artificial Sequence
  Antisense compound
ctttgtagaacattttgaag

SEQ ID NO: 17584 - DNA, 20 bp, Artificial Sequence
  Antisense compound
cctttgtagaacattttgaa

SEQ ID NO: 17585 - DNA, 20 bp, Artificial Sequence
  Antisense compound
acctttgtagaacattttga

SEQ ID NO: 17586 - DNA, 20 bp, Artificial Sequence
  Antisense compound
cacctttgtagaacattttg

SEQ ID NO: 17587 - DNA, 20 bp, Artificial Sequence
  Antisense compound
acacctttgtagaacatttt

SEQ ID NO: 17588 - DNA, 20 bp, Artificial Sequence
  Antisense compound
aacacctttgtagaacattt

SEQ ID NO: 17589 - DNA, 20 bp, Artificial Sequence
  Antisense compound
taacacctttgtagaacatt

SEQ ID NO: 17590 - DNA, 20 bp, Artificial Sequence
  Antisense compound
ataacacctttgtagaacat

SEQ ID NO: 17591 - DNA, 20 bp, Artificial Sequence
  Antisense compound
aataacacctttgtagaaca

SEQ ID NO: 17592 - DNA, 20 bp, Artificial Sequence
  Antisense compound
taataacacctttgtagaac

SEQ ID NO: 17593 - DNA, 20 bp, Artificial Sequence
  Antisense compound
gtaataacacctttgtagaa

SEQ ID NO: 17594 - DNA, 20 bp, Artificial Sequence
  Antisense compound
tgtaataacacctttgtaga

SEQ ID NO: 17595 - DNA, 20 bp, Artificial Sequence
  Antisense compound
gtgtaataacacctttgtag

SEQ ID NO: 17596 - DNA, 20 bp, Artificial Sequence
  Antisense compound
tgtgtaataacacctttgta

SEQ ID NO: 17597 - DNA, 20 bp, Artificial Sequence
  Antisense compound
atgtgtaataacacctttgt

SEQ ID NO: 17598 - DNA, 20 bp, Artificial Sequence
  Antisense compound
catgtgtaataacacctttg

SEQ ID NO: 17599 - DNA, 20 bp, Artificial Sequence
  Antisense compound
tcatgtgtaataacaccttt

SEQ ID NO: 17600 - DNA, 20 bp, Artificial Sequence
  Antisense compound
atcatgtgtaataacacctt

SEQ ID NO: 17601 - DNA, 20 bp, Artificial Sequence
  Antisense compound
catcatgtgtaataacacct

SEQ ID NO: 17602 - DNA, 20 bp, Artificial Sequence
  Antisense compound
acatcatgtgtaataacacc

SEQ ID NO: 17603 - DNA, 20 bp, Artificial Sequence
  Antisense compound
aacatcatgtgtaataacac

SEQ ID NO: 17604 - DNA, 20 bp, Artificial Sequence
  Antisense compound
aaacatcatgtgtaataaca

SEQ ID NO: 17605 - DNA, 20 bp, Artificial Sequence
  Antisense compound
gaaacatcatgtgtaataac

SEQ ID NO: 17606 - DNA, 20 bp, Artificial Sequence
  Antisense compound
tgaaacatcatgtgtaataa

SEQ ID NO: 17607 - DNA, 20 bp, Artificial Sequence
  Antisense compound
atgaaacatcatgtgtaata

SEQ ID NO: 17608 - DNA, 20 bp, Artificial Sequence
  Antisense compound
gatgaaacatcatgtgtaat

SEQ ID NO: 17609 - DNA, 20 bp, Artificial Sequence
  Antisense compound
agatgaaacatcatgtgtaa

SEQ ID NO: 17610 - DNA, 20 bp, Artificial Sequence
  Antisense compound
cagatgaaacatcatgtgta

SEQ ID NO: 17611 - DNA, 20 bp, Artificial Sequence
  Antisense compound
gcagatgaaacatcatgtgt

SEQ ID NO: 17612 - DNA, 20 bp, Artificial Sequence
  Antisense compound
tgcagatgaaacatcatgtg

SEQ ID NO: 17613 - DNA, 20 bp, Artificial Sequence
  Antisense compound
ttgcagatgaaacatcatgt

SEQ ID NO: 17614 - DNA, 20 bp, Artificial Sequence
  Antisense compound
attgcagatgaaacatcatg

SEQ ID NO: 17615 - DNA, 20 bp, Artificial Sequence
  Antisense compound
gattgcagatgaaacatcat

SEQ ID NO: 17616 - DNA, 20 bp, Artificial Sequence
  Antisense compound
tgattgcagatgaaacatca

SEQ ID NO: 17617 - DNA, 20 bp, Artificial Sequence
  Antisense compound
ttgattgcagatgaaacatc

SEQ ID NO: 17618 - DNA, 20 bp, Artificial Sequence
  Antisense compound
gttgattgcagatgaaacat

SEQ ID NO: 17619 - DNA, 20 bp, Artificial Sequence
  Antisense compound
tgttgattgcagatgaaaca

SEQ ID NO: 17620 - DNA, 20 bp, Artificial Sequence
  Antisense compound
ctgttgattgcagatgaaac

SEQ ID NO: 17621 - DNA, 20 bp, Artificial Sequence
  Antisense compound
tctgttgattgcagatgaaa

SEQ ID NO: 17622 - DNA, 20 bp, Artificial Sequence
  Antisense compound
gtctgttgattgcagatgaa

SEQ ID NO: 17623 - DNA, 20 bp, Artificial Sequence
  Antisense compound
ggtctgttgattgcagatga

SEQ ID NO: 17624 - DNA, 20 bp, Artificial Sequence
  Antisense compound
aggtctgttgattgcagatg

SEQ ID NO: 17625 - DNA, 20 bp, Artificial Sequence
  Antisense compound
gaggtctgttgattgcagat

SEQ ID NO: 17626 - DNA, 20 bp, Artificial Sequence
  Antisense compound
tgaggtctgttgattgcaga

SEQ ID NO: 17627 - DNA, 20 bp, Artificial Sequence
  Antisense compound
ttgaggtctgttgattgcag

SEQ ID NO: 17628 - DNA, 20 bp, Artificial Sequence
  Antisense compound
tttgaggtctgttgattgca

SEQ ID NO: 17629 - DNA, 20 bp, Artificial Sequence
  Antisense compound
atttgaggtctgttgattgc

SEQ ID NO: 17630 - DNA, 20 bp, Artificial Sequence
  Antisense compound
tatttgaggtctgttgattg

SEQ ID NO: 17631 - DNA, 20 bp, Artificial Sequence
  Antisense compound
ctatttgaggtctgttgatt

SEQ ID NO: 17632 - DNA, 20 bp, Artificial Sequence
  Antisense compound
cctatttgaggtctgttgat

SEQ ID NO: 17633 - DNA, 20 bp, Artificial Sequence
  Antisense compound
gcctatttgaggtctgttga

SEQ ID NO: 17634 - DNA, 20 bp, Artificial Sequence
  Antisense compound
cgcctatttgaggtctgttg

SEQ ID NO: 17635 - DNA, 20 bp, Artificial Sequence
  Antisense compound
acgcctatttgaggtctgtt

SEQ ID NO: 17636 - DNA, 20 bp, Artificial Sequence
  Antisense compound
aacgcctatttgaggtctgt

SEQ ID NO: 17637 - DNA, 20 bp, Artificial Sequence
  Antisense compound
caacgcctatttgaggtctg

SEQ ID NO: 17638 - DNA, 20 bp, Artificial Sequence
  Antisense compound
acaacgcctatttgaggtct

SEQ ID NO: 17639 - DNA, 20 bp, Artificial Sequence
  Antisense compound
tacaacgcctatttgaggtc

SEQ ID NO: 17640 - DNA, 20 bp, Artificial Sequence
  Antisense compound
ttacaacgcctatttgaggt

SEQ ID NO: 17641 - DNA, 20 bp, Artificial Sequence
  Antisense compound
cttacaacgcctatttgagg

SEQ ID NO: 17642 - DNA, 20 bp, Artificial Sequence
  Antisense compound
tcttacaacgcctatttgag

SEQ ID NO: 17643 - DNA, 20 bp, Artificial Sequence
  Antisense compound
ctcttacaacgcctatttga

SEQ ID NO: 17644 - DNA, 20 bp, Artificial Sequence
  Antisense compound
tctcttacaacgcctatttg

SEQ ID NO: 17645 - DNA, 20 bp, Artificial Sequence
  Antisense compound
ttctcttacaacgcctattt

SEQ ID NO: 17646 - DNA, 20 bp, Artificial Sequence
  Antisense compound
attctcttacaacgcctatt

SEQ ID NO: 17647 - DNA, 20 bp, Artificial Sequence
  Antisense compound
aattctcttacaacgcctat

SEQ ID NO: 17648 - DNA, 20 bp, Artificial Sequence
  Antisense compound
aaattctcttacaacgccta

SEQ ID NO: 17649 - DNA, 20 bp, Artificial Sequence
  Antisense compound
gaaattctcttacaacgcct

SEQ ID NO: 17650 - DNA, 20 bp, Artificial Sequence
  Antisense compound
agaaattctcttacaacgcc

SEQ ID NO: 17651 - DNA, 20 bp, Artificial Sequence
  Antisense compound
aagaaattctcttacaacgc

SEQ ID NO: 17652 - DNA, 20 bp, Artificial Sequence
  Antisense compound
taagaaattctcttacaacg

SEQ ID NO: 17653 - DNA, 20 bp, Artificial Sequence
  Antisense compound
gtaagaaattctcttacaac

SEQ ID NO: 17654 - DNA, 20 bp, Artificial Sequence
  Antisense compound
tgtaagaaattctcttacaa

SEQ ID NO: 17655 - DNA, 20 bp, Artificial Sequence
  Antisense compound
gtgtaagaaattctcttaca

SEQ ID NO: 17656 - DNA, 20 bp, Artificial Sequence
  Antisense compound
cgtgtaagaaattctcttac

SEQ ID NO: 17657 - DNA, 20 bp, Artificial Sequence
  Antisense compound
gcgtgtaagaaattctctta

SEQ ID NO: 17658 - DNA, 20 bp, Artificial Sequence
  Antisense compound
tgcgtgtaagaaattctctt

SEQ ID NO: 17659 - DNA, 20 bp, Artificial Sequence
  Antisense compound
ttgcgtgtaagaaattctct

SEQ ID NO: 17660 - DNA, 20 bp, Artificial Sequence
  Antisense compound
attgcgtgtaagaaattctc

SEQ ID NO: 17661 - DNA, 20 bp, Artificial Sequence
  Antisense compound
gattgcgtgtaagaaattct

SEQ ID NO: 17662 - DNA, 20 bp, Artificial Sequence
  Antisense compound
ggattgcgtgtaagaaattc

SEQ ID NO: 17663 - DNA, 20 bp, Artificial Sequence
  Antisense compound
aggattgcgtgtaagaaatt

SEQ ID NO: 17664 - DNA, 20 bp, Artificial Sequence
  Antisense compound
caggattgcgtgtaagaaat

SEQ ID NO: 17665 - DNA, 20 bp, Artificial Sequence
  Antisense compound
gcaggattgcgtgtaagaaa

SEQ ID NO: 17666 - DNA, 20 bp, Artificial Sequence
  Antisense compound
agcaggattgcgtgtaagaa

SEQ ID NO: 17667 - DNA, 20 bp, Artificial Sequence
  Antisense compound
aagcaggattgcgtgtaaga

SEQ ID NO: 17668 - DNA, 20 bp, Artificial Sequence
  Antisense compound
caagcaggattgcgtgtaag

SEQ ID NO: 17669 - DNA, 20 bp, Artificial Sequence
  Antisense compound
ccaagcaggattgcgtgtaa

SEQ ID NO: 17670 - DNA, 20 bp, Artificial Sequence
  Antisense compound
tccaagcaggattgcgtgta

SEQ ID NO: 17671 - DNA, 20 bp, Artificial Sequence
  Antisense compound
ctccaagcaggattgcgtgt

SEQ ID NO: 17672 - DNA, 20 bp, Artificial Sequence
  Antisense compound
tctccaagcaggattgcgtg

SEQ ID NO: 17673 - DNA, 20 bp, Artificial Sequence
  Antisense compound
ttctccaagcaggattgcgt

SEQ ID NO: 17674 - DNA, 20 bp, Artificial Sequence
  Antisense compound
tttctccaagcaggattgcg

SEQ ID NO: 17675 - DNA, 20 bp, Artificial Sequence
  Antisense compound
ttttctccaagcaggattgc

SEQ ID NO: 17676 - DNA, 20 bp, Artificial Sequence
  Antisense compound
cttttctccaagcaggattg

SEQ ID NO: 17677 - DNA, 20 bp, Artificial Sequence
  Antisense compound
gcttttctccaagcaggatt

SEQ ID NO: 17678 - DNA, 20 bp, Artificial Sequence
  Antisense compound
agcttttctccaagcaggat

SEQ ID NO: 17679 - DNA, 20 bp, Artificial Sequence
  Antisense compound
cagcttttctccaagcagga

SEQ ID NO: 17680 - DNA, 20 bp, Artificial Sequence
  Antisense compound
acagcttttctccaagcagg

SEQ ID NO: 17681 - DNA, 20 bp, Artificial Sequence
  Antisense compound
aacagcttttctccaagcag

SEQ ID NO: 17682 - DNA, 20 bp, Artificial Sequence
  Antisense compound
aaacagcttttctccaagca

SEQ ID NO: 17683 - DNA, 20 bp, Artificial Sequence
  Antisense compound
aaaacagcttttctccaagc

SEQ ID NO: 17684 - DNA, 20 bp, Artificial Sequence
  Antisense compound
aaaaacagcttttctccaag

SEQ ID NO: 17685 - DNA, 20 bp, Artificial Sequence
  Antisense compound
taaaaacagcttttctccaa

SEQ ID NO: 17686 - DNA, 20 bp, Artificial Sequence
  Antisense compound
ataaaaacagcttttctcca

SEQ ID NO: 17687 - DNA, 20 bp, Artificial Sequence
  Antisense compound
gataaaaacagcttttctcc

SEQ ID NO: 17688 - DNA, 20 bp, Artificial Sequence
  Antisense compound
agataaaaacagcttttctc

SEQ ID NO: 17689 - DNA, 20 bp, Artificial Sequence
  Antisense compound
gagataaaaacagcttttct

SEQ ID NO: 17690 - DNA, 20 bp, Artificial Sequence
  Antisense compound
tgagataaaaacagcttttc

SEQ ID NO: 17691 - DNA, 20 bp, Artificial Sequence
  Antisense compound
gtgagataaaaacagctttt

SEQ ID NO: 17692 - DNA, 20 bp, Artificial Sequence
  Antisense compound
ggtgagataaaaacagcttt

SEQ ID NO: 17693 - DNA, 20 bp, Artificial Sequence
  Antisense compound
aggtgagataaaaacagctt

SEQ ID NO: 17694 - DNA, 20 bp, Artificial Sequence
  Antisense compound
aaggtgagataaaaacagct

SEQ ID NO: 17695 - DNA, 20 bp, Artificial Sequence
  Antisense compound
taaggtgagataaaaacagc

SEQ ID NO: 17696 - DNA, 20 bp, Artificial Sequence
  Antisense compound
ataaggtgagataaaaacag

SEQ ID NO: 17697 - DNA, 20 bp, Artificial Sequence
  Antisense compound
tataaggtgagataaaaaca

SEQ ID NO: 17698 - DNA, 20 bp, Artificial Sequence
  Antisense compound
ttataaggtgagataaaaac

SEQ ID NO: 17699 - DNA, 20 bp, Artificial Sequence
  Antisense compound
attataaggtgagataaaaa

SEQ ID NO: 17700 - DNA, 20 bp, Artificial Sequence
  Antisense compound
aattataaggtgagataaaa

SEQ ID NO: 17701 - DNA, 20 bp, Artificial Sequence
  Antisense compound
gaattataaggtgagataaa

SEQ ID NO: 17702 - DNA, 20 bp, Artificial Sequence
  Antisense compound
tgaattataaggtgagataa

SEQ ID NO: 17703 - DNA, 20 bp, Artificial Sequence
  Antisense compound
gtgaattataaggtgagata

SEQ ID NO: 17704 - DNA, 20 bp, Artificial Sequence
  Antisense compound
tgtgaattataaggtgagat

SEQ ID NO: 17705 - DNA, 20 bp, Artificial Sequence
  Antisense compound
ctgtgaattataaggtgaga

SEQ ID NO: 17706 - DNA, 20 bp, Artificial Sequence
  Antisense compound
tctgtgaattataaggtgag

SEQ ID NO: 17707 - DNA, 20 bp, Artificial Sequence
  Antisense compound
ttctgtgaattataaggtga

SEQ ID NO: 17708 - DNA, 20 bp, Artificial Sequence
  Antisense compound
gttctgtgaattataaggtg

SEQ ID NO: 17709 - DNA, 20 bp, Artificial Sequence
  Antisense compound
cgttctgtgaattataaggt

SEQ ID NO: 17710 - DNA, 20 bp, Artificial Sequence
  Antisense compound
gcgttctgtgaattataagg

SEQ ID NO: 17711 - DNA, 20 bp, Artificial Sequence
  Antisense compound
agcgttctgtgaattataag

SEQ ID NO: 17712 - DNA, 20 bp, Artificial Sequence
  Antisense compound
cagcgttctgtgaattataa

SEQ ID NO: 17713 - DNA, 20 bp, Artificial Sequence
  Antisense compound
acagcgttctgtgaattata

SEQ ID NO: 17714 - DNA, 20 bp, Artificial Sequence
  Antisense compound
tacagcgttctgtgaattat

SEQ ID NO: 17715 - DNA, 20 bp, Artificial Sequence
  Antisense compound
ctacagcgttctgtgaatta

SEQ ID NO: 17716 - DNA, 20 bp, Artificial Sequence
  Antisense compound
gctacagcgttctgtgaatt

SEQ ID NO: 17717 - DNA, 20 bp, Artificial Sequence
  Antisense compound
agctacagcgttctgtgaat

SEQ ID NO: 17718 - DNA, 20 bp, Artificial Sequence
  Antisense compound
aagctacagcgttctgtgaa

SEQ ID NO: 17719 - DNA, 20 bp, Artificial Sequence
  Antisense compound
gaagctacagcgttctgtga

SEQ ID NO: 17720 - DNA, 20 bp, Artificial Sequence
  Antisense compound
tgaagctacagcgttctgtg

SEQ ID NO: 17721 - DNA, 20 bp, Artificial Sequence
  Antisense compound
ttgaagctacagcgttctgt

SEQ ID NO: 17722 - DNA, 20 bp, Artificial Sequence
  Antisense compound
tttgaagctacagcgttctg

SEQ ID NO: 17723 - DNA, 20 bp, Artificial Sequence
  Antisense compound
ttttgaagctacagcgttct

SEQ ID NO: 17724 - DNA, 20 bp, Artificial Sequence
  Antisense compound
tttttgaagctacagcgttc

SEQ ID NO: 17725 - DNA, 20 bp, Artificial Sequence
  Antisense compound
atttttgaagctacagcgtt

SEQ ID NO: 17726 - DNA, 20 bp, Artificial Sequence
  Antisense compound
gatttttgaagctacagcgt

SEQ ID NO: 17727 - DNA, 20 bp, Artificial Sequence
  Antisense compound
agatttttgaagctacagcg

SEQ ID NO: 17728 - DNA, 20 bp, Artificial Sequence
  Antisense compound
aagatttttgaagctacagc

SEQ ID NO: 17729 - DNA, 20 bp, Artificial Sequence
  Antisense compound
taagatttttgaagctacag

SEQ ID NO: 17730 - DNA, 20 bp, Artificial Sequence
  Antisense compound
ctaagatttttgaagctaca

SEQ ID NO: 17731 - DNA, 20 bp, Artificial Sequence
  Antisense compound
cctaagatttttgaagctac

SEQ ID NO: 17732 - DNA, 20 bp, Artificial Sequence
  Antisense compound
tcctaagatttttgaagcta

SEQ ID NO: 17733 - DNA, 20 bp, Artificial Sequence
  Antisense compound
atcctaagatttttgaagct

SEQ ID NO: 17734 - DNA, 20 bp, Artificial Sequence
  Antisense compound
aatcctaagatttttgaagc

SEQ ID NO: 17735 - DNA, 20 bp, Artificial Sequence
  Antisense compound
caatcctaagatttttgaag

SEQ ID NO: 17736 - DNA, 20 bp, Artificial Sequence
  Antisense compound
gcaatcctaagatttttgaa

SEQ ID NO: 17737 - DNA, 20 bp, Artificial Sequence
  Antisense compound
ggcaatcctaagatttttga

SEQ ID NO: 17738 - DNA, 20 bp, Artificial Sequence
  Antisense compound
aggcaatcctaagatttttg

SEQ ID NO: 17739 - DNA, 20 bp, Artificial Sequence
  Antisense compound
taggcaatcctaagattttt

SEQ ID NO: 17740 - DNA, 20 bp, Artificial Sequence
  Antisense compound
gtaggcaatcctaagatttt

SEQ ID NO: 17741 - DNA, 20 bp, Artificial Sequence
  Antisense compound
cgtaggcaatcctaagattt

SEQ ID NO: 17742 - DNA, 20 bp, Artificial Sequence
  Antisense compound
gcgtaggcaatcctaagatt

SEQ ID NO: 17743 - DNA, 20 bp, Artificial Sequence
  Antisense compound
tgcgtaggcaatcctaagat

SEQ ID NO: 17744 - DNA, 20 bp, Artificial Sequence
  Antisense compound
ctgcgtaggcaatcctaaga

SEQ ID NO: 17745 - DNA, 20 bp, Artificial Sequence
  Antisense compound
tctgcgtaggcaatcctaag

SEQ ID NO: 17746 - DNA, 20 bp, Artificial Sequence
  Antisense compound
gtctgcgtaggcaatcctaa

SEQ ID NO: 17747 - DNA, 20 bp, Artificial Sequence
  Antisense compound
agtctgcgtaggcaatccta

SEQ ID NO: 17748 - DNA, 20 bp, Artificial Sequence
  Antisense compound
cagtctgcgtaggcaatcct

SEQ ID NO: 17749 - DNA, 20 bp, Artificial Sequence
  Antisense compound
acagtctgcgtaggcaatcc

SEQ ID NO: 17750 - DNA, 20 bp, Artificial Sequence
  Antisense compound
aacagtctgcgtaggcaatc

SEQ ID NO: 17751 - DNA, 20 bp, Artificial Sequence
  Antisense compound
caacagtctgcgtaggcaat

SEQ ID NO: 17752 - DNA, 20 bp, Artificial Sequence
  Antisense compound
tcaacagtctgcgtaggcaa

SEQ ID NO: 17753 - DNA, 20 bp, Artificial Sequence
  Antisense compound
atcaacagtctgcgtaggca

SEQ ID NO: 17754 - DNA, 20 bp, Artificial Sequence
  Antisense compound
aatcaacagtctgcgtaggc

SEQ ID NO: 17755 - DNA, 20 bp, Artificial Sequence
  Antisense compound
gaatcaacagtctgcgtagg

SEQ ID NO: 17756 - DNA, 20 bp, Artificial Sequence
  Antisense compound
tgaatcaacagtctgcgtag

SEQ ID NO: 17757 - DNA, 20 bp, Artificial Sequence
  Antisense compound
atgaatcaacagtctgcgta

SEQ ID NO: 17758 - DNA, 20 bp, Artificial Sequence
  Antisense compound
gatgaatcaacagtctgcgt

SEQ ID NO: 17759 - DNA, 20 bp, Artificial Sequence
  Antisense compound
tgatgaatcaacagtctgcg

SEQ ID NO: 17760 - DNA, 20 bp, Artificial Sequence
  Antisense compound
gtgatgaatcaacagtctgc

SEQ ID NO: 17761 - DNA, 20 bp, Artificial Sequence
  Antisense compound
tgtgatgaatcaacagtctg

SEQ ID NO: 17762 - DNA, 20 bp, Artificial Sequence
  Antisense compound
ctgtgatgaatcaacagtct

SEQ ID NO: 17763 - DNA, 20 bp, Artificial Sequence
  Antisense compound
cctgtgatgaatcaacagtc

SEQ ID NO: 17764 - DNA, 20 bp, Artificial Sequence
  Antisense compound
ccctgtgatgaatcaacagt

SEQ ID NO: 17765 - DNA, 20 bp, Artificial Sequence
  Antisense compound
accctgtgatgaatcaacag

SEQ ID NO: 17766 - DNA, 20 bp, Artificial Sequence
  Antisense compound
aaccctgtgatgaatcaaca

SEQ ID NO: 17767 - DNA, 20 bp, Artificial Sequence
  Antisense compound
gaaccctgtgatgaatcaac

SEQ ID NO: 17768 - DNA, 20 bp, Artificial Sequence
  Antisense compound
agaaccctgtgatgaatcaa

SEQ ID NO: 17769 - DNA, 20 bp, Artificial Sequence
  Antisense compound
cagaaccctgtgatgaatca

SEQ ID NO: 17770 - DNA, 20 bp, Artificial Sequence
  Antisense compound
tcagaaccctgtgatgaatc

SEQ ID NO: 17771 - DNA, 20 bp, Artificial Sequence
  Antisense compound
ttcagaaccctgtgatgaat

SEQ ID NO: 17772 - DNA, 20 bp, Artificial Sequence
  Antisense compound
attcagaaccctgtgatgaa

SEQ ID NO: 17773 - DNA, 20 bp, Artificial Sequence
  Antisense compound
tattcagaaccctgtgatga

SEQ ID NO: 17774 - DNA, 20 bp, Artificial Sequence
  Antisense compound
atattcagaaccctgtgatg

SEQ ID NO: 17775 - DNA, 20 bp, Artificial Sequence
  Antisense compound
catattcagaaccctgtgat

SEQ ID NO: 17776 - DNA, 20 bp, Artificial Sequence
  Antisense compound
tcatattcagaaccctgtga

SEQ ID NO: 17777 - DNA, 20 bp, Artificial Sequence
  Antisense compound
gtcatattcagaaccctgtg

SEQ ID NO: 17778 - DNA, 20 bp, Artificial Sequence
  Antisense compound
agtcatattcagaaccctgt

SEQ ID NO: 17779 - DNA, 20 bp, Artificial Sequence
  Antisense compound
tagtcatattcagaaccctg

SEQ ID NO: 17780 - DNA, 20 bp, Artificial Sequence
  Antisense compound
atagtcatattcagaaccct

SEQ ID NO: 17781 - DNA, 20 bp, Artificial Sequence
  Antisense compound
catagtcatattcagaaccc

SEQ ID NO: 17782 - DNA, 20 bp, Artificial Sequence
  Antisense compound
acatagtcatattcagaacc

SEQ ID NO: 17783 - DNA, 20 bp, Artificial Sequence
  Antisense compound
gacatagtcatattcagaac

SEQ ID NO: 17784 - DNA, 20 bp, Artificial Sequence
  Antisense compound
tgacatagtcatattcagaa

SEQ ID NO: 17785 - DNA, 20 bp, Artificial Sequence
  Antisense compound
atgacatagtcatattcaga

SEQ ID NO: 17786 - DNA, 20 bp, Artificial Sequence
  Antisense compound
tatgacatagtcatattcag

SEQ ID NO: 17787 - DNA, 20 bp, Artificial Sequence
  Antisense compound
atatgacatagtcatattca

SEQ ID NO: 17788 - DNA, 20 bp, Artificial Sequence
  Antisense compound
aatatgacatagtcatattc

SEQ ID NO: 17789 - DNA, 20 bp, Artificial Sequence
  Antisense compound
gaatatgacatagtcatatt

SEQ ID NO: 17790 - DNA, 20 bp, Artificial Sequence
  Antisense compound
tgaatatgacatagtcatat

SEQ ID NO: 17791 - DNA, 20 bp, Artificial Sequence
  Antisense compound
gtgaatatgacatagtcata

SEQ ID NO: 17792 - DNA, 20 bp, Artificial Sequence
  Antisense compound
tgtgaatatgacatagtcat

SEQ ID NO: 17793 - DNA, 20 bp, Artificial Sequence
  Antisense compound
gtgtgaatatgacatagtca

SEQ ID NO: 17794 - DNA, 20 bp, Artificial Sequence
  Antisense compound
tgtgtgaatatgacatagtc

SEQ ID NO: 17795 - DNA, 20 bp, Artificial Sequence
  Antisense compound
ttgtgtgaatatgacatagt

SEQ ID NO: 17796 - DNA, 20 bp, Artificial Sequence
  Antisense compound
tttgtgtgaatatgacatag

SEQ ID NO: 17797 - DNA, 20 bp, Artificial Sequence
  Antisense compound
gtttgtgtgaatatgacata

SEQ ID NO: 17798 - DNA, 20 bp, Artificial Sequence
  Antisense compound
agtttgtgtgaatatgacat

SEQ ID NO: 17799 - DNA, 20 bp, Artificial Sequence
  Antisense compound
tagtttgtgtgaatatgaca

SEQ ID NO: 17800 - DNA, 20 bp, Artificial Sequence
  Antisense compound
gtagtttgtgtgaatatgac

SEQ ID NO: 17801 - DNA, 20 bp, Artificial Sequence
  Antisense compound
agtagtttgtgtgaatatga

SEQ ID NO: 17802 - DNA, 20 bp, Artificial Sequence
  Antisense compound
cagtagtttgtgtgaatatg

SEQ ID NO: 17803 - DNA, 20 bp, Artificial Sequence
  Antisense compound
tcagtagtttgtgtgaatat

SEQ ID NO: 17804 - DNA, 20 bp, Artificial Sequence
  Antisense compound
ttcagtagtttgtgtgaata

SEQ ID NO: 17805 - DNA, 20 bp, Artificial Sequence
  Antisense compound
tttcagtagtttgtgtgaat

SEQ ID NO: 17806 - DNA, 20 bp, Artificial Sequence
  Antisense compound
gtttcagtagtttgtgtgaa

SEQ ID NO: 17807 - DNA, 20 bp, Artificial Sequence
  Antisense compound
tgtttcagtagtttgtgtga

SEQ ID NO: 17808 - DNA, 20 bp, Artificial Sequence
  Antisense compound
ctgtttcagtagtttgtgtg

SEQ ID NO: 17809 - DNA, 20 bp, Artificial Sequence
  Antisense compound
gctgtttcagtagtttgtgt

SEQ ID NO: 17810 - DNA, 20 bp, Artificial Sequence
  Antisense compound
tgctgtttcagtagtttgtg

SEQ ID NO: 17811 - DNA, 20 bp, Artificial Sequence
  Antisense compound
gtgctgtttcagtagtttgt

SEQ ID NO: 17812 - DNA, 20 bp, Artificial Sequence
  Antisense compound
tgtgctgtttcagtagtttg

SEQ ID NO: 17813 - DNA, 20 bp, Artificial Sequence
  Antisense compound
gtgtgctgtttcagtagttt

SEQ ID NO: 17814 - DNA, 20 bp, Artificial Sequence
  Antisense compound
agtgtgctgtttcagtagtt

SEQ ID NO: 17815 - DNA, 20 bp, Artificial Sequence
  Antisense compound
gagtgtgctgtttcagtagt

SEQ ID NO: 17816 - DNA, 20 bp, Artificial Sequence
  Antisense compound
agagtgtgctgtttcagtag

SEQ ID NO: 17817 - DNA, 20 bp, Artificial Sequence
  Antisense compound
aagagtgtgctgtttcagta

SEQ ID NO: 17818 - DNA, 20 bp, Artificial Sequence
  Antisense compound
caagagtgtgctgtttcagt

SEQ ID NO: 17819 - DNA, 20 bp, Artificial Sequence
  Antisense compound
acaagagtgtgctgtttcag

SEQ ID NO: 17820 - DNA, 20 bp, Artificial Sequence
  Antisense compound
tacaagagtgtgctgtttca

SEQ ID NO: 17821 - DNA, 20 bp, Artificial Sequence
  Antisense compound
ttacaagagtgtgctgtttc

SEQ ID NO: 17822 - DNA, 20 bp, Artificial Sequence
  Antisense compound
attacaagagtgtgctgttt

SEQ ID NO: 17823 - DNA, 20 bp, Artificial Sequence
  Antisense compound
cattacaagagtgtgctgtt

SEQ ID NO: 17824 - DNA, 20 bp, Artificial Sequence
  Antisense compound
acattacaagagtgtgctgt

SEQ ID NO: 17825 - DNA, 20 bp, Artificial Sequence
  Antisense compound
gacattacaagagtgtgctg

SEQ ID NO: 17826 - DNA, 20 bp, Artificial Sequence
  Antisense compound
tgacattacaagagtgtgct

SEQ ID NO: 17827 - DNA, 20 bp, Artificial Sequence
  Antisense compound
ttgacattacaagagtgtgc

SEQ ID NO: 17828 - DNA, 20 bp, Artificial Sequence
  Antisense compound
gttgacattacaagagtgtg

SEQ ID NO: 17829 - DNA, 20 bp, Artificial Sequence
  Antisense compound
ggttgacattacaagagtgt

SEQ ID NO: 17830 - DNA, 20 bp, Artificial Sequence
  Antisense compound
cggttgacattacaagagtg

SEQ ID NO: 17831 - DNA, 20 bp, Artificial Sequence
  Antisense compound
gcggttgacattacaagagt

SEQ ID NO: 17832 - DNA, 20 bp, Artificial Sequence
  Antisense compound
agcggttgacattacaagag

SEQ ID NO: 17833 - DNA, 20 bp, Artificial Sequence
  Antisense compound
aagcggttgacattacaaga

SEQ ID NO: 17834 - DNA, 20 bp, Artificial Sequence
  Antisense compound
gaagcggttgacattacaag

SEQ ID NO: 17835 - DNA, 20 bp, Artificial Sequence
  Antisense compound
tgaagcggttgacattacaa

SEQ ID NO: 17836 - DNA, 20 bp, Artificial Sequence
  Antisense compound
ttgaagcggttgacattaca

SEQ ID NO: 17837 - DNA, 20 bp, Artificial Sequence
  Antisense compound
attgaagcggttgacattac

SEQ ID NO: 17838 - DNA, 20 bp, Artificial Sequence
  Antisense compound
cattgaagcggttgacatta

SEQ ID NO: 17839 - DNA, 20 bp, Artificial Sequence
  Antisense compound
acattgaagcggttgacatt

SEQ ID NO: 17840 - DNA, 20 bp, Artificial Sequence
  Antisense compound
cacattgaagcggttgacat

SEQ ID NO: 17841 - DNA, 20 bp, Artificial Sequence
  Antisense compound
ccacattgaagcggttgaca

SEQ ID NO: 17842 - DNA, 20 bp, Artificial Sequence
  Antisense compound
gccacattgaagcggttgac

SEQ ID NO: 17843 - DNA, 20 bp, Artificial Sequence
  Antisense compound
agccacattgaagcggttga

SEQ ID NO: 17844 - DNA, 20 bp, Artificial Sequence
  Antisense compound
tagccacattgaagcggttg

SEQ ID NO: 17845 - DNA, 20 bp, Artificial Sequence
  Antisense compound
atagccacattgaagcggtt

SEQ ID NO: 17846 - DNA, 20 bp, Artificial Sequence
  Antisense compound
gatagccacattgaagcggt

SEQ ID NO: 17847 - DNA, 20 bp, Artificial Sequence
  Antisense compound
tgatagccacattgaagcgg

SEQ ID NO: 17848 - DNA, 20 bp, Artificial Sequence
  Antisense compound
gtgatagccacattgaagcg

SEQ ID NO: 17849 - DNA, 20 bp, Artificial Sequence
  Antisense compound
tgtgatagccacattgaagc

SEQ ID NO: 17850 - DNA, 20 bp, Artificial Sequence
  Antisense compound
ttgtgatagccacattgaag

SEQ ID NO: 17851 - DNA, 20 bp, Artificial Sequence
  Antisense compound
cttgtgatagccacattgaa

SEQ ID NO: 17852 - DNA, 20 bp, Artificial Sequence
  Antisense compound
ccttgtgatagccacattga

SEQ ID NO: 17853 - DNA, 20 bp, Artificial Sequence
  Antisense compound
cccttgtgatagccacattg

SEQ ID NO: 17854 - DNA, 20 bp, Artificial Sequence
  Antisense compound
gcccttgtgatagccacatt

SEQ ID NO: 17855 - DNA, 20 bp, Artificial Sequence
  Antisense compound
tgcccttgtgatagccacat

SEQ ID NO: 17856 - DNA, 20 bp, Artificial Sequence
  Antisense compound
ttgcccttgtgatagccaca

SEQ ID NO: 17857 - DNA, 20 bp, Artificial Sequence
  Antisense compound
tttgcccttgtgatagccac

SEQ ID NO: 17858 - DNA, 20 bp, Artificial Sequence
  Antisense compound
ttttgcccttgtgatagcca

SEQ ID NO: 17859 - DNA, 20 bp, Artificial Sequence
  Antisense compound
tttttgcccttgtgatagcc

SEQ ID NO: 17860 - DNA, 20 bp, Artificial Sequence
  Antisense compound
atttttgcccttgtgatagc

SEQ ID NO: 17861 - DNA, 20 bp, Artificial Sequence
  Antisense compound
aatttttgcccttgtgatag

SEQ ID NO: 17862 - DNA, 20 bp, Artificial Sequence
  Antisense compound
caatttttgcccttgtgata

SEQ ID NO: 17863 - DNA, 20 bp, Artificial Sequence
  Antisense compound
ccaatttttgcccttgtgat

SEQ ID NO: 17864 - DNA, 20 bp, Artificial Sequence
  Antisense compound
gccaatttttgcccttgtga

SEQ ID NO: 17865 - DNA, 20 bp, Artificial Sequence
  Antisense compound
tgccaatttttgcccttgtg

SEQ ID NO: 17866 - DNA, 20 bp, Artificial Sequence
  Antisense compound
atgccaatttttgcccttgt

SEQ ID NO: 17867 - DNA, 20 bp, Artificial Sequence
  Antisense compound
aatgccaatttttgcccttg

SEQ ID NO: 17868 - DNA, 20 bp, Artificial Sequence
  Antisense compound
aaatgccaatttttgccctt

SEQ ID NO: 17869 - DNA, 20 bp, Artificial Sequence
  Antisense compound
aaaatgccaatttttgccct

SEQ ID NO: 17870 - DNA, 20 bp, Artificial Sequence
  Antisense compound
caaaatgccaatttttgccc

SEQ ID NO: 17871 - DNA, 20 bp, Artificial Sequence
  Antisense compound
acaaaatgccaatttttgcc

SEQ ID NO: 17872 - DNA, 20 bp, Artificial Sequence
  Antisense compound
cacaaaatgccaatttttgc

SEQ ID NO: 17873 - DNA, 20 bp, Artificial Sequence
  Antisense compound
gcacaaaatgccaatttttg

SEQ ID NO: 17874 - DNA, 20 bp, Artificial Sequence
  Antisense compound
tgcacaaaatgccaattttt

SEQ ID NO: 17875 - DNA, 20 bp, Artificial Sequence
  Antisense compound
atgcacaaaatgccaatttt

SEQ ID NO: 17876 - DNA, 20 bp, Artificial Sequence
  Antisense compound
tatgcacaaaatgccaattt

SEQ ID NO: 17877 - DNA, 20 bp, Artificial Sequence
  Antisense compound
ttatgcacaaaatgccaatt

SEQ ID NO: 17878 - DNA, 20 bp, Artificial Sequence
  Antisense compound
attatgcacaaaatgccaat

SEQ ID NO: 17879 - DNA, 20 bp, Artificial Sequence
  Antisense compound
cattatgcacaaaatgccaa

SEQ ID NO: 17880 - DNA, 20 bp, Artificial Sequence
  Antisense compound
acattatgcacaaaatgcca

SEQ ID NO: 17881 - DNA, 20 bp, Artificial Sequence
  Antisense compound
gacattatgcacaaaatgcc

SEQ ID NO: 17882 - DNA, 20 bp, Artificial Sequence
  Antisense compound
agacattatgcacaaaatgc

SEQ ID NO: 17883 - DNA, 20 bp, Artificial Sequence
  Antisense compound
cagacattatgcacaaaatg

SEQ ID NO: 17884 - DNA, 20 bp, Artificial Sequence
  Antisense compound
tcagacattatgcacaaaat

SEQ ID NO: 17885 - DNA, 20 bp, Artificial Sequence
  Antisense compound
atcagacattatgcacaaaa

SEQ ID NO: 17886 - DNA, 20 bp, Artificial Sequence
  Antisense compound
tatcagacattatgcacaaa

SEQ ID NO: 17887 - DNA, 20 bp, Artificial Sequence
  Antisense compound
ctatcagacattatgcacaa

SEQ ID NO: 17888 - DNA, 20 bp, Artificial Sequence
  Antisense compound
tctatcagacattatgcaca

SEQ ID NO: 17889 - DNA, 20 bp, Artificial Sequence
  Antisense compound
ctctatcagacattatgcac

SEQ ID NO: 17890 - DNA, 20 bp, Artificial Sequence
  Antisense compound
tctctatcagacattatgca

SEQ ID NO: 17891 - DNA, 20 bp, Artificial Sequence
  Antisense compound
atctctatcagacattatgc

SEQ ID NO: 17892 - DNA, 20 bp, Artificial Sequence
  Antisense compound
gatctctatcagacattatg

SEQ ID NO: 17893 - DNA, 20 bp, Artificial Sequence
  Antisense compound
agatctctatcagacattat

SEQ ID NO: 17894 - DNA, 20 bp, Artificial Sequence
  Antisense compound
aagatctctatcagacatta

SEQ ID NO: 17895 - DNA, 20 bp, Artificial Sequence
  Antisense compound
aaagatctctatcagacatt

SEQ ID NO: 17896 - DNA, 20 bp, Artificial Sequence
  Antisense compound
taaagatctctatcagacat

SEQ ID NO: 17897 - DNA, 20 bp, Artificial Sequence
  Antisense compound
ataaagatctctatcagaca

SEQ ID NO: 17898 - DNA, 20 bp, Artificial Sequence
  Antisense compound
cataaagatctctatcagac

SEQ ID NO: 17899 - DNA, 20 bp, Artificial Sequence
  Antisense compound
tcataaagatctctatcaga

SEQ ID NO: 17900 - DNA, 20 bp, Artificial Sequence
  Antisense compound
gtcataaagatctctatcag

SEQ ID NO: 17901 - DNA, 20 bp, Artificial Sequence
  Antisense compound
tgtcataaagatctctatca

SEQ ID NO: 17902 - DNA, 20 bp, Artificial Sequence
  Antisense compound
ttgtcataaagatctctatc

SEQ ID NO: 17903 - DNA, 20 bp, Artificial Sequence
  Antisense compound
tttgtcataaagatctctat

SEQ ID NO: 17904 - DNA, 20 bp, Artificial Sequence
  Antisense compound
gtttgtcataaagatctcta

SEQ ID NO: 17905 - DNA, 20 bp, Artificial Sequence
  Antisense compound
agtttgtcataaagatctct

SEQ ID NO: 17906 - DNA, 20 bp, Artificial Sequence
  Antisense compound
cagtttgtcataaagatctc

SEQ ID NO: 17907 - DNA, 20 bp, Artificial Sequence
  Antisense compound
gcagtttgtcataaagatct

SEQ ID NO: 17908 - DNA, 20 bp, Artificial Sequence
  Antisense compound
tgcagtttgtcataaagatc

SEQ ID NO: 17909 - DNA, 20 bp, Artificial Sequence
  Antisense compound
ttgcagtttgtcataaagat

SEQ ID NO: 17910 - DNA, 20 bp, Artificial Sequence
  Antisense compound
attgcagtttgtcataaaga

SEQ ID NO: 17911 - DNA, 20 bp, Artificial Sequence
  Antisense compound
aattgcagtttgtcataaag

SEQ ID NO: 17912 - DNA, 20 bp, Artificial Sequence
  Antisense compound
aaattgcagtttgtcataaa

SEQ ID NO: 17913 - DNA, 20 bp, Artificial Sequence
  Antisense compound
taaattgcagtttgtcataa

SEQ ID NO: 17914 - DNA, 20 bp, Artificial Sequence
  Antisense compound
gtaaattgcagtttgtcata

SEQ ID NO: 17915 - DNA, 20 bp, Artificial Sequence
  Antisense compound
tgtaaattgcagtttgtcat

SEQ ID NO: 17916 - DNA, 20 bp, Artificial Sequence
  Antisense compound
ttgtaaattgcagtttgtca

SEQ ID NO: 17917 - DNA, 20 bp, Artificial Sequence
  Antisense compound
cttgtaaattgcagtttgtc

SEQ ID NO: 17918 - DNA, 20 bp, Artificial Sequence
  Antisense compound
acttgtaaattgcagtttgt

SEQ ID NO: 17919 - DNA, 20 bp, Artificial Sequence
  Antisense compound
gacttgtaaattgcagtttg

SEQ ID NO: 17920 - DNA, 20 bp, Artificial Sequence
  Antisense compound
agacttgtaaattgcagttt

SEQ ID NO: 17921 - DNA, 20 bp, Artificial Sequence
  Antisense compound
tagacttgtaaattgcagtt

SEQ ID NO: 17922 - DNA, 20 bp, Artificial Sequence
  Antisense compound
ctagacttgtaaattgcagt

SEQ ID NO: 17923 - DNA, 20 bp, Artificial Sequence
  Antisense compound
tctagacttgtaaattgcag

SEQ ID NO: 17924 - DNA, 20 bp, Artificial Sequence
  Antisense compound
ttctagacttgtaaattgca

SEQ ID NO: 17925 - DNA, 20 bp, Artificial Sequence
  Antisense compound
tttctagacttgtaaattgc

SEQ ID NO: 17926 - DNA, 20 bp, Artificial Sequence
  Antisense compound
atttctagacttgtaaattg

SEQ ID NO: 17927 - DNA, 20 bp, Artificial Sequence
  Antisense compound
tatttctagacttgtaaatt

SEQ ID NO: 17928 - DNA, 20 bp, Artificial Sequence
  Antisense compound
gtatttctagacttgtaaat

SEQ ID NO: 17929 - DNA, 20 bp, Artificial Sequence
  Antisense compound
ggtatttctagacttgtaaa

SEQ ID NO: 17930 - DNA, 20 bp, Artificial Sequence
  Antisense compound
tggtatttctagacttgtaa

SEQ ID NO: 17931 - DNA, 20 bp, Artificial Sequence
  Antisense compound
gtggtatttctagacttgta

SEQ ID NO: 17932 - DNA, 20 bp, Artificial Sequence
  Antisense compound
cgtggtatttctagacttgt

SEQ ID NO: 17933 - DNA, 20 bp, Artificial Sequence
  Antisense compound
acgtggtatttctagacttg

SEQ ID NO: 17934 - DNA, 20 bp, Artificial Sequence
  Antisense compound
gacgtggtatttctagactt

SEQ ID NO: 17935 - DNA, 20 bp, Artificial Sequence
  Antisense compound
cgacgtggtatttctagact

SEQ ID NO: 17936 - DNA, 20 bp, Artificial Sequence
  Antisense compound
gcgacgtggtatttctagac

SEQ ID NO: 17937 - DNA, 20 bp, Artificial Sequence
  Antisense compound
tgcgacgtggtatttctaga

SEQ ID NO: 17938 - DNA, 20 bp, Artificial Sequence
  Antisense compound
ttgcgacgtggtatttctag

SEQ ID NO: 17939 - DNA, 20 bp, Artificial Sequence
  Antisense compound
attgcgacgtggtatttcta

SEQ ID NO: 17940 - DNA, 20 bp, Artificial Sequence
  Antisense compound
cattgcgacgtggtatttct

SEQ ID NO: 17941 - DNA, 20 bp, Artificial Sequence
  Antisense compound
acattgcgacgtggtatttc

SEQ ID NO: 17942 - DNA, 20 bp, Artificial Sequence
  Antisense compound
cacattgcgacgtggtattt

SEQ ID NO: 17943 - DNA, 20 bp, Artificial Sequence
  Antisense compound
ccacattgcgacgtggtatt

SEQ ID NO: 17944 - DNA, 20 bp, Artificial Sequence
  Antisense compound
gccacattgcgacgtggtat

SEQ ID NO: 17945 - DNA, 20 bp, Artificial Sequence
  Antisense compound
agccacattgcgacgtggta

SEQ ID NO: 17946 - DNA, 20 bp, Artificial Sequence
  Antisense compound
tagccacattgcgacgtggt

SEQ ID NO: 17947 - DNA, 20 bp, Artificial Sequence
  Antisense compound
gtagccacattgcgacgtgg

SEQ ID NO: 17948 - DNA, 20 bp, Artificial Sequence
  Antisense compound
tgtagccacattgcgacgtg

SEQ ID NO: 17949 - DNA, 20 bp, Artificial Sequence
  Antisense compound
atgtagccacattgcgacgt

SEQ ID NO: 17950 - DNA, 20 bp, Artificial Sequence
  Antisense compound
aatgtagccacattgcgacg

SEQ ID NO: 17951 - DNA, 20 bp, Artificial Sequence
  Antisense compound
taatgtagccacattgcgac

SEQ ID NO: 17952 - DNA, 20 bp, Artificial Sequence
  Antisense compound
gtaatgtagccacattgcga

SEQ ID NO: 17953 - DNA, 20 bp, Artificial Sequence
  Antisense compound
tgtaatgtagccacattgcg

SEQ ID NO: 17954 - DNA, 20 bp, Artificial Sequence
  Antisense compound
ttgtaatgtagccacattgc

SEQ ID NO: 17955 - DNA, 20 bp, Artificial Sequence
  Antisense compound
cttgtaatgtagccacattg

SEQ ID NO: 17956 - DNA, 20 bp, Artificial Sequence
  Antisense compound
gcttgtaatgtagccacatt

SEQ ID NO: 17957 - DNA, 20 bp, Artificial Sequence
  Antisense compound
tgcttgtaatgtagccacat

SEQ ID NO: 17958 - DNA, 20 bp, Artificial Sequence
  Antisense compound
ctgcttgtaatgtagccaca

SEQ ID NO: 17959 - DNA, 20 bp, Artificial Sequence
  Antisense compound
tctgcttgtaatgtagccac

SEQ ID NO: 17960 - DNA, 20 bp, Artificial Sequence
  Antisense compound
ttctgcttgtaatgtagcca

SEQ ID NO: 17961 - DNA, 20 bp, Artificial Sequence
  Antisense compound
tttctgcttgtaatgtagcc

SEQ ID NO: 17962 - DNA, 20 bp, Artificial Sequence
  Antisense compound
ttttctgcttgtaatgtagc

SEQ ID NO: 17963 - DNA, 20 bp, Artificial Sequence
  Antisense compound
attttctgcttgtaatgtag

SEQ ID NO: 17964 - DNA, 20 bp, Artificial Sequence
  Antisense compound
cattttctgcttgtaatgta

SEQ ID NO: 17965 - DNA, 20 bp, Artificial Sequence
  Antisense compound
acattttctgcttgtaatgt

SEQ ID NO: 17966 - DNA, 20 bp, Artificial Sequence
  Antisense compound
tacattttctgcttgtaatg

SEQ ID NO: 17967 - DNA, 20 bp, Artificial Sequence
  Antisense compound
ttacattttctgcttgtaat

SEQ ID NO: 17968 - DNA, 20 bp, Artificial Sequence
  Antisense compound
gttacattttctgcttgtaa

SEQ ID NO: 17969 - DNA, 20 bp, Artificial Sequence
  Antisense compound
agttacattttctgcttgta

SEQ ID NO: 17970 - DNA, 20 bp, Artificial Sequence
  Antisense compound
cagttacattttctgcttgt

SEQ ID NO: 17971 - DNA, 20 bp, Artificial Sequence
  Antisense compound
ccagttacattttctgcttg

SEQ ID NO: 17972 - DNA, 20 bp, Artificial Sequence
  Antisense compound
tccagttacattttctgctt

SEQ ID NO: 17973 - DNA, 20 bp, Artificial Sequence
  Antisense compound
gtccagttacattttctgct

SEQ ID NO: 17974 - DNA, 20 bp, Artificial Sequence
  Antisense compound
agtccagttacattttctgc

SEQ ID NO: 17975 - DNA, 20 bp, Artificial Sequence
  Antisense compound
aagtccagttacattttctg

SEQ ID NO: 17976 - DNA, 20 bp, Artificial Sequence
  Antisense compound
aaagtccagttacattttct

SEQ ID NO: 17977 - DNA, 20 bp, Artificial Sequence
  Antisense compound
aaaagtccagttacattttc

SEQ ID NO: 17978 - DNA, 20 bp, Artificial Sequence
  Antisense compound
aaaaagtccagttacatttt

SEQ ID NO: 17979 - DNA, 20 bp, Artificial Sequence
  Antisense compound
taaaaagtccagttacattt

SEQ ID NO: 17980 - DNA, 20 bp, Artificial Sequence
  Antisense compound
ttaaaaagtccagttacatt

SEQ ID NO: 17981 - DNA, 20 bp, Artificial Sequence
  Antisense compound
cttaaaaagtccagttacat

SEQ ID NO: 17982 - DNA, 20 bp, Artificial Sequence
  Antisense compound
ccttaaaaagtccagttaca

SEQ ID NO: 17983 - DNA, 20 bp, Artificial Sequence
  Antisense compound
tccttaaaaagtccagttac

SEQ ID NO: 17984 - DNA, 20 bp, Artificial Sequence
  Antisense compound
gtccttaaaaagtccagtta

SEQ ID NO: 17985 - DNA, 20 bp, Artificial Sequence
  Antisense compound
agtccttaaaaagtccagtt

SEQ ID NO: 17986 - DNA, 20 bp, Artificial Sequence
  Antisense compound
cagtccttaaaaagtccagt

SEQ ID NO: 17987 - DNA, 20 bp, Artificial Sequence
  Antisense compound
acagtccttaaaaagtccag

SEQ ID NO: 17988 - DNA, 20 bp, Artificial Sequence
  Antisense compound
tacagtccttaaaaagtcca

SEQ ID NO: 17989 - DNA, 20 bp, Artificial Sequence
  Antisense compound
ctacagtccttaaaaagtcc

SEQ ID NO: 17990 - DNA, 20 bp, Artificial Sequence
  Antisense compound
actacagtccttaaaaagtc

SEQ ID NO: 17991 - DNA, 20 bp, Artificial Sequence
  Antisense compound
tactacagtccttaaaaagt

SEQ ID NO: 17992 - DNA, 20 bp, Artificial Sequence
  Antisense compound
ttactacagtccttaaaaag

SEQ ID NO: 17993 - DNA, 20 bp, Artificial Sequence
  Antisense compound
cttactacagtccttaaaaa

SEQ ID NO: 17994 - DNA, 20 bp, Artificial Sequence
  Antisense compound
tcttactacagtccttaaaa

SEQ ID NO: 17995 - DNA, 20 bp, Artificial Sequence
  Antisense compound
atcttactacagtccttaaa

SEQ ID NO: 17996 - DNA, 20 bp, Artificial Sequence
  Antisense compound
gatcttactacagtccttaa

SEQ ID NO: 17997 - DNA, 20 bp, Artificial Sequence
  Antisense compound
tgatcttactacagtcctta

SEQ ID NO: 17998 - DNA, 20 bp, Artificial Sequence
  Antisense compound
atgatcttactacagtcctt

SEQ ID NO: 17999 - DNA, 20 bp, Artificial Sequence
  Antisense compound
aatgatcttactacagtcct

SEQ ID NO: 18000 - DNA, 20 bp, Artificial Sequence
  Antisense compound
taatgatcttactacagtcc

SEQ ID NO: 18001 - DNA, 20 bp, Artificial Sequence
  Antisense compound
gtaatgatcttactacagtc

SEQ ID NO: 18002 - DNA, 20 bp, Artificial Sequence
  Antisense compound
agtaatgatcttactacagt

SEQ ID NO: 18003 - DNA, 20 bp, Artificial Sequence
  Antisense compound
cagtaatgatcttactacag

SEQ ID NO: 18004 - DNA, 20 bp, Artificial Sequence
  Antisense compound
ccagtaatgatcttactaca

SEQ ID NO: 18005 - DNA, 20 bp, Artificial Sequence
  Antisense compound
accagtaatgatcttactac

SEQ ID NO: 18006 - DNA, 20 bp, Artificial Sequence
  Antisense compound
gaccagtaatgatcttacta

SEQ ID NO: 18007 - DNA, 20 bp, Artificial Sequence
  Antisense compound
agaccagtaatgatcttact

SEQ ID NO: 18008 - DNA, 20 bp, Artificial Sequence
  Antisense compound
aagaccagtaatgatcttac

SEQ ID NO: 18009 - DNA, 20 bp, Artificial Sequence
  Antisense compound
gaagaccagtaatgatctta

SEQ ID NO: 18010 - DNA, 20 bp, Artificial Sequence
  Antisense compound
tgaagaccagtaatgatctt

SEQ ID NO: 18011 - DNA, 20 bp, Artificial Sequence
  Antisense compound
atgaagaccagtaatgatct

SEQ ID NO: 18012 - DNA, 20 bp, Artificial Sequence
  Antisense compound
gatgaagaccagtaatgatc

SEQ ID NO: 18013 - DNA, 20 bp, Artificial Sequence
  Antisense compound
ggatgaagaccagtaatgat

SEQ ID NO: 18014 - DNA, 20 bp, Artificial Sequence
  Antisense compound
aggatgaagaccagtaatga

SEQ ID NO: 18015 - DNA, 20 bp, Artificial Sequence
  Antisense compound
taggatgaagaccagtaatg

SEQ ID NO: 18016 - DNA, 20 bp, Artificial Sequence
  Antisense compound
gtaggatgaagaccagtaat

SEQ ID NO: 18017 - DNA, 20 bp, Artificial Sequence
  Antisense compound
tgtaggatgaagaccagtaa

SEQ ID NO: 18018 - DNA, 20 bp, Artificial Sequence
  Antisense compound
gtgtaggatgaagaccagta

SEQ ID NO: 18019 - DNA, 20 bp, Artificial Sequence
  Antisense compound
tgtgtaggatgaagaccagt

SEQ ID NO: 18020 - DNA, 20 bp, Artificial Sequence
  Antisense compound
ctgtgtaggatgaagaccag

SEQ ID NO: 18021 - DNA, 20 bp, Artificial Sequence
  Antisense compound
cctgtgtaggatgaagacca

SEQ ID NO: 18022 - DNA, 20 bp, Artificial Sequence
  Antisense compound
gcctgtgtaggatgaagacc

SEQ ID NO: 18023 - DNA, 20 bp, Artificial Sequence
  Antisense compound
tgcctgtgtaggatgaagac

SEQ ID NO: 18024 - DNA, 20 bp, Artificial Sequence
  Antisense compound
gtgcctgtgtaggatgaaga

SEQ ID NO: 18025 - DNA, 20 bp, Artificial Sequence
  Antisense compound
ggtgcctgtgtaggatgaag

SEQ ID NO: 18026 - DNA, 20 bp, Artificial Sequence
  Antisense compound
aggtgcctgtgtaggatgaa

SEQ ID NO: 18027 - DNA, 20 bp, Artificial Sequence
  Antisense compound
taggtgcctgtgtaggatga

SEQ ID NO: 18028 - DNA, 20 bp, Artificial Sequence
  Antisense compound
gtaggtgcctgtgtaggatg

SEQ ID NO: 18029 - DNA, 20 bp, Artificial Sequence
  Antisense compound
tgtaggtgcctgtgtaggat

SEQ ID NO: 18030 - DNA, 20 bp, Artificial Sequence
  Antisense compound
gtgtaggtgcctgtgtagga

SEQ ID NO: 18031 - DNA, 20 bp, Artificial Sequence
  Antisense compound
tgtgtaggtgcctgtgtagg

SEQ ID NO: 18032 - DNA, 20 bp, Artificial Sequence
  Antisense compound
gtgtgtaggtgcctgtgtag

SEQ ID NO: 18033 - DNA, 20 bp, Artificial Sequence
  Antisense compound
ggtgtgtaggtgcctgtgta

SEQ ID NO: 18034 - DNA, 20 bp, Artificial Sequence
  Antisense compound
aggtgtgtaggtgcctgtgt

SEQ ID NO: 18035 - DNA, 20 bp, Artificial Sequence
  Antisense compound
gaggtgtgtaggtgcctgtg

SEQ ID NO: 18036 - DNA, 20 bp, Artificial Sequence
  Antisense compound
tgaggtgtgtaggtgcctgt

SEQ ID NO: 18037 - DNA, 20 bp, Artificial Sequence
  Antisense compound
ctgaggtgtgtaggtgcctg

SEQ ID NO: 18038 - DNA, 20 bp, Artificial Sequence
  Antisense compound
gctgaggtgtgtaggtgcct

SEQ ID NO: 18039 - DNA, 20 bp, Artificial Sequence
  Antisense compound
cgctgaggtgtgtaggtgcc

SEQ ID NO: 18040 - DNA, 20 bp, Artificial Sequence
  Antisense compound
acgctgaggtgtgtaggtgc

SEQ ID NO: 18041 - DNA, 20 bp, Artificial Sequence
  Antisense compound
aacgctgaggtgtgtaggtg

SEQ ID NO: 18042 - DNA, 20 bp, Artificial Sequence
  Antisense compound
caacgctgaggtgtgtaggt

SEQ ID NO: 18043 - DNA, 20 bp, Artificial Sequence
  Antisense compound
tcaacgctgaggtgtgtagg

SEQ ID NO: 18044 - DNA, 20 bp, Artificial Sequence
  Antisense compound
atcaacgctgaggtgtgtag

SEQ ID NO: 18045 - DNA, 20 bp, Artificial Sequence
  Antisense compound
tatcaacgctgaggtgtgta

SEQ ID NO: 18046 - DNA, 20 bp, Artificial Sequence
  Antisense compound
atatcaacgctgaggtgtgt

SEQ ID NO: 18047 - DNA, 20 bp, Artificial Sequence
  Antisense compound
tatatcaacgctgaggtgtg

SEQ ID NO: 18048 - DNA, 20 bp, Artificial Sequence
  Antisense compound
ttatatcaacgctgaggtgt

SEQ ID NO: 18049 - DNA, 20 bp, Artificial Sequence
  Antisense compound
tttatatcaacgctgaggtg

SEQ ID NO: 18050 - DNA, 20 bp, Artificial Sequence
  Antisense compound
ctttatatcaacgctgaggt

SEQ ID NO: 18051 - DNA, 20 bp, Artificial Sequence
  Antisense compound
actttatatcaacgctgagg

SEQ ID NO: 18052 - DNA, 20 bp, Artificial Sequence
  Antisense compound
aactttatatcaacgctgag

SEQ ID NO: 18053 - DNA, 20 bp, Artificial Sequence
  Antisense compound
gaactttatatcaacgctga

SEQ ID NO: 18054 - DNA, 20 bp, Artificial Sequence
  Antisense compound
tgaactttatatcaacgctg

SEQ ID NO: 18055 - DNA, 20 bp, Artificial Sequence
  Antisense compound
ttgaactttatatcaacgct

SEQ ID NO: 18056 - DNA, 20 bp, Artificial Sequence
  Antisense compound
cttgaactttatatcaacgc

SEQ ID NO: 18057 - DNA, 20 bp, Artificial Sequence
  Antisense compound
tcttgaactttatatcaacg

SEQ ID NO: 18058 - DNA, 20 bp, Artificial Sequence
  Antisense compound
gtcttgaactttatatcaac

SEQ ID NO: 18059 - DNA, 20 bp, Artificial Sequence
  Antisense compound
agtcttgaactttatatcaa

SEQ ID NO: 18060 - DNA, 20 bp, Artificial Sequence
  Antisense compound
cagtcttgaactttatatca

SEQ ID NO: 18061 - DNA, 20 bp, Artificial Sequence
  Antisense compound
tcagtcttgaactttatatc

SEQ ID NO: 18062 - DNA, 20 bp, Artificial Sequence
  Antisense compound
ttcagtcttgaactttatat

SEQ ID NO: 18063 - DNA, 20 bp, Artificial Sequence
  Antisense compound
cttcagtcttgaactttata

SEQ ID NO: 18064 - DNA, 20 bp, Artificial Sequence
  Antisense compound
ccttcagtcttgaactttat

SEQ ID NO: 18065 - DNA, 20 bp, Artificial Sequence
  Antisense compound
tccttcagtcttgaacttta

SEQ ID NO: 18066 - DNA, 20 bp, Artificial Sequence
  Antisense compound
atccttcagtcttgaacttt

SEQ ID NO: 18067 - DNA, 20 bp, Artificial Sequence
  Antisense compound
aatccttcagtcttgaactt

SEQ ID NO: 18068 - DNA, 20 bp, Artificial Sequence
  Antisense compound
taatccttcagtcttgaact

SEQ ID NO: 18069 - DNA, 20 bp, Artificial Sequence
  Antisense compound
ataatccttcagtcttgaac

SEQ ID NO: 18070 - DNA, 20 bp, Artificial Sequence
  Antisense compound
cataatccttcagtcttgaa

SEQ ID NO: 18071 - DNA, 20 bp, Artificial Sequence
  Antisense compound
acataatccttcagtcttga

SEQ ID NO: 18072 - DNA, 20 bp, Artificial Sequence
  Antisense compound
cacataatccttcagtcttg

SEQ ID NO: 18073 - DNA, 20 bp, Artificial Sequence
  Antisense compound
acacataatccttcagtctt

SEQ ID NO: 18074 - DNA, 20 bp, Artificial Sequence
  Antisense compound
aacacataatccttcagtct

SEQ ID NO: 18075 - DNA, 20 bp, Artificial Sequence
  Antisense compound
caacacataatccttcagtc

SEQ ID NO: 18076 - DNA, 20 bp, Artificial Sequence
  Antisense compound
tcaacacataatccttcagt

SEQ ID NO: 18077 - DNA, 20 bp, Artificial Sequence
  Antisense compound
gtcaacacataatccttcag

SEQ ID NO: 18078 - DNA, 20 bp, Artificial Sequence
  Antisense compound
tgtcaacacataatccttca

SEQ ID NO: 18079 - DNA, 20 bp, Artificial Sequence
  Antisense compound
atgtcaacacataatccttc

SEQ ID NO: 18080 - DNA, 20 bp, Artificial Sequence
  Antisense compound
tatgtcaacacataatcctt

SEQ ID NO: 18081 - DNA, 20 bp, Artificial Sequence
  Antisense compound
gtatgtcaacacataatcct

SEQ ID NO: 18082 - DNA, 20 bp, Artificial Sequence
  Antisense compound
ggtatgtcaacacataatcc

SEQ ID NO: 18083 - DNA, 20 bp, Artificial Sequence
  Antisense compound
tggtatgtcaacacataatc

SEQ ID NO: 18084 - DNA, 20 bp, Artificial Sequence
  Antisense compound
ctggtatgtcaacacataat

SEQ ID NO: 18085 - DNA, 20 bp, Artificial Sequence
  Antisense compound
cctggtatgtcaacacataa

SEQ ID NO: 18086 - DNA, 20 bp, Artificial Sequence
  Antisense compound
gcctggtatgtcaacacata

SEQ ID NO: 18087 - DNA, 20 bp, Artificial Sequence
  Antisense compound
tgcctggtatgtcaacacat

SEQ ID NO: 18088 - DNA, 20 bp, Artificial Sequence
  Antisense compound
atgcctggtatgtcaacaca

SEQ ID NO: 18089 - DNA, 20 bp, Artificial Sequence
  Antisense compound
tatgcctggtatgtcaacac

SEQ ID NO: 18090 - DNA, 20 bp, Artificial Sequence
  Antisense compound
gtatgcctggtatgtcaaca

SEQ ID NO: 18091 - DNA, 20 bp, Artificial Sequence
  Antisense compound
ggtatgcctggtatgtcaac

SEQ ID NO: 18092 - DNA, 20 bp, Artificial Sequence
  Antisense compound
tggtatgcctggtatgtcaa

SEQ ID NO: 18093 - DNA, 20 bp, Artificial Sequence
  Antisense compound
ttggtatgcctggtatgtca

SEQ ID NO: 18094 - DNA, 20 bp, Artificial Sequence
  Antisense compound
tttggtatgcctggtatgtc

SEQ ID NO: 18095 - DNA, 20 bp, Artificial Sequence
  Antisense compound
ctttggtatgcctggtatgt

SEQ ID NO: 18096 - DNA, 20 bp, Artificial Sequence
  Antisense compound
cctttggtatgcctggtatg

SEQ ID NO: 18097 - DNA, 20 bp, Artificial Sequence
  Antisense compound
tcctttggtatgcctggtat

SEQ ID NO: 18098 - DNA, 20 bp, Artificial Sequence
  Antisense compound
gtcctttggtatgcctggta

SEQ ID NO: 18099 - DNA, 20 bp, Artificial Sequence
  Antisense compound
tgtcctttggtatgcctggt

SEQ ID NO: 18100 - DNA, 20 bp, Artificial Sequence
  Antisense compound
atgtcctttggtatgcctgg

SEQ ID NO: 18101 - DNA, 20 bp, Artificial Sequence
  Antisense compound
catgtcctttggtatgcctg

SEQ ID NO: 18102 - DNA, 20 bp, Artificial Sequence
  Antisense compound
tcatgtcctttggtatgcct

SEQ ID NO: 18103 - DNA, 20 bp, Artificial Sequence
  Antisense compound
gtcatgtcctttggtatgcc

SEQ ID NO: 18104 - DNA, 20 bp, Artificial Sequence
  Antisense compound
ggtcatgtcctttggtatgc

SEQ ID NO: 18105 - DNA, 20 bp, Artificial Sequence
  Antisense compound
aggtcatgtcctttggtatg

SEQ ID NO: 18106 - DNA, 20 bp, Artificial Sequence
  Antisense compound
taggtcatgtcctttggtat

SEQ ID NO: 18107 - DNA, 20 bp, Artificial Sequence
  Antisense compound
gtaggtcatgtcctttggta

SEQ ID NO: 18108 - DNA, 20 bp, Artificial Sequence
  Antisense compound
ggtaggtcatgtcctttggt

SEQ ID NO: 18109 - DNA, 20 bp, Artificial Sequence
  Antisense compound
cggtaggtcatgtcctttgg

SEQ ID NO: 18110 - DNA, 20 bp, Artificial Sequence
  Antisense compound
acggtaggtcatgtcctttg

SEQ ID NO: 18111 - DNA, 20 bp, Artificial Sequence
  Antisense compound
tacggtaggtcatgtccttt

SEQ ID NO: 18112 - DNA, 20 bp, Artificial Sequence
  Antisense compound
ctacggtaggtcatgtcctt

SEQ ID NO: 18113 - DNA, 20 bp, Artificial Sequence
  Antisense compound
tctacggtaggtcatgtcct

SEQ ID NO: 18114 - DNA, 20 bp, Artificial Sequence
  Antisense compound
gtctacggtaggtcatgtcc

SEQ ID NO: 18115 - DNA, 20 bp, Artificial Sequence
  Antisense compound
agtctacggtaggtcatgtc

SEQ ID NO: 18116 - DNA, 20 bp, Artificial Sequence
  Antisense compound
gagtctacggtaggtcatgt

SEQ ID NO: 18117 - DNA, 20 bp, Artificial Sequence
  Antisense compound
tgagtctacggtaggtcatg

SEQ ID NO: 18118 - DNA, 20 bp, Artificial Sequence
  Antisense compound
atgagtctacggtaggtcat

SEQ ID NO: 18119 - DNA, 20 bp, Artificial Sequence
  Antisense compound
gatgagtctacggtaggtca

SEQ ID NO: 18120 - DNA, 20 bp, Artificial Sequence
  Antisense compound
agatgagtctacggtaggtc

SEQ ID NO: 18121 - DNA, 20 bp, Artificial Sequence
  Antisense compound
gagatgagtctacggtaggt

SEQ ID NO: 18122 - DNA, 20 bp, Artificial Sequence
  Antisense compound
agagatgagtctacggtagg

SEQ ID NO: 18123 - DNA, 20 bp, Artificial Sequence
  Antisense compound
tagagatgagtctacggtag

SEQ ID NO: 18124 - DNA, 20 bp, Artificial Sequence
  Antisense compound
atagagatgagtctacggta

SEQ ID NO: 18125 - DNA, 20 bp, Artificial Sequence
  Antisense compound
catagagatgagtctacggt

SEQ ID NO: 18126 - DNA, 20 bp, Artificial Sequence
  Antisense compound
tcatagagatgagtctacgg

SEQ ID NO: 18127 - DNA, 20 bp, Artificial Sequence
  Antisense compound
atcatagagatgagtctacg

SEQ ID NO: 18128 - DNA, 20 bp, Artificial Sequence
  Antisense compound
catcatagagatgagtctac

SEQ ID NO: 18129 - DNA, 20 bp, Artificial Sequence
  Antisense compound
ccatcatagagatgagtcta

SEQ ID NO: 18130 - DNA, 20 bp, Artificial Sequence
  Antisense compound
cccatcatagagatgagtct

SEQ ID NO: 18131 - DNA, 20 bp, Artificial Sequence
  Antisense compound
acccatcatagagatgagtc

SEQ ID NO: 18132 - DNA, 20 bp, Artificial Sequence
  Antisense compound
aacccatcatagagatgagt

SEQ ID NO: 18133 - DNA, 20 bp, Artificial Sequence
  Antisense compound
aaacccatcatagagatgag

SEQ ID NO: 18134 - DNA, 20 bp, Artificial Sequence
  Antisense compound
gaaacccatcatagagatga

SEQ ID NO: 18135 - DNA, 20 bp, Artificial Sequence
  Antisense compound
tgaaacccatcatagagatg

SEQ ID NO: 18136 - DNA, 20 bp, Artificial Sequence
  Antisense compound
ttgaaacccatcatagagat

SEQ ID NO: 18137 - DNA, 20 bp, Artificial Sequence
  Antisense compound
tttgaaacccatcatagaga

SEQ ID NO: 18138 - DNA, 20 bp, Artificial Sequence
  Antisense compound
ttttgaaacccatcatagag

SEQ ID NO: 18139 - DNA, 20 bp, Artificial Sequence
  Antisense compound
attttgaaacccatcataga

SEQ ID NO: 18140 - DNA, 20 bp, Artificial Sequence
  Antisense compound
cattttgaaacccatcatag

SEQ ID NO: 18141 - DNA, 20 bp, Artificial Sequence
  Antisense compound
tcattttgaaacccatcata

SEQ ID NO: 18142 - DNA, 20 bp, Artificial Sequence
  Antisense compound
ttcattttgaaacccatcat

SEQ ID NO: 18143 - DNA, 20 bp, Artificial Sequence
  Antisense compound
attcattttgaaacccatca

SEQ ID NO: 18144 - DNA, 20 bp, Artificial Sequence
  Antisense compound
aattcattttgaaacccatc

SEQ ID NO: 18145 - DNA, 20 bp, Artificial Sequence
  Antisense compound
taattcattttgaaacccat

SEQ ID NO: 18146 - DNA, 20 bp, Artificial Sequence
  Antisense compound
gtaattcattttgaaaccca

SEQ ID NO: 18147 - DNA, 20 bp, Artificial Sequence
  Antisense compound
ggtaattcattttgaaaccc

SEQ ID NO: 18148 - DNA, 20 bp, Artificial Sequence
  Antisense compound
tggtaattcattttgaaacc

SEQ ID NO: 18149 - DNA, 20 bp, Artificial Sequence
  Antisense compound
ttggtaattcattttgaaac

SEQ ID NO: 18150 - DNA, 20 bp, Artificial Sequence
  Antisense compound
cttggtaattcattttgaaa

SEQ ID NO: 18151 - DNA, 20 bp, Artificial Sequence
  Antisense compound
acttggtaattcattttgaa

SEQ ID NO: 18152 - DNA, 20 bp, Artificial Sequence
  Antisense compound
gacttggtaattcattttga

SEQ ID NO: 18153 - DNA, 20 bp, Artificial Sequence
  Antisense compound
tgacttggtaattcattttg

SEQ ID NO: 18154 - DNA, 20 bp, Artificial Sequence
  Antisense compound
ttgacttggtaattcatttt

SEQ ID NO: 18155 - DNA, 20 bp, Artificial Sequence
  Antisense compound
attgacttggtaattcattt

SEQ ID NO: 18156 - DNA, 20 bp, Artificial Sequence
  Antisense compound
cattgacttggtaattcatt

SEQ ID NO: 18157 - DNA, 20 bp, Artificial Sequence
  Antisense compound
ccattgacttggtaattcat

SEQ ID NO: 18158 - DNA, 20 bp, Artificial Sequence
  Antisense compound
accattgacttggtaattca

SEQ ID NO: 18159 - DNA, 20 bp, Artificial Sequence
  Antisense compound
aaccattgacttggtaattc

SEQ ID NO: 18160 - DNA, 20 bp, Artificial Sequence
  Antisense compound
taaccattgacttggtaatt

SEQ ID NO: 18161 - DNA, 20 bp, Artificial Sequence
  Antisense compound
gtaaccattgacttggtaat

SEQ ID NO: 18162 - DNA, 20 bp, Artificial Sequence
  Antisense compound
ggtaaccattgacttggtaa

SEQ ID NO: 18163 - DNA, 20 bp, Artificial Sequence
  Antisense compound
gggtaaccattgacttggta

SEQ ID NO: 18164 - DNA, 20 bp, Artificial Sequence
  Antisense compound
agggtaaccattgacttggt

SEQ ID NO: 18165 - DNA, 20 bp, Artificial Sequence
  Antisense compound
tagggtaaccattgacttgg

SEQ ID NO: 18166 - DNA, 20 bp, Artificial Sequence
  Antisense compound
ttagggtaaccattgacttg

SEQ ID NO: 18167 - DNA, 20 bp, Artificial Sequence
  Antisense compound
attagggtaaccattgactt

SEQ ID NO: 18168 - DNA, 20 bp, Artificial Sequence
  Antisense compound
tattagggtaaccattgact

SEQ ID NO: 18169 - DNA, 20 bp, Artificial Sequence
  Antisense compound
atattagggtaaccattgac

SEQ ID NO: 18170 - DNA, 20 bp, Artificial Sequence
  Antisense compound
catattagggtaaccattga

SEQ ID NO: 18171 - DNA, 20 bp, Artificial Sequence
  Antisense compound
acatattagggtaaccattg

SEQ ID NO: 18172 - DNA, 20 bp, Artificial Sequence
  Antisense compound
aacatattagggtaaccatt

SEQ ID NO: 18173 - DNA, 20 bp, Artificial Sequence
  Antisense compound
aaacatattagggtaaccat

SEQ ID NO: 18174 - DNA, 20 bp, Artificial Sequence
  Antisense compound
taaacatattagggtaacca

SEQ ID NO: 18175 - DNA, 20 bp, Artificial Sequence
  Antisense compound
ataaacatattagggtaacc

SEQ ID NO: 18176 - DNA, 20 bp, Artificial Sequence
  Antisense compound
gataaacatattagggtaac

SEQ ID NO: 18177 - DNA, 20 bp, Artificial Sequence
  Antisense compound
tgataaacatattagggtaa

SEQ ID NO: 18178 - DNA, 20 bp, Artificial Sequence
  Antisense compound
gtgataaacatattagggta

SEQ ID NO: 18179 - DNA, 20 bp, Artificial Sequence
  Antisense compound
ggtgataaacatattagggt

SEQ ID NO: 18180 - DNA, 20 bp, Artificial Sequence
  Antisense compound
gggtgataaacatattaggg

SEQ ID NO: 18181 - DNA, 20 bp, Artificial Sequence
  Antisense compound
cgggtgataaacatattagg

SEQ ID NO: 18182 - DNA, 20 bp, Artificial Sequence
  Antisense compound
gcgggtgataaacatattag

SEQ ID NO: 18183 - DNA, 20 bp, Artificial Sequence
  Antisense compound
cgcgggtgataaacatatta

SEQ ID NO: 18184 - DNA, 20 bp, Artificial Sequence
  Antisense compound
tcgcgggtgataaacatatt

SEQ ID NO: 18185 - DNA, 20 bp, Artificial Sequence
  Antisense compound
ttcgcgggtgataaacatat

SEQ ID NO: 18186 - DNA, 20 bp, Artificial Sequence
  Antisense compound
cttcgcgggtgataaacata

SEQ ID NO: 18187 - DNA, 20 bp, Artificial Sequence
  Antisense compound
tcttcgcgggtgataaacat

SEQ ID NO: 18188 - DNA, 20 bp, Artificial Sequence
  Antisense compound
ttcttcgcgggtgataaaca

SEQ ID NO: 18189 - DNA, 20 bp, Artificial Sequence
  Antisense compound
cttcttcgcgggtgataaac

SEQ ID NO: 18190 - DNA, 20 bp, Artificial Sequence
  Antisense compound
gcttcttcgcgggtgataaa

SEQ ID NO: 18191 - DNA, 20 bp, Artificial Sequence
  Antisense compound
agcttcttcgcgggtgataa

SEQ ID NO: 18192 - DNA, 20 bp, Artificial Sequence
  Antisense compound
tagcttcttcgcgggtgata

SEQ ID NO: 18193 - DNA, 20 bp, Artificial Sequence
  Antisense compound
atagcttcttcgcgggtgat

SEQ ID NO: 18194 - DNA, 20 bp, Artificial Sequence
  Antisense compound
aatagcttcttcgcgggtga

SEQ ID NO: 18195 - DNA, 20 bp, Artificial Sequence
  Antisense compound
gaatagcttcttcgcgggtg

SEQ ID NO: 18196 - DNA, 20 bp, Artificial Sequence
  Antisense compound
cgaatagcttcttcgcgggt

SEQ ID NO: 18197 - DNA, 20 bp, Artificial Sequence
  Antisense compound
acgaatagcttcttcgcggg

SEQ ID NO: 18198 - DNA, 20 bp, Artificial Sequence
  Antisense compound
gacgaatagcttcttcgcgg

SEQ ID NO: 18199 - DNA, 20 bp, Artificial Sequence
  Antisense compound
tgacgaatagcttcttcgcg

SEQ ID NO: 18200 - DNA, 20 bp, Artificial Sequence
  Antisense compound
gtgacgaatagcttcttcgc

SEQ ID NO: 18201 - DNA, 20 bp, Artificial Sequence
  Antisense compound
cgtgacgaatagcttcttcg

SEQ ID NO: 18202 - DNA, 20 bp, Artificial Sequence
  Antisense compound
acgtgacgaatagcttcttc

SEQ ID NO: 18203 - DNA, 20 bp, Artificial Sequence
  Antisense compound
aacgtgacgaatagcttctt

SEQ ID NO: 18204 - DNA, 20 bp, Artificial Sequence
  Antisense compound
gaacgtgacgaatagcttct

SEQ ID NO: 18205 - DNA, 20 bp, Artificial Sequence
  Antisense compound
cgaacgtgacgaatagcttc

SEQ ID NO: 18206 - DNA, 20 bp, Artificial Sequence
  Antisense compound
acgaacgtgacgaatagctt

SEQ ID NO: 18207 - DNA, 20 bp, Artificial Sequence
  Antisense compound
cacgaacgtgacgaatagct

SEQ ID NO: 18208 - DNA, 20 bp, Artificial Sequence
  Antisense compound
gcacgaacgtgacgaatagc

SEQ ID NO: 18209 - DNA, 20 bp, Artificial Sequence
  Antisense compound
cgcacgaacgtgacgaatag

SEQ ID NO: 18210 - DNA, 20 bp, Artificial Sequence
  Antisense compound
acgcacgaacgtgacgaata

SEQ ID NO: 18211 - DNA, 20 bp, Artificial Sequence
  Antisense compound
cacgcacgaacgtgacgaat

SEQ ID NO: 18212 - DNA, 20 bp, Artificial Sequence
  Antisense compound
ccacgcacgaacgtgacgaa

SEQ ID NO: 18213 - DNA, 20 bp, Artificial Sequence
  Antisense compound
tccacgcacgaacgtgacga

SEQ ID NO: 18214 - DNA, 20 bp, Artificial Sequence
  Antisense compound
atccacgcacgaacgtgacg

SEQ ID NO: 18215 - DNA, 20 bp, Artificial Sequence
  Antisense compound
aatccacgcacgaacgtgac

SEQ ID NO: 18216 - DNA, 20 bp, Artificial Sequence
  Antisense compound
caatccacgcacgaacgtga

SEQ ID NO: 18217 - DNA, 20 bp, Artificial Sequence
  Antisense compound
ccaatccacgcacgaacgtg

SEQ ID NO: 18218 - DNA, 20 bp, Artificial Sequence
  Antisense compound
gccaatccacgcacgaacgt

SEQ ID NO: 18219 - DNA, 20 bp, Artificial Sequence
  Antisense compound
agccaatccacgcacgaacg

SEQ ID NO: 18220 - DNA, 20 bp, Artificial Sequence
  Antisense compound
aagccaatccacgcacgaac

SEQ ID NO: 18221 - DNA, 20 bp, Artificial Sequence
  Antisense compound
aaagccaatccacgcacgaa

SEQ ID NO: 18222 - DNA, 20 bp, Artificial Sequence
  Antisense compound
caaagccaatccacgcacga

SEQ ID NO: 18223 - DNA, 20 bp, Artificial Sequence
  Antisense compound
tcaaagccaatccacgcacg

SEQ ID NO: 18224 - DNA, 20 bp, Artificial Sequence
  Antisense compound
atcaaagccaatccacgcac

SEQ ID NO: 18225 - DNA, 20 bp, Artificial Sequence
  Antisense compound
catcaaagccaatccacgca

SEQ ID NO: 18226 - DNA, 20 bp, Artificial Sequence
  Antisense compound
acatcaaagccaatccacgc

SEQ ID NO: 18227 - DNA, 20 bp, Artificial Sequence
  Antisense compound
tacatcaaagccaatccacg

SEQ ID NO: 18228 - DNA, 20 bp, Artificial Sequence
  Antisense compound
ctacatcaaagccaatccac

SEQ ID NO: 18229 - DNA, 20 bp, Artificial Sequence
  Antisense compound
tctacatcaaagccaatcca

SEQ ID NO: 18230 - DNA, 20 bp, Artificial Sequence
  Antisense compound
ctctacatcaaagccaatcc

SEQ ID NO: 18231 - DNA, 20 bp, Artificial Sequence
  Antisense compound
cctctacatcaaagccaatc

SEQ ID NO: 18232 - DNA, 20 bp, Artificial Sequence
  Antisense compound
ccctctacatcaaagccaat

SEQ ID NO: 18233 - DNA, 20 bp, Artificial Sequence
  Antisense compound
gccctctacatcaaagccaa

SEQ ID NO: 18234 - DNA, 20 bp, Artificial Sequence
  Antisense compound
agccctctacatcaaagcca

SEQ ID NO: 18235 - DNA, 20 bp, Artificial Sequence
  Antisense compound
cagccctctacatcaaagcc

SEQ ID NO: 18236 - DNA, 20 bp, Artificial Sequence
  Antisense compound
acagccctctacatcaaagc

SEQ ID NO: 18237 - DNA, 20 bp, Artificial Sequence
  Antisense compound
gacagccctctacatcaaag

SEQ ID NO: 18238 - DNA, 20 bp, Artificial Sequence
  Antisense compound
tgacagccctctacatcaaa

SEQ ID NO: 18239 - DNA, 20 bp, Artificial Sequence
  Antisense compound
atgacagccctctacatcaa

SEQ ID NO: 18240 - DNA, 20 bp, Artificial Sequence
  Antisense compound
catgacagccctctacatca

SEQ ID NO: 18241 - DNA, 20 bp, Artificial Sequence
  Antisense compound
gcatgacagccctctacatc

SEQ ID NO: 18242 - DNA, 20 bp, Artificial Sequence
  Antisense compound
tgcatgacagccctctacat

SEQ ID NO: 18243 - DNA, 20 bp, Artificial Sequence
  Antisense compound
ttgcatgacagccctctaca

SEQ ID NO: 18244 - DNA, 20 bp, Artificial Sequence
  Antisense compound
gttgcatgacagccctctac

SEQ ID NO: 18245 - DNA, 20 bp, Artificial Sequence
  Antisense compound
agttgcatgacagccctcta

SEQ ID NO: 18246 - DNA, 20 bp, Artificial Sequence
  Antisense compound
tagttgcatgacagccctct

SEQ ID NO: 18247 - DNA, 20 bp, Artificial Sequence
  Antisense compound
ctagttgcatgacagccctc

SEQ ID NO: 18248 - DNA, 20 bp, Artificial Sequence
  Antisense compound
tctagttgcatgacagccct

SEQ ID NO: 18249 - DNA, 20 bp, Artificial Sequence
  Antisense compound
ctctagttgcatgacagccc

SEQ ID NO: 18250 - DNA, 20 bp, Artificial Sequence
  Antisense compound
tctctagttgcatgacagcc

SEQ ID NO: 18251 - DNA, 20 bp, Artificial Sequence
  Antisense compound
atctctagttgcatgacagc

SEQ ID NO: 18252 - DNA, 20 bp, Artificial Sequence
  Antisense compound
catctctagttgcatgacag

SEQ ID NO: 18253 - DNA, 20 bp, Artificial Sequence
  Antisense compound
gcatctctagttgcatgaca

SEQ ID NO: 18254 - DNA, 20 bp, Artificial Sequence
  Antisense compound
agcatctctagttgcatgac

SEQ ID NO: 18255 - DNA, 20 bp, Artificial Sequence
  Antisense compound
cagcatctctagttgcatga

SEQ ID NO: 18256 - DNA, 20 bp, Artificial Sequence
  Antisense compound
acagcatctctagttgcatg

SEQ ID NO: 18257 - DNA, 20 bp, Artificial Sequence
  Antisense compound
cacagcatctctagttgcat

SEQ ID NO: 18258 - DNA, 20 bp, Artificial Sequence
  Antisense compound
ccacagcatctctagttgca

SEQ ID NO: 18259 - DNA, 20 bp, Artificial Sequence
  Antisense compound
cccacagcatctctagttgc

SEQ ID NO: 18260 - DNA, 20 bp, Artificial Sequence
  Antisense compound
acccacagcatctctagttg

SEQ ID NO: 18261 - DNA, 20 bp, Artificial Sequence
  Antisense compound
tacccacagcatctctagtt

SEQ ID NO: 18262 - DNA, 20 bp, Artificial Sequence
  Antisense compound
gtacccacagcatctctagt

SEQ ID NO: 18263 - DNA, 20 bp, Artificial Sequence
  Antisense compound
agtacccacagcatctctag

SEQ ID NO: 18264 - DNA, 20 bp, Artificial Sequence
  Antisense compound
tagtacccacagcatctcta

SEQ ID NO: 18265 - DNA, 20 bp, Artificial Sequence
  Antisense compound
ttagtacccacagcatctct

SEQ ID NO: 18266 - DNA, 20 bp, Artificial Sequence
  Antisense compound
gttagtacccacagcatctc

SEQ ID NO: 18267 - DNA, 20 bp, Artificial Sequence
  Antisense compound
ggttagtacccacagcatct

SEQ ID NO: 18268 - DNA, 20 bp, Artificial Sequence
  Antisense compound
aggttagtacccacagcatc

SEQ ID NO: 18269 - DNA, 20 bp, Artificial Sequence
  Antisense compound
taggttagtacccacagcat

SEQ ID NO: 18270 - DNA, 20 bp, Artificial Sequence
  Antisense compound
gtaggttagtacccacagca

SEQ ID NO: 18271 - DNA, 20 bp, Artificial Sequence
  Antisense compound
ggtaggttagtacccacagc

SEQ ID NO: 18272 - DNA, 20 bp, Artificial Sequence
  Antisense compound
aggtaggttagtacccacag

SEQ ID NO: 18273 - DNA, 20 bp, Artificial Sequence
  Antisense compound
gaggtaggttagtacccaca

SEQ ID NO: 18274 - DNA, 20 bp, Artificial Sequence
  Antisense compound
agaggtaggttagtacccac

SEQ ID NO: 18275 - DNA, 20 bp, Artificial Sequence
  Antisense compound
gagaggtaggttagtaccca

SEQ ID NO: 18276 - DNA, 20 bp, Artificial Sequence
  Antisense compound
ggagaggtaggttagtaccc

SEQ ID NO: 18277 - DNA, 20 bp, Artificial Sequence
  Antisense compound
tggagaggtaggttagtacc

SEQ ID NO: 18278 - DNA, 20 bp, Artificial Sequence
  Antisense compound
ctggagaggtaggttagtac

SEQ ID NO: 18279 - DNA, 20 bp, Artificial Sequence
  Antisense compound
gctggagaggtaggttagta

SEQ ID NO: 18280 - DNA, 20 bp, Artificial Sequence
  Antisense compound
agctggagaggtaggttagt

SEQ ID NO: 18281 - DNA, 20 bp, Artificial Sequence
  Antisense compound
tagctggagaggtaggttag

SEQ ID NO: 18282 - DNA, 20 bp, Artificial Sequence
  Antisense compound
ctagctggagaggtaggtta

SEQ ID NO: 18283 - DNA, 20 bp, Artificial Sequence
  Antisense compound
cctagctggagaggtaggtt

SEQ ID NO: 18284 - DNA, 20 bp, Artificial Sequence
  Antisense compound
tcctagctggagaggtaggt

SEQ ID NO: 18285 - DNA, 20 bp, Artificial Sequence
  Antisense compound
atcctagctggagaggtagg

SEQ ID NO: 18286 - DNA, 20 bp, Artificial Sequence
  Antisense compound
aatcctagctggagaggtag

SEQ ID NO: 18287 - DNA, 20 bp, Artificial Sequence
  Antisense compound
aaatcctagctggagaggta

SEQ ID NO: 18288 - DNA, 20 bp, Artificial Sequence
  Antisense compound
aaaatcctagctggagaggt

SEQ ID NO: 18289 - DNA, 20 bp, Artificial Sequence
  Antisense compound
gaaaatcctagctggagagg

SEQ ID NO: 18290 - DNA, 20 bp, Artificial Sequence
  Antisense compound
agaaaatcctagctggagag

SEQ ID NO: 18291 - DNA, 20 bp, Artificial Sequence
  Antisense compound
tagaaaatcctagctggaga

SEQ ID NO: 18292 - DNA, 20 bp, Artificial Sequence
  Antisense compound
gtagaaaatcctagctggag

SEQ ID NO: 18293 - DNA, 20 bp, Artificial Sequence
  Antisense compound
tgtagaaaatcctagctgga

SEQ ID NO: 18294 - DNA, 20 bp, Artificial Sequence
  Antisense compound
ctgtagaaaatcctagctgg

SEQ ID NO: 18295 - DNA, 20 bp, Artificial Sequence
  Antisense compound
cctgtagaaaatcctagctg

SEQ ID NO: 18296 - DNA, 20 bp, Artificial Sequence
  Antisense compound
acctgtagaaaatcctagct

SEQ ID NO: 18297 - DNA, 20 bp, Artificial Sequence
  Antisense compound
cacctgtagaaaatcctagc

SEQ ID NO: 18298 - DNA, 20 bp, Artificial Sequence
  Antisense compound
acacctgtagaaaatcctag

SEQ ID NO: 18299 - DNA, 20 bp, Artificial Sequence
  Antisense compound
aacacctgtagaaaatccta

SEQ ID NO: 18300 - DNA, 20 bp, Artificial Sequence
  Antisense compound
taacacctgtagaaaatcct

SEQ ID NO: 18301 - DNA, 20 bp, Artificial Sequence
  Antisense compound
ttaacacctgtagaaaatcc

SEQ ID NO: 18302 - DNA, 20 bp, Artificial Sequence
  Antisense compound
gttaacacctgtagaaaatc

SEQ ID NO: 18303 - DNA, 20 bp, Artificial Sequence
  Antisense compound
agttaacacctgtagaaaat

SEQ ID NO: 18304 - DNA, 20 bp, Artificial Sequence
  Antisense compound
aagttaacacctgtagaaaa

SEQ ID NO: 18305 - DNA, 20 bp, Artificial Sequence
  Antisense compound
taagttaacacctgtagaaa

SEQ ID NO: 18306 - DNA, 20 bp, Artificial Sequence
  Antisense compound
ctaagttaacacctgtagaa

SEQ ID NO: 18307 - DNA, 20 bp, Artificial Sequence
  Antisense compound
actaagttaacacctgtaga

SEQ ID NO: 18308 - DNA, 20 bp, Artificial Sequence
  Antisense compound
tactaagttaacacctgtag

SEQ ID NO: 18309 - DNA, 20 bp, Artificial Sequence
  Antisense compound
ctactaagttaacacctgta

SEQ ID NO: 18310 - DNA, 20 bp, Artificial Sequence
  Antisense compound
gctactaagttaacacctgt

SEQ ID NO: 18311 - DNA, 20 bp, Artificial Sequence
  Antisense compound
agctactaagttaacacctg

SEQ ID NO: 18312 - DNA, 20 bp, Artificial Sequence
  Antisense compound
cagctactaagttaacacct

SEQ ID NO: 18313 - DNA, 20 bp, Artificial Sequence
  Antisense compound
acagctactaagttaacacc

SEQ ID NO: 18314 - DNA, 20 bp, Artificial Sequence
  Antisense compound
tacagctactaagttaacac

SEQ ID NO: 18315 - DNA, 20 bp, Artificial Sequence
  Antisense compound
gtacagctactaagttaaca

SEQ ID NO: 18316 - DNA, 20 bp, Artificial Sequence
  Antisense compound
ggtacagctactaagttaac

SEQ ID NO: 18317 - DNA, 20 bp, Artificial Sequence
  Antisense compound
cggtacagctactaagttaa

SEQ ID NO: 18318 - DNA, 20 bp, Artificial Sequence
  Antisense compound
tcggtacagctactaagtta

SEQ ID NO: 18319 - DNA, 20 bp, Artificial Sequence
  Antisense compound
gtcggtacagctactaagtt

SEQ ID NO: 18320 - DNA, 20 bp, Artificial Sequence
  Antisense compound
agtcggtacagctactaagt

SEQ ID NO: 18321 - DNA, 20 bp, Artificial Sequence
  Antisense compound
cagtcggtacagctactaag

SEQ ID NO: 18322 - DNA, 20 bp, Artificial Sequence
  Antisense compound
ccagtcggtacagctactaa

SEQ ID NO: 18323 - DNA, 20 bp, Artificial Sequence
  Antisense compound
accagtcggtacagctacta

SEQ ID NO: 18324 - DNA, 20 bp, Artificial Sequence
  Antisense compound
aaccagtcggtacagctact

SEQ ID NO: 18325 - DNA, 20 bp, Artificial Sequence
  Antisense compound
taaccagtcggtacagctac

SEQ ID NO: 18326 - DNA, 20 bp, Artificial Sequence
  Antisense compound
ataaccagtcggtacagcta

SEQ ID NO: 18327 - DNA, 20 bp, Artificial Sequence
  Antisense compound
cataaccagtcggtacagct

SEQ ID NO: 18328 - DNA, 20 bp, Artificial Sequence
  Antisense compound
acataaccagtcggtacagc

SEQ ID NO: 18329 - DNA, 20 bp, Artificial Sequence
  Antisense compound
aacataaccagtcggtacag

SEQ ID NO: 18330 - DNA, 20 bp, Artificial Sequence
  Antisense compound
caacataaccagtcggtaca

SEQ ID NO: 18331 - DNA, 20 bp, Artificial Sequence
  Antisense compound
tcaacataaccagtcggtac

SEQ ID NO: 18332 - DNA, 20 bp, Artificial Sequence
  Antisense compound
gtcaacataaccagtcggta

SEQ ID NO: 18333 - DNA, 20 bp, Artificial Sequence
  Antisense compound
tgtcaacataaccagtcggt

SEQ ID NO: 18334 - DNA, 20 bp, Artificial Sequence
  Antisense compound
gtgtcaacataaccagtcgg

SEQ ID NO: 18335 - DNA, 20 bp, Artificial Sequence
  Antisense compound
agtgtcaacataaccagtcg

SEQ ID NO: 18336 - DNA, 20 bp, Artificial Sequence
  Antisense compound
cagtgtcaacataaccagtc

SEQ ID NO: 18337 - DNA, 20 bp, Artificial Sequence
  Antisense compound
tcagtgtcaacataaccagt

SEQ ID NO: 18338 - DNA, 20 bp, Artificial Sequence
  Antisense compound
ttcagtgtcaacataaccag

SEQ ID NO: 18339 - DNA, 20 bp, Artificial Sequence
  Antisense compound
tttcagtgtcaacataacca

SEQ ID NO: 18340 - DNA, 20 bp, Artificial Sequence
  Antisense compound
ttttcagtgtcaacataacc

SEQ ID NO: 18341 - DNA, 20 bp, Artificial Sequence
  Antisense compound
attttcagtgtcaacataac

SEQ ID NO: 18342 - DNA, 20 bp, Artificial Sequence
  Antisense compound
tattttcagtgtcaacataa

SEQ ID NO: 18343 - DNA, 20 bp, Artificial Sequence
  Antisense compound
ttattttcagtgtcaacata

SEQ ID NO: 18344 - DNA, 20 bp, Artificial Sequence
  Antisense compound
gttattttcagtgtcaacat

SEQ ID NO: 18345 - DNA, 20 bp, Artificial Sequence
  Antisense compound
tgttattttcagtgtcaaca

SEQ ID NO: 18346 - DNA, 20 bp, Artificial Sequence
  Antisense compound
gtgttattttcagtgtcaac

SEQ ID NO: 18347 - DNA, 20 bp, Artificial Sequence
  Antisense compound
tgtgttattttcagtgtcaa

SEQ ID NO: 18348 - DNA, 20 bp, Artificial Sequence
  Antisense compound
ctgtgttattttcagtgtca

SEQ ID NO: 18349 - DNA, 20 bp, Artificial Sequence
  Antisense compound
tctgtgttattttcagtgtc

SEQ ID NO: 18350 - DNA, 20 bp, Artificial Sequence
  Antisense compound
ttctgtgttattttcagtgt

SEQ ID NO: 18351 - DNA, 20 bp, Artificial Sequence
  Antisense compound
attctgtgttattttcagtg

SEQ ID NO: 18352 - DNA, 20 bp, Artificial Sequence
  Antisense compound
aattctgtgttattttcagt

SEQ ID NO: 18353 - DNA, 20 bp, Artificial Sequence
  Antisense compound
gaattctgtgttattttcag

SEQ ID NO: 18354 - DNA, 20 bp, Artificial Sequence
  Antisense compound
tgaattctgtgttattttca

SEQ ID NO: 18355 - DNA, 20 bp, Artificial Sequence
  Antisense compound
gtgaattctgtgttattttc

SEQ ID NO: 18356 - DNA, 20 bp, Artificial Sequence
  Antisense compound
ggtgaattctgtgttatttt

SEQ ID NO: 18357 - DNA, 20 bp, Artificial Sequence
  Antisense compound
tggtgaattctgtgttattt

SEQ ID NO: 18358 - DNA, 20 bp, Artificial Sequence
  Antisense compound
ctggtgaattctgtgttatt

SEQ ID NO: 18359 - DNA, 20 bp, Artificial Sequence
  Antisense compound
tctggtgaattctgtgttat

SEQ ID NO: 18360 - DNA, 20 bp, Artificial Sequence
  Antisense compound
ctctggtgaattctgtgtta

SEQ ID NO: 18361 - DNA, 20 bp, Artificial Sequence
  Antisense compound
actctggtgaattctgtgtt

SEQ ID NO: 18362 - DNA, 20 bp, Artificial Sequence
  Antisense compound
aactctggtgaattctgtgt

SEQ ID NO: 18363 - DNA, 20 bp, Artificial Sequence
  Antisense compound
taactctggtgaattctgtg

SEQ ID NO: 18364 - DNA, 20 bp, Artificial Sequence
  Antisense compound
ttaactctggtgaattctgt

SEQ ID NO: 18365 - DNA, 20 bp, Artificial Sequence
  Antisense compound
attaactctggtgaattctg

SEQ ID NO: 18366 - DNA, 20 bp, Artificial Sequence
  Antisense compound
cattaactctggtgaattct

SEQ ID NO: 18367 - DNA, 20 bp, Artificial Sequence
  Antisense compound
gcattaactctggtgaattc

SEQ ID NO: 18368 - DNA, 20 bp, Artificial Sequence
  Antisense compound
tgcattaactctggtgaatt

SEQ ID NO: 18369 - DNA, 20 bp, Artificial Sequence
  Antisense compound
ttgcattaactctggtgaat

SEQ ID NO: 18370 - DNA, 20 bp, Artificial Sequence
  Antisense compound
tttgcattaactctggtgaa

SEQ ID NO: 18371 - DNA, 20 bp, Artificial Sequence
  Antisense compound
ttttgcattaactctggtga

SEQ ID NO: 18372 - DNA, 20 bp, Artificial Sequence
  Antisense compound
gttttgcattaactctggtg

SEQ ID NO: 18373 - DNA, 20 bp, Artificial Sequence
  Antisense compound
ggttttgcattaactctggt

SEQ ID NO: 18374 - DNA, 20 bp, Artificial Sequence
  Antisense compound
aggttttgcattaactctgg

SEQ ID NO: 18375 - DNA, 20 bp, Artificial Sequence
  Antisense compound
gaggttttgcattaactctg

SEQ ID NO: 18376 - DNA, 20 bp, Artificial Sequence
  Antisense compound
ggaggttttgcattaactct

SEQ ID NO: 18377 - DNA, 20 bp, Artificial Sequence
  Antisense compound
tggaggttttgcattaactc

SEQ ID NO: 18378 - DNA, 20 bp, Artificial Sequence
  Antisense compound
gtggaggttttgcattaact

SEQ ID NO: 18379 - DNA, 20 bp, Artificial Sequence
  Antisense compound
ggtggaggttttgcattaac

SEQ ID NO: 18380 - DNA, 20 bp, Artificial Sequence
  Antisense compound
tggtggaggttttgcattaa

SEQ ID NO: 18381 - DNA, 20 bp, Artificial Sequence
  Antisense compound
ctggtggaggttttgcatta

SEQ ID NO: 18382 - DNA, 20 bp, Artificial Sequence
  Antisense compound
cctggtggaggttttgcatt

SEQ ID NO: 18383 - DNA, 20 bp, Artificial Sequence
  Antisense compound
acctggtggaggttttgcat

SEQ ID NO: 18384 - DNA, 20 bp, Artificial Sequence
  Antisense compound
cacctggtggaggttttgca

SEQ ID NO: 18385 - DNA, 20 bp, Artificial Sequence
  Antisense compound
tcacctggtggaggttttgc

SEQ ID NO: 18386 - DNA, 20 bp, Artificial Sequence
  Antisense compound
gtcacctggtggaggttttg

SEQ ID NO: 18387 - DNA, 20 bp, Artificial Sequence
  Antisense compound
ggtcacctggtggaggtttt

SEQ ID NO: 18388 - DNA, 20 bp, Artificial Sequence
  Antisense compound
tggtcacctggtggaggttt

SEQ ID NO: 18389 - DNA, 20 bp, Artificial Sequence
  Antisense compound
ctggtcacctggtggaggtt

SEQ ID NO: 18390 - DNA, 20 bp, Artificial Sequence
  Antisense compound
actggtcacctggtggaggt

SEQ ID NO: 18391 - DNA, 20 bp, Artificial Sequence
  Antisense compound
aactggtcacctggtggagg

SEQ ID NO: 18392 - DNA, 20 bp, Artificial Sequence
  Antisense compound
aaactggtcacctggtggag

SEQ ID NO: 18393 - DNA, 20 bp, Artificial Sequence
  Antisense compound
taaactggtcacctggtgga

SEQ ID NO: 18394 - DNA, 20 bp, Artificial Sequence
  Antisense compound
ttaaactggtcacctggtgg

SEQ ID NO: 18395 - DNA, 20 bp, Artificial Sequence
  Antisense compound
tttaaactggtcacctggtg

SEQ ID NO: 18396 - DNA, 20 bp, Artificial Sequence
  Antisense compound
gtttaaactggtcacctggt

SEQ ID NO: 18397 - DNA, 20 bp, Artificial Sequence
  Antisense compound
tgtttaaactggtcacctgg

SEQ ID NO: 18398 - DNA, 20 bp, Artificial Sequence
  Antisense compound
atgtttaaactggtcacctg

SEQ ID NO: 18399 - DNA, 20 bp, Artificial Sequence
  Antisense compound
gatgtttaaactggtcacct

SEQ ID NO: 18400 - DNA, 20 bp, Artificial Sequence
  Antisense compound
agatgtttaaactggtcacc

SEQ ID NO: 18401 - DNA, 20 bp, Artificial Sequence
  Antisense compound
aagatgtttaaactggtcac

SEQ ID NO: 18402 - DNA, 20 bp, Artificial Sequence
  Antisense compound
taagatgtttaaactggtca

SEQ ID NO: 18403 - DNA, 20 bp, Artificial Sequence
  Antisense compound
ataagatgtttaaactggtc

SEQ ID NO: 18404 - DNA, 20 bp, Artificial Sequence
  Antisense compound
tataagatgtttaaactggt

SEQ ID NO: 18405 - DNA, 20 bp, Artificial Sequence
  Antisense compound
gtataagatgtttaaactgg

SEQ ID NO: 18406 - DNA, 20 bp, Artificial Sequence
  Antisense compound
ggtataagatgtttaaactg

SEQ ID NO: 18407 - DNA, 20 bp, Artificial Sequence
  Antisense compound
tggtataagatgtttaaact

SEQ ID NO: 18408 - DNA, 20 bp, Artificial Sequence
  Antisense compound
gtggtataagatgtttaaac

SEQ ID NO: 18409 - DNA, 20 bp, Artificial Sequence
  Antisense compound
agtggtataagatgtttaaa

SEQ ID NO: 18410 - DNA, 20 bp, Artificial Sequence
  Antisense compound
gagtggtataagatgtttaa

SEQ ID NO: 18411 - DNA, 20 bp, Artificial Sequence
  Antisense compound
tgagtggtataagatgttta

SEQ ID NO: 18412 - DNA, 20 bp, Artificial Sequence
  Antisense compound
atgagtggtataagatgttt

SEQ ID NO: 18413 - DNA, 20 bp, Artificial Sequence
  Antisense compound
catgagtggtataagatgtt

SEQ ID NO: 18414 - DNA, 20 bp, Artificial Sequence
  Antisense compound
acatgagtggtataagatgt

SEQ ID NO: 18415 - DNA, 20 bp, Artificial Sequence
  Antisense compound
tacatgagtggtataagatg

SEQ ID NO: 18416 - DNA, 20 bp, Artificial Sequence
  Antisense compound
atacatgagtggtataagat

SEQ ID NO: 18417 - DNA, 20 bp, Artificial Sequence
  Antisense compound
tatacatgagtggtataaga

SEQ ID NO: 18418 - DNA, 20 bp, Artificial Sequence
  Antisense compound
ttatacatgagtggtataag

SEQ ID NO: 18419 - DNA, 20 bp, Artificial Sequence
  Antisense compound
tttatacatgagtggtataa

SEQ ID NO: 18420 - DNA, 20 bp, Artificial Sequence
  Antisense compound
ctttatacatgagtggtata

SEQ ID NO: 18421 - DNA, 20 bp, Artificial Sequence
  Antisense compound
cctttatacatgagtggtat

SEQ ID NO: 18422 - DNA, 20 bp, Artificial Sequence
  Antisense compound
gcctttatacatgagtggta

SEQ ID NO: 18423 - DNA, 20 bp, Artificial Sequence
  Antisense compound
agcctttatacatgagtggt

SEQ ID NO: 18424 - DNA, 20 bp, Artificial Sequence
  Antisense compound
aagcctttatacatgagtgg

SEQ ID NO: 18425 - DNA, 20 bp, Artificial Sequence
  Antisense compound
caagcctttatacatgagtg

SEQ ID NO: 18426 - DNA, 20 bp, Artificial Sequence
  Antisense compound
gcaagcctttatacatgagt

SEQ ID NO: 18427 - DNA, 20 bp, Artificial Sequence
  Antisense compound
ggcaagcctttatacatgag

SEQ ID NO: 18428 - DNA, 20 bp, Artificial Sequence
  Antisense compound
gggcaagcctttatacatga

SEQ ID NO: 18429 - DNA, 20 bp, Artificial Sequence
  Antisense compound
agggcaagcctttatacatg

SEQ ID NO: 18430 - DNA, 20 bp, Artificial Sequence
  Antisense compound
cagggcaagcctttatacat

SEQ ID NO: 18431 - DNA, 20 bp, Artificial Sequence
  Antisense compound
ccagggcaagcctttataca

SEQ ID NO: 18432 - DNA, 20 bp, Artificial Sequence
  Antisense compound
tccagggcaagcctttatac

SEQ ID NO: 18433 - DNA, 20 bp, Artificial Sequence
  Antisense compound
ttccagggcaagcctttata

SEQ ID NO: 18434 - DNA, 20 bp, Artificial Sequence
  Antisense compound
attccagggcaagcctttat

SEQ ID NO: 18435 - DNA, 20 bp, Artificial Sequence
  Antisense compound
cattccagggcaagccttta

SEQ ID NO: 18436 - DNA, 20 bp, Artificial Sequence
  Antisense compound
acattccagggcaagccttt

SEQ ID NO: 18437 - DNA, 20 bp, Artificial Sequence
  Antisense compound
tacattccagggcaagcctt

SEQ ID NO: 18438 - DNA, 20 bp, Artificial Sequence
  Antisense compound
ctacattccagggcaagcct

SEQ ID NO: 18439 - DNA, 20 bp, Artificial Sequence
  Antisense compound
actacattccagggcaagcc

SEQ ID NO: 18440 - DNA, 20 bp, Artificial Sequence
  Antisense compound
cactacattccagggcaagc

SEQ ID NO: 18441 - DNA, 20 bp, Artificial Sequence
  Antisense compound
gcactacattccagggcaag

SEQ ID NO: 18442 - DNA, 20 bp, Artificial Sequence
  Antisense compound
cgcactacattccagggcaa

SEQ ID NO: 18443 - DNA, 20 bp, Artificial Sequence
  Antisense compound
acgcactacattccagggca

SEQ ID NO: 18444 - DNA, 20 bp, Artificial Sequence
  Antisense compound
tacgcactacattccagggc

SEQ ID NO: 18445 - DNA, 20 bp, Artificial Sequence
  Antisense compound
atacgcactacattccaggg

SEQ ID NO: 18446 - DNA, 20 bp, Artificial Sequence
  Antisense compound
aatacgcactacattccagg

SEQ ID NO: 18447 - DNA, 20 bp, Artificial Sequence
  Antisense compound
taatacgcactacattccag

SEQ ID NO: 18448 - DNA, 20 bp, Artificial Sequence
  Antisense compound
ttaatacgcactacattcca

SEQ ID NO: 18449 - DNA, 20 bp, Artificial Sequence
  Antisense compound
cttaatacgcactacattcc

SEQ ID NO: 18450 - DNA, 20 bp, Artificial Sequence
  Antisense compound
tcttaatacgcactacattc

SEQ ID NO: 18451 - DNA, 20 bp, Artificial Sequence
  Antisense compound
atcttaatacgcactacatt

SEQ ID NO: 18452 - DNA, 20 bp, Artificial Sequence
  Antisense compound
tatcttaatacgcactacat

SEQ ID NO: 18453 - DNA, 20 bp, Artificial Sequence
  Antisense compound
ctatcttaatacgcactaca

SEQ ID NO: 18454 - DNA, 20 bp, Artificial Sequence
  Antisense compound
actatcttaatacgcactac

SEQ ID NO: 18455 - DNA, 20 bp, Artificial Sequence
  Antisense compound
tactatcttaatacgcacta

SEQ ID NO: 18456 - DNA, 20 bp, Artificial Sequence
  Antisense compound
gtactatcttaatacgcact

SEQ ID NO: 18457 - DNA, 20 bp, Artificial Sequence
  Antisense compound
tgtactatcttaatacgcac

SEQ ID NO: 18458 - DNA, 20 bp, Artificial Sequence
  Antisense compound
ttgtactatcttaatacgca

SEQ ID NO: 18459 - DNA, 20 bp, Artificial Sequence
  Antisense compound
tttgtactatcttaatacgc

SEQ ID NO: 18460 - DNA, 20 bp, Artificial Sequence
  Antisense compound
atttgtactatcttaatacg

SEQ ID NO: 18461 - DNA, 20 bp, Artificial Sequence
  Antisense compound
catttgtactatcttaatac

SEQ ID NO: 18462 - DNA, 20 bp, Artificial Sequence
  Antisense compound
gcatttgtactatcttaata

SEQ ID NO: 18463 - DNA, 20 bp, Artificial Sequence
  Antisense compound
agcatttgtactatcttaat

SEQ ID NO: 18464 - DNA, 20 bp, Artificial Sequence
  Antisense compound
gagcatttgtactatcttaa

SEQ ID NO: 18465 - DNA, 20 bp, Artificial Sequence
  Antisense compound
tgagcatttgtactatctta

SEQ ID NO: 18466 - DNA, 20 bp, Artificial Sequence
  Antisense compound
ctgagcatttgtactatctt

SEQ ID NO: 18467 - DNA, 20 bp, Artificial Sequence
  Antisense compound
actgagcatttgtactatct

SEQ ID NO: 18468 - DNA, 20 bp, Artificial Sequence
  Antisense compound
cactgagcatttgtactatc

SEQ ID NO: 18469 - DNA, 20 bp, Artificial Sequence
  Antisense compound
tcactgagcatttgtactat

SEQ ID NO: 18470 - DNA, 20 bp, Artificial Sequence
  Antisense compound
atcactgagcatttgtacta

SEQ ID NO: 18471 - DNA, 20 bp, Artificial Sequence
  Antisense compound
tatcactgagcatttgtact

SEQ ID NO: 18472 - DNA, 20 bp, Artificial Sequence
  Antisense compound
gtatcactgagcatttgtac

SEQ ID NO: 18473 - DNA, 20 bp, Artificial Sequence
  Antisense compound
tgtatcactgagcatttgta

SEQ ID NO: 18474 - DNA, 20 bp, Artificial Sequence
  Antisense compound
gtgtatcactgagcatttgt

SEQ ID NO: 18475 - DNA, 20 bp, Artificial Sequence
  Antisense compound
agtgtatcactgagcatttg

SEQ ID NO: 18476 - DNA, 20 bp, Artificial Sequence
  Antisense compound
cagtgtatcactgagcattt

SEQ ID NO: 18477 - DNA, 20 bp, Artificial Sequence
  Antisense compound
tcagtgtatcactgagcatt

SEQ ID NO: 18478 - DNA, 20 bp, Artificial Sequence
  Antisense compound
ttcagtgtatcactgagcat

SEQ ID NO: 18479 - DNA, 20 bp, Artificial Sequence
  Antisense compound
tttcagtgtatcactgagca

SEQ ID NO: 18480 - DNA, 20 bp, Artificial Sequence
  Antisense compound
ctttcagtgtatcactgagc

SEQ ID NO: 18481 - DNA, 20 bp, Artificial Sequence
  Antisense compound
cctttcagtgtatcactgag

SEQ ID NO: 18482 - DNA, 20 bp, Artificial Sequence
  Antisense compound
tcctttcagtgtatcactga

SEQ ID NO: 18483 - DNA, 20 bp, Artificial Sequence
  Antisense compound
atcctttcagtgtatcactg

SEQ ID NO: 18484 - DNA, 20 bp, Artificial Sequence
  Antisense compound
aatcctttcagtgtatcact

SEQ ID NO: 18485 - DNA, 20 bp, Artificial Sequence
  Antisense compound
caatcctttcagtgtatcac

SEQ ID NO: 18486 - DNA, 20 bp, Artificial Sequence
  Antisense compound
acaatcctttcagtgtatca

SEQ ID NO: 18487 - DNA, 20 bp, Artificial Sequence
  Antisense compound
gacaatcctttcagtgtatc

SEQ ID NO: 18488 - DNA, 20 bp, Artificial Sequence
  Antisense compound
tgacaatcctttcagtgtat

SEQ ID NO: 18489 - DNA, 20 bp, Artificial Sequence
  Antisense compound
ctgacaatcctttcagtgta

SEQ ID NO: 18490 - DNA, 20 bp, Artificial Sequence
  Antisense compound
tctgacaatcctttcagtgt

SEQ ID NO: 18491 - DNA, 20 bp, Artificial Sequence
  Antisense compound
gtctgacaatcctttcagtg

SEQ ID NO: 18492 - DNA, 20 bp, Artificial Sequence
  Antisense compound
tgtctgacaatcctttcagt

SEQ ID NO: 18493 - DNA, 20 bp, Artificial Sequence
  Antisense compound
ctgtctgacaatcctttcag

SEQ ID NO: 18494 - DNA, 20 bp, Artificial Sequence
  Antisense compound
tctgtctgacaatcctttca

SEQ ID NO: 18495 - DNA, 20 bp, Artificial Sequence
  Antisense compound
ctctgtctgacaatcctttc

SEQ ID NO: 18496 - DNA, 20 bp, Artificial Sequence
  Antisense compound
actctgtctgacaatccttt

SEQ ID NO: 18497 - DNA, 20 bp, Artificial Sequence
  Antisense compound
gactctgtctgacaatcctt

SEQ ID NO: 18498 - DNA, 20 bp, Artificial Sequence
  Antisense compound
cgactctgtctgacaatcct

SEQ ID NO: 18499 - DNA, 20 bp, Artificial Sequence
  Antisense compound
acgactctgtctgacaatcc

SEQ ID NO: 18500 - DNA, 20 bp, Artificial Sequence
  Antisense compound
cacgactctgtctgacaatc

SEQ ID NO: 18501 - DNA, 20 bp, Artificial Sequence
  Antisense compound
acacgactctgtctgacaat

SEQ ID NO: 18502 - DNA, 20 bp, Artificial Sequence
  Antisense compound
aacacgactctgtctgacaa

SEQ ID NO: 18503 - DNA, 20 bp, Artificial Sequence
  Antisense compound
gaacacgactctgtctgaca

SEQ ID NO: 18504 - DNA, 20 bp, Artificial Sequence
  Antisense compound
cgaacacgactctgtctgac

SEQ ID NO: 18505 - DNA, 20 bp, Artificial Sequence
  Antisense compound
acgaacacgactctgtctga

SEQ ID NO: 18506 - DNA, 20 bp, Artificial Sequence
  Antisense compound
gacgaacacgactctgtctg

SEQ ID NO: 18507 - DNA, 20 bp, Artificial Sequence
  Antisense compound
ggacgaacacgactctgtct

SEQ ID NO: 18508 - DNA, 20 bp, Artificial Sequence
  Antisense compound
aggacgaacacgactctgtc

SEQ ID NO: 18509 - DNA, 20 bp, Artificial Sequence
  Antisense compound
aaggacgaacacgactctgt

SEQ ID NO: 18510 - DNA, 20 bp, Artificial Sequence
  Antisense compound
aaaggacgaacacgactctg

SEQ ID NO: 18511 - DNA, 20 bp, Artificial Sequence
  Antisense compound
caaaggacgaacacgactct

SEQ ID NO: 18512 - DNA, 20 bp, Artificial Sequence
  Antisense compound
ccaaaggacgaacacgactc

SEQ ID NO: 18513 - DNA, 20 bp, Artificial Sequence
  Antisense compound
cccaaaggacgaacacgact

SEQ ID NO: 18514 - DNA, 20 bp, Artificial Sequence
  Antisense compound
gcccaaaggacgaacacgac

SEQ ID NO: 18515 - DNA, 20 bp, Artificial Sequence
  Antisense compound
cgcccaaaggacgaacacga

SEQ ID NO: 18516 - DNA, 20 bp, Artificial Sequence
  Antisense compound
gcgcccaaaggacgaacacg

SEQ ID NO: 18517 - DNA, 20 bp, Artificial Sequence
  Antisense compound
tgcgcccaaaggacgaacac

SEQ ID NO: 18518 - DNA, 20 bp, Artificial Sequence
  Antisense compound
atgcgcccaaaggacgaaca

SEQ ID NO: 18519 - DNA, 20 bp, Artificial Sequence
  Antisense compound
catgcgcccaaaggacgaac

SEQ ID NO: 18520 - DNA, 20 bp, Artificial Sequence
  Antisense compound
ccatgcgcccaaaggacgaa

SEQ ID NO: 18521 - DNA, 20 bp, Artificial Sequence
  Antisense compound
gccatgcgcccaaaggacga

SEQ ID NO: 18522 - DNA, 20 bp, Artificial Sequence
  Antisense compound
agccatgcgcccaaaggacg

SEQ ID NO: 18523 - DNA, 20 bp, Artificial Sequence
  Antisense compound
aagccatgcgcccaaaggac

SEQ ID NO: 18524 - DNA, 20 bp, Artificial Sequence
  Antisense compound
aaagccatgcgcccaaagga

SEQ ID NO: 18525 - DNA, 20 bp, Artificial Sequence
  Antisense compound
caaagccatgcgcccaaagg

SEQ ID NO: 18526 - DNA, 20 bp, Artificial Sequence
  Antisense compound
tcaaagccatgcgcccaaag

SEQ ID NO: 18527 - DNA, 20 bp, Artificial Sequence
  Antisense compound
ctcaaagccatgcgcccaaa

SEQ ID NO: 18528 - DNA, 20 bp, Artificial Sequence
  Antisense compound
gctcaaagccatgcgcccaa

SEQ ID NO: 18529 - DNA, 20 bp, Artificial Sequence
  Antisense compound
agctcaaagccatgcgccca

SEQ ID NO: 18530 - DNA, 20 bp, Artificial Sequence
  Antisense compound
aagctcaaagccatgcgccc

SEQ ID NO: 18531 - DNA, 20 bp, Artificial Sequence
  Antisense compound
taagctcaaagccatgcgcc

SEQ ID NO: 18532 - DNA, 20 bp, Artificial Sequence
  Antisense compound
gtaagctcaaagccatgcgc

SEQ ID NO: 18533 - DNA, 20 bp, Artificial Sequence
  Antisense compound
tgtaagctcaaagccatgcg

SEQ ID NO: 18534 - DNA, 20 bp, Artificial Sequence
  Antisense compound
atgtaagctcaaagccatgc

SEQ ID NO: 18535 - DNA, 20 bp, Artificial Sequence
  Antisense compound
gatgtaagctcaaagccatg

SEQ ID NO: 18536 - DNA, 20 bp, Artificial Sequence
  Antisense compound
tgatgtaagctcaaagccat

SEQ ID NO: 18537 - DNA, 20 bp, Artificial Sequence
  Antisense compound
ttgatgtaagctcaaagcca

SEQ ID NO: 18538 - DNA, 20 bp, Artificial Sequence
  Antisense compound
attgatgtaagctcaaagcc

SEQ ID NO: 18539 - DNA, 20 bp, Artificial Sequence
  Antisense compound
cattgatgtaagctcaaagc

SEQ ID NO: 18540 - DNA, 20 bp, Artificial Sequence
  Antisense compound
tcattgatgtaagctcaaag

SEQ ID NO: 18541 - DNA, 20 bp, Artificial Sequence
  Antisense compound
ttcattgatgtaagctcaaa

SEQ ID NO: 18542 - DNA, 20 bp, Artificial Sequence
  Antisense compound
cttcattgatgtaagctcaa

SEQ ID NO: 18543 - DNA, 20 bp, Artificial Sequence
  Antisense compound
acttcattgatgtaagctca

SEQ ID NO: 18544 - DNA, 20 bp, Artificial Sequence
  Antisense compound
tacttcattgatgtaagctc

SEQ ID NO: 18545 - DNA, 20 bp, Artificial Sequence
  Antisense compound
gtacttcattgatgtaagct

SEQ ID NO: 18546 - DNA, 20 bp, Artificial Sequence
  Antisense compound
agtacttcattgatgtaagc

SEQ ID NO: 18547 - DNA, 20 bp, Artificial Sequence
  Antisense compound
aagtacttcattgatgtaag

SEQ ID NO: 18548 - DNA, 20 bp, Artificial Sequence
  Antisense compound
aaagtacttcattgatgtaa

SEQ ID NO: 18549 - DNA, 20 bp, Artificial Sequence
  Antisense compound
caaagtacttcattgatgta

SEQ ID NO: 18550 - DNA, 20 bp, Artificial Sequence
  Antisense compound
acaaagtacttcattgatgt

SEQ ID NO: 18551 - DNA, 20 bp, Artificial Sequence
  Antisense compound
gacaaagtacttcattgatg

SEQ ID NO: 18552 - DNA, 20 bp, Artificial Sequence
  Antisense compound
tgacaaagtacttcattgat

SEQ ID NO: 18553 - DNA, 20 bp, Artificial Sequence
  Antisense compound
ttgacaaagtacttcattga

SEQ ID NO: 18554 - DNA, 20 bp, Artificial Sequence
  Antisense compound
cttgacaaagtacttcattg

SEQ ID NO: 18555 - DNA, 20 bp, Artificial Sequence
  Antisense compound
tcttgacaaagtacttcatt

SEQ ID NO: 18556 - DNA, 20 bp, Artificial Sequence
  Antisense compound
atcttgacaaagtacttcat

SEQ ID NO: 18557 - DNA, 20 bp, Artificial Sequence
  Antisense compound
aatcttgacaaagtacttca

SEQ ID NO: 18558 - DNA, 20 bp, Artificial Sequence
  Antisense compound
caatcttgacaaagtacttc

SEQ ID NO: 18559 - DNA, 20 bp, Artificial Sequence
  Antisense compound
ccaatcttgacaaagtactt

SEQ ID NO: 18560 - DNA, 20 bp, Artificial Sequence
  Antisense compound
tccaatcttgacaaagtact

SEQ ID NO: 18561 - DNA, 20 bp, Artificial Sequence
  Antisense compound
gtccaatcttgacaaagtac

SEQ ID NO: 18562 - DNA, 20 bp, Artificial Sequence
  Antisense compound
ggtccaatcttgacaaagta

SEQ ID NO: 18563 - DNA, 20 bp, Artificial Sequence
  Antisense compound
aggtccaatcttgacaaagt

SEQ ID NO: 18564 - DNA, 20 bp, Artificial Sequence
  Antisense compound
caggtccaatcttgacaaag

SEQ ID NO: 18565 - DNA, 20 bp, Artificial Sequence
  Antisense compound
tcaggtccaatcttgacaaa

SEQ ID NO: 18566 - DNA, 20 bp, Artificial Sequence
  Antisense compound
ttcaggtccaatcttgacaa

SEQ ID NO: 18567 - DNA, 20 bp, Artificial Sequence
  Antisense compound
tttcaggtccaatcttgaca

SEQ ID NO: 18568 - DNA, 20 bp, Artificial Sequence
  Antisense compound
ctttcaggtccaatcttgac

SEQ ID NO: 18569 - DNA, 20 bp, Artificial Sequence
  Antisense compound
tctttcaggtccaatcttga

SEQ ID NO: 18570 - DNA, 20 bp, Artificial Sequence
  Antisense compound
ttctttcaggtccaatcttg

SEQ ID NO: 18571 - DNA, 20 bp, Artificial Sequence
  Antisense compound
gttctttcaggtccaatctt

SEQ ID NO: 18572 - DNA, 20 bp, Artificial Sequence
  Antisense compound
cgttctttcaggtccaatct

SEQ ID NO: 18573 - DNA, 20 bp, Artificial Sequence
  Antisense compound
acgttctttcaggtccaatc

SEQ ID NO: 18574 - DNA, 20 bp, Artificial Sequence
  Antisense compound
cacgttctttcaggtccaat

SEQ ID NO: 18575 - DNA, 20 bp, Artificial Sequence
  Antisense compound
acacgttctttcaggtccaa

SEQ ID NO: 18576 - DNA, 20 bp, Artificial Sequence
  Antisense compound
aacacgttctttcaggtcca

SEQ ID NO: 18577 - DNA, 20 bp, Artificial Sequence
  Antisense compound
caacacgttctttcaggtcc

SEQ ID NO: 18578 - DNA, 20 bp, Artificial Sequence
  Antisense compound
acaacacgttctttcaggtc

SEQ ID NO: 18579 - DNA, 20 bp, Artificial Sequence
  Antisense compound
gacaacacgttctttcaggt

SEQ ID NO: 18580 - DNA, 20 bp, Artificial Sequence
  Antisense compound
agacaacacgttctttcagg

SEQ ID NO: 18581 - DNA, 20 bp, Artificial Sequence
  Antisense compound
cagacaacacgttctttcag

SEQ ID NO: 18582 - DNA, 20 bp, Artificial Sequence
  Antisense compound
acagacaacacgttctttca

SEQ ID NO: 18583 - DNA, 20 bp, Artificial Sequence
  Antisense compound
cacagacaacacgttctttc

SEQ ID NO: 18584 - DNA, 20 bp, Artificial Sequence
  Antisense compound
acacagacaacacgttcttt

SEQ ID NO: 18585 - DNA, 20 bp, Artificial Sequence
  Antisense compound
cacacagacaacacgttctt

SEQ ID NO: 18586 - DNA, 20 bp, Artificial Sequence
  Antisense compound
tcacacagacaacacgttct

SEQ ID NO: 18587 - DNA, 20 bp, Artificial Sequence
  Antisense compound
gtcacacagacaacacgttc

SEQ ID NO: 18588 - DNA, 20 bp, Artificial Sequence
  Antisense compound
tgtcacacagacaacacgtt

SEQ ID NO: 18589 - DNA, 20 bp, Artificial Sequence
  Antisense compound
ttgtcacacagacaacacgt

SEQ ID NO: 18590 - DNA, 20 bp, Artificial Sequence
  Antisense compound
tttgtcacacagacaacacg

SEQ ID NO: 18591 - DNA, 20 bp, Artificial Sequence
  Antisense compound
gtttgtcacacagacaacac

SEQ ID NO: 18592 - DNA, 20 bp, Artificial Sequence
  Antisense compound
cgtttgtcacacagacaaca

SEQ ID NO: 18593 - DNA, 20 bp, Artificial Sequence
  Antisense compound
acgtttgtcacacagacaac

SEQ ID NO: 18594 - DNA, 20 bp, Artificial Sequence
  Antisense compound
cacgtttgtcacacagacaa

SEQ ID NO: 18595 - DNA, 20 bp, Artificial Sequence
  Antisense compound
gcacgtttgtcacacagaca

SEQ ID NO: 18596 - DNA, 20 bp, Artificial Sequence
  Antisense compound
tgcacgtttgtcacacagac

SEQ ID NO: 18597 - DNA, 20 bp, Artificial Sequence
  Antisense compound
ttgcacgtttgtcacacaga

SEQ ID NO: 18598 - DNA, 20 bp, Artificial Sequence
  Antisense compound
gttgcacgtttgtcacacag

SEQ ID NO: 18599 - DNA, 20 bp, Artificial Sequence
  Antisense compound
agttgcacgtttgtcacaca

SEQ ID NO: 18600 - DNA, 20 bp, Artificial Sequence
  Antisense compound
aagttgcacgtttgtcacac

SEQ ID NO: 18601 - DNA, 20 bp, Artificial Sequence
  Antisense compound
caagttgcacgtttgtcaca

SEQ ID NO: 18602 - DNA, 20 bp, Artificial Sequence
  Antisense compound
gcaagttgcacgtttgtcac

SEQ ID NO: 18603 - DNA, 20 bp, Artificial Sequence
  Antisense compound
agcaagttgcacgtttgtca

SEQ ID NO: 18604 - DNA, 20 bp, Artificial Sequence
  Antisense compound
aagcaagttgcacgtttgtc

SEQ ID NO: 18605 - DNA, 20 bp, Artificial Sequence
  Antisense compound
aaagcaagttgcacgtttgt

SEQ ID NO: 18606 - DNA, 20 bp, Artificial Sequence
  Antisense compound
aaaagcaagttgcacgtttg

SEQ ID NO: 18607 - DNA, 20 bp, Artificial Sequence
  Antisense compound
gaaaagcaagttgcacgttt

SEQ ID NO: 18608 - DNA, 20 bp, Artificial Sequence
  Antisense compound
agaaaagcaagttgcacgtt

SEQ ID NO: 18609 - DNA, 20 bp, Artificial Sequence
  Antisense compound
tagaaaagcaagttgcacgt

SEQ ID NO: 18610 - DNA, 20 bp, Artificial Sequence
  Antisense compound
gtagaaaagcaagttgcacg

SEQ ID NO: 18611 - DNA, 20 bp, Artificial Sequence
  Antisense compound
agtagaaaagcaagttgcac

SEQ ID NO: 18612 - DNA, 20 bp, Artificial Sequence
  Antisense compound
aagtagaaaagcaagttgca

SEQ ID NO: 18613 - DNA, 20 bp, Artificial Sequence
  Antisense compound
gaagtagaaaagcaagttgc

SEQ ID NO: 18614 - DNA, 20 bp, Artificial Sequence
  Antisense compound
tgaagtagaaaagcaagttg

SEQ ID NO: 18615 - DNA, 20 bp, Artificial Sequence
  Antisense compound
atgaagtagaaaagcaagtt

SEQ ID NO: 18616 - DNA, 20 bp, Artificial Sequence
  Antisense compound
gatgaagtagaaaagcaagt

SEQ ID NO: 18617 - DNA, 20 bp, Artificial Sequence
  Antisense compound
tgatgaagtagaaaagcaag

SEQ ID NO: 18618 - DNA, 20 bp, Artificial Sequence
  Antisense compound
ctgatgaagtagaaaagcaa

SEQ ID NO: 18619 - DNA, 20 bp, Artificial Sequence
  Antisense compound
tctgatgaagtagaaaagca

SEQ ID NO: 18620 - DNA, 20 bp, Artificial Sequence
  Antisense compound
atctgatgaagtagaaaagc

SEQ ID NO: 18621 - DNA, 20 bp, Artificial Sequence
  Antisense compound
tatctgatgaagtagaaaag

SEQ ID NO: 18622 - DNA, 20 bp, Artificial Sequence
  Antisense compound
gtatctgatgaagtagaaaa

SEQ ID NO: 18623 - DNA, 20 bp, Artificial Sequence
  Antisense compound
agtatctgatgaagtagaaa

SEQ ID NO: 18624 - DNA, 20 bp, Artificial Sequence
  Antisense compound
aagtatctgatgaagtagaa

SEQ ID NO: 18625 - DNA, 20 bp, Artificial Sequence
  Antisense compound
taagtatctgatgaagtaga

SEQ ID NO: 18626 - DNA, 20 bp, Artificial Sequence
  Antisense compound
ataagtatctgatgaagtag

SEQ ID NO: 18627 - DNA, 20 bp, Artificial Sequence
  Antisense compound
cataagtatctgatgaagta

SEQ ID NO: 18628 - DNA, 20 bp, Artificial Sequence
  Antisense compound
gcataagtatctgatgaagt

SEQ ID NO: 18629 - DNA, 20 bp, Artificial Sequence
  Antisense compound
ggcataagtatctgatgaag

SEQ ID NO: 18630 - DNA, 20 bp, Artificial Sequence
  Antisense compound
aggcataagtatctgatgaa

SEQ ID NO: 18631 - DNA, 20 bp, Artificial Sequence
  Antisense compound
caggcataagtatctgatga

SEQ ID NO: 18632 - DNA, 20 bp, Artificial Sequence
  Antisense compound
gcaggcataagtatctgatg

SEQ ID NO: 18633 - DNA, 20 bp, Artificial Sequence
  Antisense compound
agcaggcataagtatctgat

SEQ ID NO: 18634 - DNA, 20 bp, Artificial Sequence
  Antisense compound
cagcaggcataagtatctga

SEQ ID NO: 18635 - DNA, 20 bp, Artificial Sequence
  Antisense compound
ccagcaggcataagtatctg

SEQ ID NO: 18636 - DNA, 20 bp, Artificial Sequence
  Antisense compound
tccagcaggcataagtatct

SEQ ID NO: 18637 - DNA, 20 bp, Artificial Sequence
  Antisense compound
ttccagcaggcataagtatc

SEQ ID NO: 18638 - DNA, 20 bp, Artificial Sequence
  Antisense compound
attccagcaggcataagtat

SEQ ID NO: 18639 - DNA, 20 bp, Artificial Sequence
  Antisense compound
gattccagcaggcataagta

SEQ ID NO: 18640 - DNA, 20 bp, Artificial Sequence
  Antisense compound
tgattccagcaggcataagt

SEQ ID NO: 18641 - DNA, 20 bp, Artificial Sequence
  Antisense compound
atgattccagcaggcataag

SEQ ID NO: 18642 - DNA, 20 bp, Artificial Sequence
  Antisense compound
aatgattccagcaggcataa

SEQ ID NO: 18643 - DNA, 20 bp, Artificial Sequence
  Antisense compound
gaatgattccagcaggcata

SEQ ID NO: 18644 - DNA, 20 bp, Artificial Sequence
  Antisense compound
agaatgattccagcaggcat

SEQ ID NO: 18645 - DNA, 20 bp, Artificial Sequence
  Antisense compound
cagaatgattccagcaggca

SEQ ID NO: 18646 - DNA, 20 bp, Artificial Sequence
  Antisense compound
acagaatgattccagcaggc

SEQ ID NO: 18647 - DNA, 20 bp, Artificial Sequence
  Antisense compound
cacagaatgattccagcagg

SEQ ID NO: 18648 - DNA, 20 bp, Artificial Sequence
  Antisense compound
ccacagaatgattccagcag

SEQ ID NO: 18649 - DNA, 20 bp, Artificial Sequence
  Antisense compound
cccacagaatgattccagca

SEQ ID NO: 18650 - DNA, 20 bp, Artificial Sequence
  Antisense compound
acccacagaatgattccagc

SEQ ID NO: 18651 - DNA, 20 bp, Artificial Sequence
  Antisense compound
aacccacagaatgattccag

SEQ ID NO: 18652 - DNA, 20 bp, Artificial Sequence
  Antisense compound
aaacccacagaatgattcca

SEQ ID NO: 18653 - DNA, 20 bp, Artificial Sequence
  Antisense compound
aaaacccacagaatgattcc

SEQ ID NO: 18654 - DNA, 20 bp, Artificial Sequence
  Antisense compound
caaaacccacagaatgattc

SEQ ID NO: 18655 - DNA, 20 bp, Artificial Sequence
  Antisense compound
tcaaaacccacagaatgatt

SEQ ID NO: 18656 - DNA, 20 bp, Artificial Sequence
  Antisense compound
gtcaaaacccacagaatgat

SEQ ID NO: 18657 - DNA, 20 bp, Artificial Sequence
  Antisense compound
agtcaaaacccacagaatga

SEQ ID NO: 18658 - DNA, 20 bp, Artificial Sequence
  Antisense compound
tagtcaaaacccacagaatg

SEQ ID NO: 18659 - DNA, 20 bp, Artificial Sequence
  Antisense compound
atagtcaaaacccacagaat

SEQ ID NO: 18660 - DNA, 20 bp, Artificial Sequence
  Antisense compound
catagtcaaaacccacagaa

SEQ ID NO: 18661 - DNA, 20 bp, Artificial Sequence
  Antisense compound
acatagtcaaaacccacaga

SEQ ID NO: 18662 - DNA, 20 bp, Artificial Sequence
  Antisense compound
gacatagtcaaaacccacag

SEQ ID NO: 18663 - DNA, 20 bp, Artificial Sequence
  Antisense compound
agacatagtcaaaacccaca

SEQ ID NO: 18664 - DNA, 20 bp, Artificial Sequence
  Antisense compound
tagacatagtcaaaacccac

SEQ ID NO: 18665 - DNA, 20 bp, Artificial Sequence
  Antisense compound
atagacatagtcaaaaccca

SEQ ID NO: 18666 - DNA, 20 bp, Artificial Sequence
  Antisense compound
tatagacatagtcaaaaccc

SEQ ID NO: 18667 - DNA, 20 bp, Artificial Sequence
  Antisense compound
ttatagacatagtcaaaacc

SEQ ID NO: 18668 - DNA, 20 bp, Artificial Sequence
  Antisense compound
gttatagacatagtcaaaac

SEQ ID NO: 18669 - DNA, 20 bp, Artificial Sequence
  Antisense compound
ggttatagacatagtcaaaa

SEQ ID NO: 18670 - DNA, 20 bp, Artificial Sequence
  Antisense compound
gggttatagacatagtcaaa

SEQ ID NO: 18671 - DNA, 20 bp, Artificial Sequence
  Antisense compound
tgggttatagacatagtcaa

SEQ ID NO: 18672 - DNA, 20 bp, Artificial Sequence
  Antisense compound
atgggttatagacatagtca

SEQ ID NO: 18673 - DNA, 20 bp, Artificial Sequence
  Antisense compound
aatgggttatagacatagtc

SEQ ID NO: 18674 - DNA, 20 bp, Artificial Sequence
  Antisense compound
aaatgggttatagacatagt

SEQ ID NO: 18675 - DNA, 20 bp, Artificial Sequence
  Antisense compound
taaatgggttatagacatag

SEQ ID NO: 18676 - DNA, 20 bp, Artificial Sequence
  Antisense compound
ataaatgggttatagacata

SEQ ID NO: 18677 - DNA, 20 bp, Artificial Sequence
  Antisense compound
cataaatgggttatagacat

SEQ ID NO: 18678 - DNA, 20 bp, Artificial Sequence
  Antisense compound
tcataaatgggttatagaca

SEQ ID NO: 18679 - DNA, 20 bp, Artificial Sequence
  Antisense compound
atcataaatgggttatagac

SEQ ID NO: 18680 - DNA, 20 bp, Artificial Sequence
  Antisense compound
aatcataaatgggttataga

SEQ ID NO: 18681 - DNA, 20 bp, Artificial Sequence
  Antisense compound
caatcataaatgggttatag

SEQ ID NO: 18682 - DNA, 20 bp, Artificial Sequence
  Antisense compound
tcaatcataaatgggttata

SEQ ID NO: 18683 - DNA, 20 bp, Artificial Sequence
  Antisense compound
atcaatcataaatgggttat

SEQ ID NO: 18684 - DNA, 20 bp, Artificial Sequence
  Antisense compound
catcaatcataaatgggtta

SEQ ID NO: 18685 - DNA, 20 bp, Artificial Sequence
  Antisense compound
acatcaatcataaatgggtt

SEQ ID NO: 18686 - DNA, 20 bp, Artificial Sequence
  Antisense compound
aacatcaatcataaatgggt

SEQ ID NO: 18687 - DNA, 20 bp, Artificial Sequence
  Antisense compound
gaacatcaatcataaatggg

SEQ ID NO: 18688 - DNA, 20 bp, Artificial Sequence
  Antisense compound
tgaacatcaatcataaatgg

SEQ ID NO: 18689 - DNA, 20 bp, Artificial Sequence
  Antisense compound
ctgaacatcaatcataaatg

SEQ ID NO: 18690 - DNA, 20 bp, Artificial Sequence
  Antisense compound
gctgaacatcaatcataaat

SEQ ID NO: 18691 - DNA, 20 bp, Artificial Sequence
  Antisense compound
tgctgaacatcaatcataaa

SEQ ID NO: 18692 - DNA, 20 bp, Artificial Sequence
  Antisense compound
ctgctgaacatcaatcataa

SEQ ID NO: 18693 - DNA, 20 bp, Artificial Sequence
  Antisense compound
actgctgaacatcaatcata

SEQ ID NO: 18694 - DNA, 20 bp, Artificial Sequence
  Antisense compound
cactgctgaacatcaatcat

SEQ ID NO: 18695 - DNA, 20 bp, Artificial Sequence
  Antisense compound
ccactgctgaacatcaatca

SEQ ID NO: 18696 - DNA, 20 bp, Artificial Sequence
  Antisense compound
cccactgctgaacatcaatc

SEQ ID NO: 18697 - DNA, 20 bp, Artificial Sequence
  Antisense compound
ccccactgctgaacatcaat

SEQ ID NO: 18698 - DNA, 20 bp, Artificial Sequence
  Antisense compound
gccccactgctgaacatcaa

SEQ ID NO: 18699 - DNA, 20 bp, Artificial Sequence
  Antisense compound
agccccactgctgaacatca

SEQ ID NO: 18700 - DNA, 20 bp, Artificial Sequence
  Antisense compound
aagccccactgctgaacatc

SEQ ID NO: 18701 - DNA, 20 bp, Artificial Sequence
  Antisense compound
aaagccccactgctgaacat

SEQ ID NO: 18702 - DNA, 20 bp, Artificial Sequence
  Antisense compound
taaagccccactgctgaaca

SEQ ID NO: 18703 - DNA, 20 bp, Artificial Sequence
  Antisense compound
gtaaagccccactgctgaac

SEQ ID NO: 18704 - DNA, 20 bp, Artificial Sequence
  Antisense compound
cgtaaagccccactgctgaa

SEQ ID NO: 18705 - DNA, 20 bp, Artificial Sequence
  Antisense compound
ccgtaaagccccactgctga

SEQ ID NO: 18706 - DNA, 20 bp, Artificial Sequence
  Antisense compound
cccgtaaagccccactgctg

SEQ ID NO: 18707 - DNA, 20 bp, Artificial Sequence
  Antisense compound
acccgtaaagccccactgct

SEQ ID NO: 18708 - DNA, 20 bp, Artificial Sequence
  Antisense compound
tacccgtaaagccccactgc

SEQ ID NO: 18709 - DNA, 20 bp, Artificial Sequence
  Antisense compound
ttacccgtaaagccccactg

SEQ ID NO: 18710 - DNA, 20 bp, Artificial Sequence
  Antisense compound
gttacccgtaaagccccact

SEQ ID NO: 18711 - DNA, 20 bp, Artificial Sequence
  Antisense compound
ggttacccgtaaagccccac

SEQ ID NO: 18712 - DNA, 20 bp, Artificial Sequence
  Antisense compound
aggttacccgtaaagcccca

SEQ ID NO: 18713 - DNA, 20 bp, Artificial Sequence
  Antisense compound
aaggttacccgtaaagcccc

SEQ ID NO: 18714 - DNA, 20 bp, Artificial Sequence
  Antisense compound
gaaggttacccgtaaagccc

SEQ ID NO: 18715 - DNA, 20 bp, Artificial Sequence
  Antisense compound
tgaaggttacccgtaaagcc

SEQ ID NO: 18716 - DNA, 20 bp, Artificial Sequence
  Antisense compound
ctgaaggttacccgtaaagc

SEQ ID NO: 18717 - DNA, 20 bp, Artificial Sequence
  Antisense compound
tctgaaggttacccgtaaag

SEQ ID NO: 18718 - DNA, 20 bp, Artificial Sequence
  Antisense compound
ctctgaaggttacccgtaaa

SEQ ID NO: 18719 - DNA, 20 bp, Artificial Sequence
  Antisense compound
actctgaaggttacccgtaa

SEQ ID NO: 18720 - DNA, 20 bp, Artificial Sequence
  Antisense compound
tactctgaaggttacccgta

SEQ ID NO: 18721 - DNA, 20 bp, Artificial Sequence
  Antisense compound
ttactctgaaggttacccgt

SEQ ID NO: 18722 - DNA, 20 bp, Artificial Sequence
  Antisense compound
gttactctgaaggttacccg

SEQ ID NO: 18723 - DNA, 20 bp, Artificial Sequence
  Antisense compound
ggttactctgaaggttaccc

SEQ ID NO: 18724 - DNA, 20 bp, Artificial Sequence
  Antisense compound
tggttactctgaaggttacc

SEQ ID NO: 18725 - DNA, 20 bp, Artificial Sequence
  Antisense compound
atggttactctgaaggttac

SEQ ID NO: 18726 - DNA, 20 bp, Artificial Sequence
  Antisense compound
catggttactctgaaggtta

SEQ ID NO: 18727 - DNA, 20 bp, Artificial Sequence
  Antisense compound
tcatggttactctgaaggtt

SEQ ID NO: 18728 - DNA, 20 bp, Artificial Sequence
  Antisense compound
gtcatggttactctgaaggt

SEQ ID NO: 18729 - DNA, 20 bp, Artificial Sequence
  Antisense compound
ggtcatggttactctgaagg

SEQ ID NO: 18730 - DNA, 20 bp, Artificial Sequence
  Antisense compound
tggtcatggttactctgaag

SEQ ID NO: 18731 - DNA, 20 bp, Artificial Sequence
  Antisense compound
ttggtcatggttactctgaa

SEQ ID NO: 18732 - DNA, 20 bp, Artificial Sequence
  Antisense compound
gttggtcatggttactctga

SEQ ID NO: 18733 - DNA, 20 bp, Artificial Sequence
  Antisense compound
tgttggtcatggttactctg

SEQ ID NO: 18734 - DNA, 20 bp, Artificial Sequence
  Antisense compound
atgttggtcatggttactct

SEQ ID NO: 18735 - DNA, 20 bp, Artificial Sequence
  Antisense compound
aatgttggtcatggttactc

SEQ ID NO: 18736 - DNA, 20 bp, Artificial Sequence
  Antisense compound
caatgttggtcatggttact

SEQ ID NO: 18737 - DNA, 20 bp, Artificial Sequence
  Antisense compound
gcaatgttggtcatggttac

SEQ ID NO: 18738 - DNA, 20 bp, Artificial Sequence
  Antisense compound
ggcaatgttggtcatggtta

SEQ ID NO: 18739 - DNA, 20 bp, Artificial Sequence
  Antisense compound
tggcaatgttggtcatggtt

SEQ ID NO: 18740 - DNA, 20 bp, Artificial Sequence
  Antisense compound
ctggcaatgttggtcatggt

SEQ ID NO: 18741 - DNA, 20 bp, Artificial Sequence
  Antisense compound
cctggcaatgttggtcatgg

SEQ ID NO: 18742 - DNA, 20 bp, Artificial Sequence
  Antisense compound
acctggcaatgttggtcatg

SEQ ID NO: 18743 - DNA, 20 bp, Artificial Sequence
  Antisense compound
tacctggcaatgttggtcat

SEQ ID NO: 18744 - DNA, 20 bp, Artificial Sequence
  Antisense compound
gtacctggcaatgttggtca

SEQ ID NO: 18745 - DNA, 20 bp, Artificial Sequence
  Antisense compound
tgtacctggcaatgttggtc

SEQ ID NO: 18746 - DNA, 20 bp, Artificial Sequence
  Antisense compound
atgtacctggcaatgttggt

SEQ ID NO: 18747 - DNA, 20 bp, Artificial Sequence
  Antisense compound
catgtacctggcaatgttgg

SEQ ID NO: 18748 - DNA, 20 bp, Artificial Sequence
  Antisense compound
ccatgtacctggcaatgttg

SEQ ID NO: 18749 - DNA, 20 bp, Artificial Sequence
  Antisense compound
tccatgtacctggcaatgtt

SEQ ID NO: 18750 - DNA, 20 bp, Artificial Sequence
  Antisense compound
ttccatgtacctggcaatgt

SEQ ID NO: 18751 - DNA, 20 bp, Artificial Sequence
  Antisense compound
tttccatgtacctggcaatg

SEQ ID NO: 18752 - DNA, 20 bp, Artificial Sequence
  Antisense compound
atttccatgtacctggcaat

SEQ ID NO: 18753 - DNA, 20 bp, Artificial Sequence
  Antisense compound
catttccatgtacctggcaa

SEQ ID NO: 18754 - DNA, 20 bp, Artificial Sequence
  Antisense compound
gcatttccatgtacctggca

SEQ ID NO: 18755 - DNA, 20 bp, Artificial Sequence
  Antisense compound
tgcatttccatgtacctggc

SEQ ID NO: 18756 - DNA, 20 bp, Artificial Sequence
  Antisense compound
gtgcatttccatgtacctgg

SEQ ID NO: 18757 - DNA, 20 bp, Artificial Sequence
  Antisense compound
tgtgcatttccatgtacctg

SEQ ID NO: 18758 - DNA, 20 bp, Artificial Sequence
  Antisense compound
atgtgcatttccatgtacct

SEQ ID NO: 18759 - DNA, 20 bp, Artificial Sequence
  Antisense compound
catgtgcatttccatgtacc

SEQ ID NO: 18760 - DNA, 20 bp, Artificial Sequence
  Antisense compound
acatgtgcatttccatgtac

SEQ ID NO: 18761 - DNA, 20 bp, Artificial Sequence
  Antisense compound
cacatgtgcatttccatgta

SEQ ID NO: 18762 - DNA, 20 bp, Artificial Sequence
  Antisense compound
ccacatgtgcatttccatgt

SEQ ID NO: 18763 - DNA, 20 bp, Artificial Sequence
  Antisense compound
gccacatgtgcatttccatg

SEQ ID NO: 18764 - DNA, 20 bp, Artificial Sequence
  Antisense compound
agccacatgtgcatttccat

SEQ ID NO: 18765 - DNA, 20 bp, Artificial Sequence
  Antisense compound
tagccacatgtgcatttcca

SEQ ID NO: 18766 - DNA, 20 bp, Artificial Sequence
  Antisense compound
ctagccacatgtgcatttcc

SEQ ID NO: 18767 - DNA, 20 bp, Artificial Sequence
  Antisense compound
actagccacatgtgcatttc

SEQ ID NO: 18768 - DNA, 20 bp, Artificial Sequence
  Antisense compound
aactagccacatgtgcattt

SEQ ID NO: 18769 - DNA, 20 bp, Artificial Sequence
  Antisense compound
caactagccacatgtgcatt

SEQ ID NO: 18770 - DNA, 20 bp, Artificial Sequence
  Antisense compound
acaactagccacatgtgcat

SEQ ID NO: 18771 - DNA, 20 bp, Artificial Sequence
  Antisense compound
cacaactagccacatgtgca

SEQ ID NO: 18772 - DNA, 20 bp, Artificial Sequence
  Antisense compound
tcacaactagccacatgtgc

SEQ ID NO: 18773 - DNA, 20 bp, Artificial Sequence
  Antisense compound
atcacaactagccacatgtg

SEQ ID NO: 18774 - DNA, 20 bp, Artificial Sequence
  Antisense compound
catcacaactagccacatgt

SEQ ID NO: 18775 - DNA, 20 bp, Artificial Sequence
  Antisense compound
gcatcacaactagccacatg

SEQ ID NO: 18776 - DNA, 20 bp, Artificial Sequence
  Antisense compound
agcatcacaactagccacat

SEQ ID NO: 18777 - DNA, 20 bp, Artificial Sequence
  Antisense compound
tagcatcacaactagccaca

SEQ ID NO: 18778 - DNA, 20 bp, Artificial Sequence
  Antisense compound
atagcatcacaactagccac

SEQ ID NO: 18779 - DNA, 20 bp, Artificial Sequence
  Antisense compound
gatagcatcacaactagcca

SEQ ID NO: 18780 - DNA, 20 bp, Artificial Sequence
  Antisense compound
tgatagcatcacaactagcc

SEQ ID NO: 18781 - DNA, 20 bp, Artificial Sequence
  Antisense compound
atgatagcatcacaactagc

SEQ ID NO: 18782 - DNA, 20 bp, Artificial Sequence
  Antisense compound
catgatagcatcacaactag

SEQ ID NO: 18783 - DNA, 20 bp, Artificial Sequence
  Antisense compound
tcatgatagcatcacaacta

SEQ ID NO: 18784 - DNA, 20 bp, Artificial Sequence
  Antisense compound
gtcatgatagcatcacaact

SEQ ID NO: 18785 - DNA, 20 bp, Artificial Sequence
  Antisense compound
agtcatgatagcatcacaac

SEQ ID NO: 18786 - DNA, 20 bp, Artificial Sequence
  Antisense compound
tagtcatgatagcatcacaa

SEQ ID NO: 18787 - DNA, 20 bp, Artificial Sequence
  Antisense compound
ctagtcatgatagcatcaca

SEQ ID NO: 18788 - DNA, 20 bp, Artificial Sequence
  Antisense compound
tctagtcatgatagcatcac

SEQ ID NO: 18789 - DNA, 20 bp, Artificial Sequence
  Antisense compound
atctagtcatgatagcatca

SEQ ID NO: 18790 - DNA, 20 bp, Artificial Sequence
  Antisense compound
catctagtcatgatagcatc

SEQ ID NO: 18791 - DNA, 20 bp, Artificial Sequence
  Antisense compound
acatctagtcatgatagcat

SEQ ID NO: 18792 - DNA, 20 bp, Artificial Sequence
  Antisense compound
aacatctagtcatgatagca

SEQ ID NO: 18793 - DNA, 20 bp, Artificial Sequence
  Antisense compound
aaacatctagtcatgatagc

SEQ ID NO: 18794 - DNA, 20 bp, Artificial Sequence
  Antisense compound
taaacatctagtcatgatag

SEQ ID NO: 18795 - DNA, 20 bp, Artificial Sequence
  Antisense compound
ctaaacatctagtcatgata

SEQ ID NO: 18796 - DNA, 20 bp, Artificial Sequence
  Antisense compound
gctaaacatctagtcatgat

SEQ ID NO: 18797 - DNA, 20 bp, Artificial Sequence
  Antisense compound
tgctaaacatctagtcatga

SEQ ID NO: 18798 - DNA, 20 bp, Artificial Sequence
  Antisense compound
ctgctaaacatctagtcatg

SEQ ID NO: 18799 - DNA, 20 bp, Artificial Sequence
  Antisense compound
actgctaaacatctagtcat

SEQ ID NO: 18800 - DNA, 20 bp, Artificial Sequence
  Antisense compound
gactgctaaacatctagtca

SEQ ID NO: 18801 - DNA, 20 bp, Artificial Sequence
  Antisense compound
ggactgctaaacatctagtc

SEQ ID NO: 18802 - DNA, 20 bp, Artificial Sequence
  Antisense compound
tggactgctaaacatctagt

SEQ ID NO: 18803 - DNA, 20 bp, Artificial Sequence
  Antisense compound
atggactgctaaacatctag

SEQ ID NO: 18804 - DNA, 20 bp, Artificial Sequence
  Antisense compound
catggactgctaaacatcta

SEQ ID NO: 18805 - DNA, 20 bp, Artificial Sequence
  Antisense compound
tcatggactgctaaacatct

SEQ ID NO: 18806 - DNA, 20 bp, Artificial Sequence
  Antisense compound
ctcatggactgctaaacatc

SEQ ID NO: 18807 - DNA, 20 bp, Artificial Sequence
  Antisense compound
actcatggactgctaaacat

SEQ ID NO: 18808 - DNA, 20 bp, Artificial Sequence
  Antisense compound
cactcatggactgctaaaca

SEQ ID NO: 18809 - DNA, 20 bp, Artificial Sequence
  Antisense compound
gcactcatggactgctaaac

SEQ ID NO: 18810 - DNA, 20 bp, Artificial Sequence
  Antisense compound
agcactcatggactgctaaa

SEQ ID NO: 18811 - DNA, 20 bp, Artificial Sequence
  Antisense compound
aagcactcatggactgctaa

SEQ ID NO: 18812 - DNA, 20 bp, Artificial Sequence
  Antisense compound
aaagcactcatggactgcta

SEQ ID NO: 18813 - DNA, 20 bp, Artificial Sequence
  Antisense compound
caaagcactcatggactgct

SEQ ID NO: 18814 - DNA, 20 bp, Artificial Sequence
  Antisense compound
acaaagcactcatggactgc

SEQ ID NO: 18815 - DNA, 20 bp, Artificial Sequence
  Antisense compound
aacaaagcactcatggactg

SEQ ID NO: 18816 - DNA, 20 bp, Artificial Sequence
  Antisense compound
taacaaagcactcatggact

SEQ ID NO: 18817 - DNA, 20 bp, Artificial Sequence
  Antisense compound
ttaacaaagcactcatggac

SEQ ID NO: 18818 - DNA, 20 bp, Artificial Sequence
  Antisense compound
cttaacaaagcactcatgga

SEQ ID NO: 18819 - DNA, 20 bp, Artificial Sequence
  Antisense compound
gcttaacaaagcactcatgg

SEQ ID NO: 18820 - DNA, 20 bp, Artificial Sequence
  Antisense compound
cgcttaacaaagcactcatg

SEQ ID NO: 18821 - DNA, 20 bp, Artificial Sequence
  Antisense compound
gcgcttaacaaagcactcat

SEQ ID NO: 18822 - DNA, 20 bp, Artificial Sequence
  Antisense compound
cgcgcttaacaaagcactca

SEQ ID NO: 18823 - DNA, 20 bp, Artificial Sequence
  Antisense compound
acgcgcttaacaaagcactc

SEQ ID NO: 18824 - DNA, 20 bp, Artificial Sequence
  Antisense compound
aacgcgcttaacaaagcact

SEQ ID NO: 18825 - DNA, 20 bp, Artificial Sequence
  Antisense compound
caacgcgcttaacaaagcac

SEQ ID NO: 18826 - DNA, 20 bp, Artificial Sequence
  Antisense compound
tcaacgcgcttaacaaagca

SEQ ID NO: 18827 - DNA, 20 bp, Artificial Sequence
  Antisense compound
atcaacgcgcttaacaaagc

SEQ ID NO: 18828 - DNA, 20 bp, Artificial Sequence
  Antisense compound
aatcaacgcgcttaacaaag

SEQ ID NO: 18829 - DNA, 20 bp, Artificial Sequence
  Antisense compound
caatcaacgcgcttaacaaa

SEQ ID NO: 18830 - DNA, 20 bp, Artificial Sequence
  Antisense compound
ccaatcaacgcgcttaacaa

SEQ ID NO: 18831 - DNA, 20 bp, Artificial Sequence
  Antisense compound
accaatcaacgcgcttaaca

SEQ ID NO: 18832 - DNA, 20 bp, Artificial Sequence
  Antisense compound
gaccaatcaacgcgcttaac

SEQ ID NO: 18833 - DNA, 20 bp, Artificial Sequence
  Antisense compound
agaccaatcaacgcgcttaa

SEQ ID NO: 18834 - DNA, 20 bp, Artificial Sequence
  Antisense compound
cagaccaatcaacgcgctta

SEQ ID NO: 18835 - DNA, 20 bp, Artificial Sequence
  Antisense compound
acagaccaatcaacgcgctt

SEQ ID NO: 18836 - DNA, 20 bp, Artificial Sequence
  Antisense compound
aacagaccaatcaacgcgct

SEQ ID NO: 18837 - DNA, 20 bp, Artificial Sequence
  Antisense compound
caacagaccaatcaacgcgc

SEQ ID NO: 18838 - DNA, 20 bp, Artificial Sequence
  Antisense compound
tcaacagaccaatcaacgcg

SEQ ID NO: 18839 - DNA, 20 bp, Artificial Sequence
  Antisense compound
ttcaacagaccaatcaacgc

SEQ ID NO: 18840 - DNA, 20 bp, Artificial Sequence
  Antisense compound
attcaacagaccaatcaacg

SEQ ID NO: 18841 - DNA, 20 bp, Artificial Sequence
  Antisense compound
tattcaacagaccaatcaac

SEQ ID NO: 18842 - DNA, 20 bp, Artificial Sequence
  Antisense compound
gtattcaacagaccaatcaa

SEQ ID NO: 18843 - DNA, 20 bp, Artificial Sequence
  Antisense compound
ggtattcaacagaccaatca

SEQ ID NO: 18844 - DNA, 20 bp, Artificial Sequence
  Antisense compound
gggtattcaacagaccaatc

SEQ ID NO: 18845 - DNA, 20 bp, Artificial Sequence
  Antisense compound
agggtattcaacagaccaat

SEQ ID NO: 18846 - DNA, 20 bp, Artificial Sequence
  Antisense compound
tagggtattcaacagaccaa

SEQ ID NO: 18847 - DNA, 20 bp, Artificial Sequence
  Antisense compound
atagggtattcaacagacca

SEQ ID NO: 18848 - DNA, 20 bp, Artificial Sequence
  Antisense compound
aatagggtattcaacagacc

SEQ ID NO: 18849 - DNA, 20 bp, Artificial Sequence
  Antisense compound
taatagggtattcaacagac

SEQ ID NO: 18850 - DNA, 20 bp, Artificial Sequence
  Antisense compound
ataatagggtattcaacaga

SEQ ID NO: 18851 - DNA, 20 bp, Artificial Sequence
  Antisense compound
tataatagggtattcaacag

SEQ ID NO: 18852 - DNA, 20 bp, Artificial Sequence
  Antisense compound
ctataatagggtattcaaca

SEQ ID NO: 18853 - DNA, 20 bp, Artificial Sequence
  Antisense compound
cctataatagggtattcaac

SEQ ID NO: 18854 - DNA, 20 bp, Artificial Sequence
  Antisense compound
tcctataatagggtattcaa

SEQ ID NO: 18855 - DNA, 20 bp, Artificial Sequence
  Antisense compound
ctcctataatagggtattca

SEQ ID NO: 18856 - DNA, 20 bp, Artificial Sequence
  Antisense compound
tctcctataatagggtattc

SEQ ID NO: 18857 - DNA, 20 bp, Artificial Sequence
  Antisense compound
atctcctataatagggtatt

SEQ ID NO: 18858 - DNA, 20 bp, Artificial Sequence
  Antisense compound
catctcctataatagggtat

SEQ ID NO: 18859 - DNA, 20 bp, Artificial Sequence
  Antisense compound
tcatctcctataatagggta

SEQ ID NO: 18860 - DNA, 20 bp, Artificial Sequence
  Antisense compound
ttcatctcctataatagggt

SEQ ID NO: 18861 - DNA, 20 bp, Artificial Sequence
  Antisense compound
gttcatctcctataataggg

SEQ ID NO: 18862 - DNA, 20 bp, Artificial Sequence
  Antisense compound
agttcatctcctataatagg

SEQ ID NO: 18863 - DNA, 20 bp, Artificial Sequence
  Antisense compound
cagttcatctcctataatag

SEQ ID NO: 18864 - DNA, 20 bp, Artificial Sequence
  Antisense compound
tcagttcatctcctataata

SEQ ID NO: 18865 - DNA, 20 bp, Artificial Sequence
  Antisense compound
ctcagttcatctcctataat

SEQ ID NO: 18866 - DNA, 20 bp, Artificial Sequence
  Antisense compound
cctcagttcatctcctataa

SEQ ID NO: 18867 - DNA, 20 bp, Artificial Sequence
  Antisense compound
ccctcagttcatctcctata

SEQ ID NO: 18868 - DNA, 20 bp, Artificial Sequence
  Antisense compound
accctcagttcatctcctat

SEQ ID NO: 18869 - DNA, 20 bp, Artificial Sequence
  Antisense compound
aaccctcagttcatctccta

SEQ ID NO: 18870 - DNA, 20 bp, Artificial Sequence
  Antisense compound
taaccctcagttcatctcct

SEQ ID NO: 18871 - DNA, 20 bp, Artificial Sequence
  Antisense compound
ttaaccctcagttcatctcc

SEQ ID NO: 18872 - DNA, 20 bp, Artificial Sequence
  Antisense compound
attaaccctcagttcatctc

SEQ ID NO: 18873 - DNA, 20 bp, Artificial Sequence
  Antisense compound
aattaaccctcagttcatct

SEQ ID NO: 18874 - DNA, 20 bp, Artificial Sequence
  Antisense compound
gaattaaccctcagttcatc

SEQ ID NO: 18875 - DNA, 20 bp, Artificial Sequence
  Antisense compound
agaattaaccctcagttcat

SEQ ID NO: 18876 - DNA, 20 bp, Artificial Sequence
  Antisense compound
cagaattaaccctcagttca

SEQ ID NO: 18877 - DNA, 20 bp, Artificial Sequence
  Antisense compound
gcagaattaaccctcagttc

SEQ ID NO: 18878 - DNA, 20 bp, Artificial Sequence
  Antisense compound
agcagaattaaccctcagtt

SEQ ID NO: 18879 - DNA, 20 bp, Artificial Sequence
  Antisense compound
aagcagaattaaccctcagt

SEQ ID NO: 18880 - DNA, 20 bp, Artificial Sequence
  Antisense compound
caagcagaattaaccctcag

SEQ ID NO: 18881 - DNA, 20 bp, Artificial Sequence
  Antisense compound
gcaagcagaattaaccctca

SEQ ID NO: 18882 - DNA, 20 bp, Artificial Sequence
  Antisense compound
tgcaagcagaattaaccctc

SEQ ID NO: 18883 - DNA, 20 bp, Artificial Sequence
  Antisense compound
ctgcaagcagaattaaccct

SEQ ID NO: 18884 - DNA, 20 bp, Artificial Sequence
  Antisense compound
tctgcaagcagaattaaccc

SEQ ID NO: 18885 - DNA, 20 bp, Artificial Sequence
  Antisense compound
ttctgcaagcagaattaacc

SEQ ID NO: 18886 - DNA, 20 bp, Artificial Sequence
  Antisense compound
tttctgcaagcagaattaac

SEQ ID NO: 18887 - DNA, 20 bp, Artificial Sequence
  Antisense compound
ttttctgcaagcagaattaa

SEQ ID NO: 18888 - DNA, 20 bp, Artificial Sequence
  Antisense compound
cttttctgcaagcagaatta

SEQ ID NO: 18889 - DNA, 20 bp, Artificial Sequence
  Antisense compound
acttttctgcaagcagaatt

SEQ ID NO: 18890 - DNA, 20 bp, Artificial Sequence
  Antisense compound
tacttttctgcaagcagaat

SEQ ID NO: 18891 - DNA, 20 bp, Artificial Sequence
  Antisense compound
gtacttttctgcaagcagaa

SEQ ID NO: 18892 - DNA, 20 bp, Artificial Sequence
  Antisense compound
tgtacttttctgcaagcaga

SEQ ID NO: 18893 - DNA, 20 bp, Artificial Sequence
  Antisense compound
ttgtacttttctgcaagcag

SEQ ID NO: 18894 - DNA, 20 bp, Artificial Sequence
  Antisense compound
gttgtacttttctgcaagca

SEQ ID NO: 18895 - DNA, 20 bp, Artificial Sequence
  Antisense compound
tgttgtacttttctgcaagc

SEQ ID NO: 18896 - DNA, 20 bp, Artificial Sequence
  Antisense compound
gtgttgtacttttctgcaag

SEQ ID NO: 18897 - DNA, 20 bp, Artificial Sequence
  Antisense compound
tgtgttgtacttttctgcaa

SEQ ID NO: 18898 - DNA, 20 bp, Artificial Sequence
  Antisense compound
atgtgttgtacttttctgca

SEQ ID NO: 18899 - DNA, 20 bp, Artificial Sequence
  Antisense compound
catgtgttgtacttttctgc

SEQ ID NO: 18900 - DNA, 20 bp, Artificial Sequence
  Antisense compound
ccatgtgttgtacttttctg

SEQ ID NO: 18901 - DNA, 20 bp, Artificial Sequence
  Antisense compound
accatgtgttgtacttttct

SEQ ID NO: 18902 - DNA, 20 bp, Artificial Sequence
  Antisense compound
aaccatgtgttgtacttttc

SEQ ID NO: 18903 - DNA, 20 bp, Artificial Sequence
  Antisense compound
caaccatgtgttgtactttt

SEQ ID NO: 18904 - DNA, 20 bp, Artificial Sequence
  Antisense compound
acaaccatgtgttgtacttt

SEQ ID NO: 18905 - DNA, 20 bp, Artificial Sequence
  Antisense compound
cacaaccatgtgttgtactt

SEQ ID NO: 18906 - DNA, 20 bp, Artificial Sequence
  Antisense compound
tcacaaccatgtgttgtact

SEQ ID NO: 18907 - DNA, 20 bp, Artificial Sequence
  Antisense compound
ttcacaaccatgtgttgtac

SEQ ID NO: 18908 - DNA, 20 bp, Artificial Sequence
  Antisense compound
cttcacaaccatgtgttgta

SEQ ID NO: 18909 - DNA, 20 bp, Artificial Sequence
  Antisense compound
acttcacaaccatgtgttgt

SEQ ID NO: 18910 - DNA, 20 bp, Artificial Sequence
  Antisense compound
gacttcacaaccatgtgttg

SEQ ID NO: 18911 - DNA, 20 bp, Artificial Sequence
  Antisense compound
agacttcacaaccatgtgtt

SEQ ID NO: 18912 - DNA, 20 bp, Artificial Sequence
  Antisense compound
cagacttcacaaccatgtgt

SEQ ID NO: 18913 - DNA, 20 bp, Artificial Sequence
  Antisense compound
gcagacttcacaaccatgtg

SEQ ID NO: 18914 - DNA, 20 bp, Artificial Sequence
  Antisense compound
tgcagacttcacaaccatgt

SEQ ID NO: 18915 - DNA, 20 bp, Artificial Sequence
  Antisense compound
atgcagacttcacaaccatg

SEQ ID NO: 18916 - DNA, 20 bp, Artificial Sequence
  Antisense compound
aatgcagacttcacaaccat

SEQ ID NO: 18917 - DNA, 20 bp, Artificial Sequence
  Antisense compound
caatgcagacttcacaacca

SEQ ID NO: 18918 - DNA, 20 bp, Artificial Sequence
  Antisense compound
gcaatgcagacttcacaacc

SEQ ID NO: 18919 - DNA, 20 bp, Artificial Sequence
  Antisense compound
agcaatgcagacttcacaac

SEQ ID NO: 18920 - DNA, 20 bp, Artificial Sequence
  Antisense compound
aagcaatgcagacttcacaa

SEQ ID NO: 18921 - DNA, 20 bp, Artificial Sequence
  Antisense compound
caagcaatgcagacttcaca

SEQ ID NO: 18922 - DNA, 20 bp, Artificial Sequence
  Antisense compound
gcaagcaatgcagacttcac

SEQ ID NO: 18923 - DNA, 20 bp, Artificial Sequence
  Antisense compound
agcaagcaatgcagacttca

SEQ ID NO: 18924 - DNA, 20 bp, Artificial Sequence
  Antisense compound
cagcaagcaatgcagacttc

SEQ ID NO: 18925 - DNA, 20 bp, Artificial Sequence
  Antisense compound
tcagcaagcaatgcagactt

SEQ ID NO: 18926 - DNA, 20 bp, Artificial Sequence
  Antisense compound
atcagcaagcaatgcagact

SEQ ID NO: 18927 - DNA, 20 bp, Artificial Sequence
  Antisense compound
tatcagcaagcaatgcagac

SEQ ID NO: 18928 - DNA, 20 bp, Artificial Sequence
  Antisense compound
ttatcagcaagcaatgcaga

SEQ ID NO: 18929 - DNA, 20 bp, Artificial Sequence
  Antisense compound
cttatcagcaagcaatgcag

SEQ ID NO: 18930 - DNA, 20 bp, Artificial Sequence
  Antisense compound
acttatcagcaagcaatgca

SEQ ID NO: 18931 - DNA, 20 bp, Artificial Sequence
  Antisense compound
aacttatcagcaagcaatgc

SEQ ID NO: 18932 - DNA, 20 bp, Artificial Sequence
  Antisense compound
aaacttatcagcaagcaatg

SEQ ID NO: 18933 - DNA, 20 bp, Artificial Sequence
  Antisense compound
gaaacttatcagcaagcaat

SEQ ID NO: 18934 - DNA, 20 bp, Artificial Sequence
  Antisense compound
ggaaacttatcagcaagcaa

SEQ ID NO: 18935 - DNA, 20 bp, Artificial Sequence
  Antisense compound
tggaaacttatcagcaagca

SEQ ID NO: 18936 - DNA, 20 bp, Artificial Sequence
  Antisense compound
ctggaaacttatcagcaagc

SEQ ID NO: 18937 - DNA, 20 bp, Artificial Sequence
  Antisense compound
actggaaacttatcagcaag

SEQ ID NO: 18938 - DNA, 20 bp, Artificial Sequence
  Antisense compound
aactggaaacttatcagcaa

SEQ ID NO: 18939 - DNA, 20 bp, Artificial Sequence
  Antisense compound
gaactggaaacttatcagca

SEQ ID NO: 18940 - DNA, 20 bp, Artificial Sequence
  Antisense compound
agaactggaaacttatcagc

SEQ ID NO: 18941 - DNA, 20 bp, Artificial Sequence
  Antisense compound
aagaactggaaacttatcag

SEQ ID NO: 18942 - DNA, 20 bp, Artificial Sequence
  Antisense compound
gaagaactggaaacttatca

SEQ ID NO: 18943 - DNA, 20 bp, Artificial Sequence
  Antisense compound
tgaagaactggaaacttatc

SEQ ID NO: 18944 - DNA, 20 bp, Artificial Sequence
  Antisense compound
atgaagaactggaaacttat

SEQ ID NO: 18945 - DNA, 20 bp, Artificial Sequence
  Antisense compound
catgaagaactggaaactta

SEQ ID NO: 18946 - DNA, 20 bp, Artificial Sequence
  Antisense compound
tcatgaagaactggaaactt

SEQ ID NO: 18947 - DNA, 20 bp, Artificial Sequence
  Antisense compound
gtcatgaagaactggaaact

SEQ ID NO: 18948 - DNA, 20 bp, Artificial Sequence
  Antisense compound
tgtcatgaagaactggaaac

SEQ ID NO: 18949 - DNA, 20 bp, Artificial Sequence
  Antisense compound
atgtcatgaagaactggaaa

SEQ ID NO: 18950 - DNA, 20 bp, Artificial Sequence
  Antisense compound
aatgtcatgaagaactggaa

SEQ ID NO: 18951 - DNA, 20 bp, Artificial Sequence
  Antisense compound
caatgtcatgaagaactgga

SEQ ID NO: 18952 - DNA, 20 bp, Artificial Sequence
  Antisense compound
ccaatgtcatgaagaactgg

SEQ ID NO: 18953 - DNA, 20 bp, Artificial Sequence
  Antisense compound
tccaatgtcatgaagaactg

SEQ ID NO: 18954 - DNA, 20 bp, Artificial Sequence
  Antisense compound
ttccaatgtcatgaagaact

SEQ ID NO: 18955 - DNA, 20 bp, Artificial Sequence
  Antisense compound
tttccaatgtcatgaagaac

SEQ ID NO: 18956 - DNA, 20 bp, Artificial Sequence
  Antisense compound
atttccaatgtcatgaagaa

SEQ ID NO: 18957 - DNA, 20 bp, Artificial Sequence
  Antisense compound
gatttccaatgtcatgaaga

SEQ ID NO: 18958 - DNA, 20 bp, Artificial Sequence
  Antisense compound
ggatttccaatgtcatgaag

SEQ ID NO: 18959 - DNA, 20 bp, Artificial Sequence
  Antisense compound
tggatttccaatgtcatgaa

SEQ ID NO: 18960 - DNA, 20 bp, Artificial Sequence
  Antisense compound
ttggatttccaatgtcatga

SEQ ID NO: 18961 - DNA, 20 bp, Artificial Sequence
  Antisense compound
tttggatttccaatgtcatg

SEQ ID NO: 18962 - DNA, 20 bp, Artificial Sequence
  Antisense compound
ctttggatttccaatgtcat

SEQ ID NO: 18963 - DNA, 20 bp, Artificial Sequence
  Antisense compound
cctttggatttccaatgtca

SEQ ID NO: 18964 - DNA, 20 bp, Artificial Sequence
  Antisense compound
gcctttggatttccaatgtc

SEQ ID NO: 18965 - DNA, 20 bp, Artificial Sequence
  Antisense compound
agcctttggatttccaatgt

SEQ ID NO: 18966 - DNA, 20 bp, Artificial Sequence
  Antisense compound
tagcctttggatttccaatg

SEQ ID NO: 18967 - DNA, 20 bp, Artificial Sequence
  Antisense compound
atagcctttggatttccaat

SEQ ID NO: 18968 - DNA, 20 bp, Artificial Sequence
  Antisense compound
gatagcctttggatttccaa

SEQ ID NO: 18969 - DNA, 20 bp, Artificial Sequence
  Antisense compound
tgatagcctttggatttcca

SEQ ID NO: 18970 - DNA, 20 bp, Artificial Sequence
  Antisense compound
ttgatagcctttggatttcc

SEQ ID NO: 18971 - DNA, 20 bp, Artificial Sequence
  Antisense compound
cttgatagcctttggatttc

SEQ ID NO: 18972 - DNA, 20 bp, Artificial Sequence
  Antisense compound
acttgatagcctttggattt

SEQ ID NO: 18973 - DNA, 20 bp, Artificial Sequence
  Antisense compound
cacttgatagcctttggatt

SEQ ID NO: 18974 - DNA, 20 bp, Artificial Sequence
  Antisense compound
acacttgatagcctttggat

SEQ ID NO: 18975 - DNA, 20 bp, Artificial Sequence
  Antisense compound
cacacttgatagcctttgga

SEQ ID NO: 18976 - DNA, 20 bp, Artificial Sequence
  Antisense compound
acacacttgatagcctttgg

SEQ ID NO: 18977 - DNA, 20 bp, Artificial Sequence
  Antisense compound
cacacacttgatagcctttg

SEQ ID NO: 18978 - DNA, 20 bp, Artificial Sequence
  Antisense compound
gcacacacttgatagccttt

SEQ ID NO: 18979 - DNA, 20 bp, Artificial Sequence
  Antisense compound
ggcacacacttgatagcctt

SEQ ID NO: 18980 - DNA, 20 bp, Artificial Sequence
  Antisense compound
aggcacacacttgatagcct

SEQ ID NO: 18981 - DNA, 20 bp, Artificial Sequence
  Antisense compound
gaggcacacacttgatagcc

SEQ ID NO: 18982 - DNA, 20 bp, Artificial Sequence
  Antisense compound
tgaggcacacacttgatagc

SEQ ID NO: 18983 - DNA, 20 bp, Artificial Sequence
  Antisense compound
ctgaggcacacacttgatag

SEQ ID NO: 18984 - DNA, 20 bp, Artificial Sequence
  Antisense compound
cctgaggcacacacttgata

SEQ ID NO: 18985 - DNA, 20 bp, Artificial Sequence
  Antisense compound
gcctgaggcacacacttgat

SEQ ID NO: 18986 - DNA, 20 bp, Artificial Sequence
  Antisense compound
agcctgaggcacacacttga

SEQ ID NO: 18987 - DNA, 20 bp, Artificial Sequence
  Antisense compound
cagcctgaggcacacacttg

SEQ ID NO: 18988 - DNA, 20 bp, Artificial Sequence
  Antisense compound
tcagcctgaggcacacactt

SEQ ID NO: 18989 - DNA, 20 bp, Artificial Sequence
  Antisense compound
ttcagcctgaggcacacact

SEQ ID NO: 18990 - DNA, 20 bp, Artificial Sequence
  Antisense compound
cttcagcctgaggcacacac

SEQ ID NO: 18991 - DNA, 20 bp, Artificial Sequence
  Antisense compound
acttcagcctgaggcacaca

SEQ ID NO: 18992 - DNA, 20 bp, Artificial Sequence
  Antisense compound
tacttcagcctgaggcacac

SEQ ID NO: 18993 - DNA, 20 bp, Artificial Sequence
  Antisense compound
ctacttcagcctgaggcaca

SEQ ID NO: 18994 - DNA, 20 bp, Artificial Sequence
  Antisense compound
tctacttcagcctgaggcac

SEQ ID NO: 18995 - DNA, 20 bp, Artificial Sequence
  Antisense compound
ttctacttcagcctgaggca

SEQ ID NO: 18996 - DNA, 20 bp, Artificial Sequence
  Antisense compound
attctacttcagcctgaggc

SEQ ID NO: 18997 - DNA, 20 bp, Artificial Sequence
  Antisense compound
cattctacttcagcctgagg

SEQ ID NO: 18998 - DNA, 20 bp, Artificial Sequence
  Antisense compound
ccattctacttcagcctgag

SEQ ID NO: 18999 - DNA, 20 bp, Artificial Sequence
  Antisense compound
tccattctacttcagcctga

SEQ ID NO: 19000 - DNA, 20 bp, Artificial Sequence
  Antisense compound
ttccattctacttcagcctg

SEQ ID NO: 19001 - DNA, 20 bp, Artificial Sequence
  Antisense compound
cttccattctacttcagcct

SEQ ID NO: 19002 - DNA, 20 bp, Artificial Sequence
  Antisense compound
acttccattctacttcagcc

SEQ ID NO: 19003 - DNA, 20 bp, Artificial Sequence
  Antisense compound
aacttccattctacttcagc

SEQ ID NO: 19004 - DNA, 20 bp, Artificial Sequence
  Antisense compound
gaacttccattctacttcag

SEQ ID NO: 19005 - DNA, 20 bp, Artificial Sequence
  Antisense compound
agaacttccattctacttca

SEQ ID NO: 19006 - DNA, 20 bp, Artificial Sequence
  Antisense compound
tagaacttccattctacttc

SEQ ID NO: 19007 - DNA, 20 bp, Artificial Sequence
  Antisense compound
gtagaacttccattctactt

SEQ ID NO: 19008 - DNA, 20 bp, Artificial Sequence
  Antisense compound
cgtagaacttccattctact

SEQ ID NO: 19009 - DNA, 20 bp, Artificial Sequence
  Antisense compound
tcgtagaacttccattctac

SEQ ID NO: 19010 - DNA, 20 bp, Artificial Sequence
  Antisense compound
atcgtagaacttccattcta

SEQ ID NO: 19011 - DNA, 20 bp, Artificial Sequence
  Antisense compound
catcgtagaacttccattct

SEQ ID NO: 19012 - DNA, 20 bp, Artificial Sequence
  Antisense compound
gcatcgtagaacttccattc

SEQ ID NO: 19013 - DNA, 20 bp, Artificial Sequence
  Antisense compound
agcatcgtagaacttccatt

SEQ ID NO: 19014 - DNA, 20 bp, Artificial Sequence
  Antisense compound
gagcatcgtagaacttccat

SEQ ID NO: 19015 - DNA, 20 bp, Artificial Sequence
  Antisense compound
tgagcatcgtagaacttcca

SEQ ID NO: 19016 - DNA, 20 bp, Artificial Sequence
  Antisense compound
ctgagcatcgtagaacttcc

SEQ ID NO: 19017 - DNA, 20 bp, Artificial Sequence
  Antisense compound
gctgagcatcgtagaacttc

SEQ ID NO: 19018 - DNA, 20 bp, Artificial Sequence
  Antisense compound
ggctgagcatcgtagaactt

SEQ ID NO: 19019 - DNA, 20 bp, Artificial Sequence
  Antisense compound
tggctgagcatcgtagaact

SEQ ID NO: 19020 - DNA, 20 bp, Artificial Sequence
  Antisense compound
atggctgagcatcgtagaac

SEQ ID NO: 19021 - DNA, 20 bp, Artificial Sequence
  Antisense compound
catggctgagcatcgtagaa

SEQ ID NO: 19022 - DNA, 20 bp, Artificial Sequence
  Antisense compound
acatggctgagcatcgtaga

SEQ ID NO: 19023 - DNA, 20 bp, Artificial Sequence
  Antisense compound
tacatggctgagcatcgtag

SEQ ID NO: 19024 - DNA, 20 bp, Artificial Sequence
  Antisense compound
ctacatggctgagcatcgta

SEQ ID NO: 19025 - DNA, 20 bp, Artificial Sequence
  Antisense compound
actacatggctgagcatcgt

SEQ ID NO: 19026 - DNA, 20 bp, Artificial Sequence
  Antisense compound
cactacatggctgagcatcg

SEQ ID NO: 19027 - DNA, 20 bp, Artificial Sequence
  Antisense compound
tcactacatggctgagcatc

SEQ ID NO: 19028 - DNA, 20 bp, Artificial Sequence
  Antisense compound
gtcactacatggctgagcat

SEQ ID NO: 19029 - DNA, 20 bp, Artificial Sequence
  Antisense compound
tgtcactacatggctgagca

SEQ ID NO: 19030 - DNA, 20 bp, Artificial Sequence
  Antisense compound
ttgtcactacatggctgagc

SEQ ID NO: 19031 - DNA, 20 bp, Artificial Sequence
  Antisense compound
tttgtcactacatggctgag

SEQ ID NO: 19032 - DNA, 20 bp, Artificial Sequence
  Antisense compound
ctttgtcactacatggctga

SEQ ID NO: 19033 - DNA, 20 bp, Artificial Sequence
  Antisense compound
gctttgtcactacatggctg

SEQ ID NO: 19034 - DNA, 20 bp, Artificial Sequence
  Antisense compound
agctttgtcactacatggct

SEQ ID NO: 19035 - DNA, 20 bp, Artificial Sequence
  Antisense compound
aagctttgtcactacatggc

SEQ ID NO: 19036 - DNA, 20 bp, Artificial Sequence
  Antisense compound
taagctttgtcactacatgg

SEQ ID NO: 19037 - DNA, 20 bp, Artificial Sequence
  Antisense compound
gtaagctttgtcactacatg

SEQ ID NO: 19038 - DNA, 20 bp, Artificial Sequence
  Antisense compound
tgtaagctttgtcactacat

SEQ ID NO: 19039 - DNA, 20 bp, Artificial Sequence
  Antisense compound
ttgtaagctttgtcactaca

SEQ ID NO: 19040 - DNA, 20 bp, Artificial Sequence
  Antisense compound
tttgtaagctttgtcactac

SEQ ID NO: 19041 - DNA, 20 bp, Artificial Sequence
  Antisense compound
ttttgtaagctttgtcacta

SEQ ID NO: 19042 - DNA, 20 bp, Artificial Sequence
  Antisense compound
attttgtaagctttgtcact

SEQ ID NO: 19043 - DNA, 20 bp, Artificial Sequence
  Antisense compound
tattttgtaagctttgtcac

SEQ ID NO: 19044 - DNA, 20 bp, Artificial Sequence
  Antisense compound
ctattttgtaagctttgtca

SEQ ID NO: 19045 - DNA, 20 bp, Artificial Sequence
  Antisense compound
tctattttgtaagctttgtc

SEQ ID NO: 19046 - DNA, 20 bp, Artificial Sequence
  Antisense compound
ctctattttgtaagctttgt

SEQ ID NO: 19047 - DNA, 20 bp, Artificial Sequence
  Antisense compound
cctctattttgtaagctttg

SEQ ID NO: 19048 - DNA, 20 bp, Artificial Sequence
  Antisense compound
tcctctattttgtaagcttt

SEQ ID NO: 19049 - DNA, 20 bp, Artificial Sequence
  Antisense compound
ttcctctattttgtaagctt

SEQ ID NO: 19050 - DNA, 20 bp, Artificial Sequence
  Antisense compound
gttcctctattttgtaagct

SEQ ID NO: 19051 - DNA, 20 bp, Artificial Sequence
  Antisense compound
agttcctctattttgtaagc

SEQ ID NO: 19052 - DNA, 20 bp, Artificial Sequence
  Antisense compound
gagttcctctattttgtaag

SEQ ID NO: 19053 - DNA, 20 bp, Artificial Sequence
  Antisense compound
agagttcctctattttgtaa

SEQ ID NO: 19054 - DNA, 20 bp, Artificial Sequence
  Antisense compound
aagagttcctctattttgta

SEQ ID NO: 19055 - DNA, 20 bp, Artificial Sequence
  Antisense compound
gaagagttcctctattttgt

SEQ ID NO: 19056 - DNA, 20 bp, Artificial Sequence
  Antisense compound
agaagagttcctctattttg

SEQ ID NO: 19057 - DNA, 20 bp, Artificial Sequence
  Antisense compound
tagaagagttcctctatttt

SEQ ID NO: 19058 - DNA, 20 bp, Artificial Sequence
  Antisense compound
atagaagagttcctctattt

SEQ ID NO: 19059 - DNA, 20 bp, Artificial Sequence
  Antisense compound
aatagaagagttcctctatt

SEQ ID NO: 19060 - DNA, 20 bp, Artificial Sequence
  Antisense compound
gaatagaagagttcctctat

SEQ ID NO: 19061 - DNA, 20 bp, Artificial Sequence
  Antisense compound
agaatagaagagttcctcta

SEQ ID NO: 19062 - DNA, 20 bp, Artificial Sequence
  Antisense compound
aagaatagaagagttcctct

SEQ ID NO: 19063 - DNA, 20 bp, Artificial Sequence
  Antisense compound
taagaatagaagagttcctc

SEQ ID NO: 19064 - DNA, 20 bp, Artificial Sequence
  Antisense compound
ataagaatagaagagttcct

SEQ ID NO: 19065 - DNA, 20 bp, Artificial Sequence
  Antisense compound
cataagaatagaagagttcc

SEQ ID NO: 19066 - DNA, 20 bp, Artificial Sequence
  Antisense compound
gcataagaatagaagagttc

SEQ ID NO: 19067 - DNA, 20 bp, Artificial Sequence
  Antisense compound
agcataagaatagaagagtt

SEQ ID NO: 19068 - DNA, 20 bp, Artificial Sequence
  Antisense compound
tagcataagaatagaagagt

SEQ ID NO: 19069 - DNA, 20 bp, Artificial Sequence
  Antisense compound
gtagcataagaatagaagag

SEQ ID NO: 19070 - DNA, 20 bp, Artificial Sequence
  Antisense compound
tgtagcataagaatagaaga

SEQ ID NO: 19071 - DNA, 20 bp, Artificial Sequence
  Antisense compound
gtgtagcataagaatagaag

SEQ ID NO: 19072 - DNA, 20 bp, Artificial Sequence
  Antisense compound
tgtgtagcataagaatagaa

SEQ ID NO: 19073 - DNA, 20 bp, Artificial Sequence
  Antisense compound
atgtgtagcataagaataga

SEQ ID NO: 19074 - DNA, 20 bp, Artificial Sequence
  Antisense compound
gatgtgtagcataagaatag

SEQ ID NO: 19075 - DNA, 20 bp, Artificial Sequence
  Antisense compound
tgatgtgtagcataagaata

SEQ ID NO: 19076 - DNA, 20 bp, Artificial Sequence
  Antisense compound
gtgatgtgtagcataagaat

SEQ ID NO: 19077 - DNA, 20 bp, Artificial Sequence
  Antisense compound
cgtgatgtgtagcataagaa

SEQ ID NO: 19078 - DNA, 20 bp, Artificial Sequence
  Antisense compound
tcgtgatgtgtagcataaga

SEQ ID NO: 19079 - DNA, 20 bp, Artificial Sequence
  Antisense compound
atcgtgatgtgtagcataag

SEQ ID NO: 19080 - DNA, 20 bp, Artificial Sequence
  Antisense compound
tatcgtgatgtgtagcataa

SEQ ID NO: 19081 - DNA, 20 bp, Artificial Sequence
  Antisense compound
ttatcgtgatgtgtagcata

SEQ ID NO: 19082 - DNA, 20 bp, Artificial Sequence
  Antisense compound
tttatcgtgatgtgtagcat

SEQ ID NO: 19083 - DNA, 20 bp, Artificial Sequence
  Antisense compound
atttatcgtgatgtgtagca

SEQ ID NO: 19084 - DNA, 20 bp, Artificial Sequence
  Antisense compound
aatttatcgtgatgtgtagc

SEQ ID NO: 19085 - DNA, 20 bp, Artificial Sequence
  Antisense compound
gaatttatcgtgatgtgtag

SEQ ID NO: 19086 - DNA, 20 bp, Artificial Sequence
  Antisense compound
tgaatttatcgtgatgtgta

SEQ ID NO: 19087 - DNA, 20 bp, Artificial Sequence
  Antisense compound
gtgaatttatcgtgatgtgt

SEQ ID NO: 19088 - DNA, 20 bp, Artificial Sequence
  Antisense compound
agtgaatttatcgtgatgtg

SEQ ID NO: 19089 - DNA, 20 bp, Artificial Sequence
  Antisense compound
cagtgaatttatcgtgatgt

SEQ ID NO: 19090 - DNA, 20 bp, Artificial Sequence
  Antisense compound
tcagtgaatttatcgtgatg

SEQ ID NO: 19091 - DNA, 20 bp, Artificial Sequence
  Antisense compound
atcagtgaatttatcgtgat

SEQ ID NO: 19092 - DNA, 20 bp, Artificial Sequence
  Antisense compound
catcagtgaatttatcgtga

SEQ ID NO: 19093 - DNA, 20 bp, Artificial Sequence
  Antisense compound
ccatcagtgaatttatcgtg

SEQ ID NO: 19094 - DNA, 20 bp, Artificial Sequence
  Antisense compound
accatcagtgaatttatcgt

SEQ ID NO: 19095 - DNA, 20 bp, Artificial Sequence
  Antisense compound
caccatcagtgaatttatcg

SEQ ID NO: 19096 - DNA, 20 bp, Artificial Sequence
  Antisense compound
acaccatcagtgaatttatc

SEQ ID NO: 19097 - DNA, 20 bp, Artificial Sequence
  Antisense compound
aacaccatcagtgaatttat

SEQ ID NO: 19098 - DNA, 20 bp, Artificial Sequence
  Antisense compound
aaacaccatcagtgaattta

SEQ ID NO: 19099 - DNA, 20 bp, Artificial Sequence
  Antisense compound
caaacaccatcagtgaattt

SEQ ID NO: 19100 - DNA, 20 bp, Artificial Sequence
  Antisense compound
acaaacaccatcagtgaatt

SEQ ID NO: 19101 - DNA, 20 bp, Artificial Sequence
  Antisense compound
aacaaacaccatcagtgaat

SEQ ID NO: 19102 - DNA, 20 bp, Artificial Sequence
  Antisense compound
aaacaaacaccatcagtgaa

SEQ ID NO: 19103 - DNA, 20 bp, Artificial Sequence
  Antisense compound
caaacaaacaccatcagtga

SEQ ID NO: 19104 - DNA, 20 bp, Artificial Sequence
  Antisense compound
acaaacaaacaccatcagtg

SEQ ID NO: 19105 - DNA, 20 bp, Artificial Sequence
  Antisense compound
aacaaacaaacaccatcagt

SEQ ID NO: 19106 - DNA, 20 bp, Artificial Sequence
  Antisense compound
aaacaaacaaacaccatcag

SEQ ID NO: 19107 - DNA, 20 bp, Artificial Sequence
  Antisense compound
aaaacaaacaaacaccatca

SEQ ID NO: 19108 - DNA, 20 bp, Artificial Sequence
  Antisense compound
caaaacaaacaaacaccatc

SEQ ID NO: 19109 - DNA, 20 bp, Artificial Sequence
  Antisense compound
ccaaaacaaacaaacaccat

SEQ ID NO: 19110 - DNA, 20 bp, Artificial Sequence
  Antisense compound
tccaaaacaaacaaacacca

SEQ ID NO: 19111 - DNA, 20 bp, Artificial Sequence
  Antisense compound
ttccaaaacaaacaaacacc

SEQ ID NO: 19112 - DNA, 20 bp, Artificial Sequence
  Antisense compound
attccaaaacaaacaaacac

SEQ ID NO: 19113 - DNA, 20 bp, Artificial Sequence
  Antisense compound
aattccaaaacaaacaaaca

SEQ ID NO: 19114 - DNA, 20 bp, Artificial Sequence
  Antisense compound
caattccaaaacaaacaaac

SEQ ID NO: 19115 - DNA, 20 bp, Artificial Sequence
  Antisense compound
acaattccaaaacaaacaaa

SEQ ID NO: 19116 - DNA, 20 bp, Artificial Sequence
  Antisense compound
tacaattccaaaacaaacaa

SEQ ID NO: 19117 - DNA, 20 bp, Artificial Sequence
  Antisense compound
ttacaattccaaaacaaaca

SEQ ID NO: 19118 - DNA, 20 bp, Artificial Sequence
  Antisense compound
gttacaattccaaaacaaac

SEQ ID NO: 19119 - DNA, 20 bp, Artificial Sequence
  Antisense compound
cgttacaattccaaaacaaa

SEQ ID NO: 19120 - DNA, 20 bp, Artificial Sequence
  Antisense compound
acgttacaattccaaaacaa

SEQ ID NO: 19121 - DNA, 20 bp, Artificial Sequence
  Antisense compound
aacgttacaattccaaaaca

SEQ ID NO: 19122 - DNA, 20 bp, Artificial Sequence
  Antisense compound
caacgttacaattccaaaac

SEQ ID NO: 19123 - DNA, 20 bp, Artificial Sequence
  Antisense compound
tcaacgttacaattccaaaa

SEQ ID NO: 19124 - DNA, 20 bp, Artificial Sequence
  Antisense compound
atcaacgttacaattccaaa

SEQ ID NO: 19125 - DNA, 20 bp, Artificial Sequence
  Antisense compound
gatcaacgttacaattccaa

SEQ ID NO: 19126 - DNA, 20 bp, Artificial Sequence
  Antisense compound
cgatcaacgttacaattcca

SEQ ID NO: 19127 - DNA, 20 bp, Artificial Sequence
  Antisense compound
acgatcaacgttacaattcc

SEQ ID NO: 19128 - DNA, 20 bp, Artificial Sequence
  Antisense compound
aacgatcaacgttacaattc

SEQ ID NO: 19129 - DNA, 20 bp, Artificial Sequence
  Antisense compound
taacgatcaacgttacaatt

SEQ ID NO: 19130 - DNA, 20 bp, Artificial Sequence
  Antisense compound
gtaacgatcaacgttacaat

SEQ ID NO: 19131 - DNA, 20 bp, Artificial Sequence
  Antisense compound
ggtaacgatcaacgttacaa

SEQ ID NO: 19132 - DNA, 20 bp, Artificial Sequence
  Antisense compound
gggtaacgatcaacgttaca

SEQ ID NO: 19133 - DNA, 20 bp, Artificial Sequence
  Antisense compound
tgggtaacgatcaacgttac

SEQ ID NO: 19134 - DNA, 20 bp, Artificial Sequence
  Antisense compound
ctgggtaacgatcaacgtta

SEQ ID NO: 19135 - DNA, 20 bp, Artificial Sequence
  Antisense compound
gctgggtaacgatcaacgtt

SEQ ID NO: 19136 - DNA, 20 bp, Artificial Sequence
  Antisense compound
ggctgggtaacgatcaacgt

SEQ ID NO: 19137 - DNA, 20 bp, Artificial Sequence
  Antisense compound
tggctgggtaacgatcaacg

SEQ ID NO: 19138 - DNA, 20 bp, Artificial Sequence
  Antisense compound
ttggctgggtaacgatcaac

SEQ ID NO: 19139 - DNA, 20 bp, Artificial Sequence
  Antisense compound
attggctgggtaacgatcaa

SEQ ID NO: 19140 - DNA, 20 bp, Artificial Sequence
  Antisense compound
cattggctgggtaacgatca

SEQ ID NO: 19141 - DNA, 20 bp, Artificial Sequence
  Antisense compound
gcattggctgggtaacgatc

SEQ ID NO: 19142 - DNA, 20 bp, Artificial Sequence
  Antisense compound
tgcattggctgggtaacgat

SEQ ID NO: 19143 - DNA, 20 bp, Artificial Sequence
  Antisense compound
ttgcattggctgggtaacga

SEQ ID NO: 19144 - DNA, 20 bp, Artificial Sequence
  Antisense compound
attgcattggctgggtaacg

SEQ ID NO: 19145 - DNA, 20 bp, Artificial Sequence
  Antisense compound
aattgcattggctgggtaac

SEQ ID NO: 19146 - DNA, 20 bp, Artificial Sequence
  Antisense compound
caattgcattggctgggtaa

SEQ ID NO: 19147 - DNA, 20 bp, Artificial Sequence
  Antisense compound
acaattgcattggctgggta

SEQ ID NO: 19148 - DNA, 20 bp, Artificial Sequence
  Antisense compound
cacaattgcattggctgggt

SEQ ID NO: 19149 - DNA, 20 bp, Artificial Sequence
  Antisense compound
acacaattgcattggctggg

SEQ ID NO: 19150 - DNA, 20 bp, Artificial Sequence
  Antisense compound
cacacaattgcattggctgg

SEQ ID NO: 19151 - DNA, 20 bp, Artificial Sequence
  Antisense compound
acacacaattgcattggctg

SEQ ID NO: 19152 - DNA, 20 bp, Artificial Sequence
  Antisense compound
tacacacaattgcattggct

SEQ ID NO: 19153 - DNA, 20 bp, Artificial Sequence
  Antisense compound
ctacacacaattgcattggc

SEQ ID NO: 19154 - DNA, 20 bp, Artificial Sequence
  Antisense compound
cctacacacaattgcattgg

SEQ ID NO: 19155 - DNA, 20 bp, Artificial Sequence
  Antisense compound
acctacacacaattgcattg

SEQ ID NO: 19156 - DNA, 20 bp, Artificial Sequence
  Antisense compound
aacctacacacaattgcatt

SEQ ID NO: 19157 - DNA, 20 bp, Artificial Sequence
  Antisense compound
aaacctacacacaattgcat

SEQ ID NO: 19158 - DNA, 20 bp, Artificial Sequence
  Antisense compound
caaacctacacacaattgca

SEQ ID NO: 19159 - DNA, 20 bp, Artificial Sequence
  Antisense compound
tcaaacctacacacaattgc

SEQ ID NO: 19160 - DNA, 20 bp, Artificial Sequence
  Antisense compound
gtcaaacctacacacaattg

SEQ ID NO: 19161 - DNA, 20 bp, Artificial Sequence
  Antisense compound
tgtcaaacctacacacaatt

SEQ ID NO: 19162 - DNA, 20 bp, Artificial Sequence
  Antisense compound
gtgtcaaacctacacacaat

SEQ ID NO: 19163 - DNA, 20 bp, Artificial Sequence
  Antisense compound
tgtgtcaaacctacacacaa

SEQ ID NO: 19164 - DNA, 20 bp, Artificial Sequence
  Antisense compound
ttgtgtcaaacctacacaca

SEQ ID NO: 19165 - DNA, 20 bp, Artificial Sequence
  Antisense compound
cttgtgtcaaacctacacac

SEQ ID NO: 19166 - DNA, 20 bp, Artificial Sequence
  Antisense compound
tcttgtgtcaaacctacaca

SEQ ID NO: 19167 - DNA, 20 bp, Artificial Sequence
  Antisense compound
ctcttgtgtcaaacctacac

SEQ ID NO: 19168 - DNA, 20 bp, Artificial Sequence
  Antisense compound
actcttgtgtcaaacctaca

SEQ ID NO: 19169 - DNA, 20 bp, Artificial Sequence
  Antisense compound
gactcttgtgtcaaacctac

SEQ ID NO: 19170 - DNA, 20 bp, Artificial Sequence
  Antisense compound
agactcttgtgtcaaaccta

SEQ ID NO: 19171 - DNA, 20 bp, Artificial Sequence
  Antisense compound
aagactcttgtgtcaaacct

SEQ ID NO: 19172 - DNA, 20 bp, Artificial Sequence
  Antisense compound
caagactcttgtgtcaaacc

SEQ ID NO: 19173 - DNA, 20 bp, Artificial Sequence
  Antisense compound
acaagactcttgtgtcaaac

SEQ ID NO: 19174 - DNA, 20 bp, Artificial Sequence
  Antisense compound
gacaagactcttgtgtcaaa

SEQ ID NO: 19175 - DNA, 20 bp, Artificial Sequence
  Antisense compound
tgacaagactcttgtgtcaa

SEQ ID NO: 19176 - DNA, 20 bp, Artificial Sequence
  Antisense compound
ttgacaagactcttgtgtca

SEQ ID NO: 19177 - DNA, 20 bp, Artificial Sequence
  Antisense compound
tttgacaagactcttgtgtc

SEQ ID NO: 19178 - DNA, 20 bp, Artificial Sequence
  Antisense compound
gtttgacaagactcttgtgt

SEQ ID NO: 19179 - DNA, 20 bp, Artificial Sequence
  Antisense compound
agtttgacaagactcttgtg

SEQ ID NO: 19180 - DNA, 20 bp, Artificial Sequence
  Antisense compound
aagtttgacaagactcttgt

SEQ ID NO: 19181 - DNA, 20 bp, Artificial Sequence
  Antisense compound
caagtttgacaagactcttg

SEQ ID NO: 19182 - DNA, 20 bp, Artificial Sequence
  Antisense compound
tcaagtttgacaagactctt

SEQ ID NO: 19183 - DNA, 20 bp, Artificial Sequence
  Antisense compound
ttcaagtttgacaagactct

SEQ ID NO: 19184 - DNA, 20 bp, Artificial Sequence
  Antisense compound
gttcaagtttgacaagactc

SEQ ID NO: 19185 - DNA, 20 bp, Artificial Sequence
  Antisense compound
agttcaagtttgacaagact

SEQ ID NO: 19186 - DNA, 20 bp, Artificial Sequence
  Antisense compound
aagttcaagtttgacaagac

SEQ ID NO: 19187 - DNA, 20 bp, Artificial Sequence
  Antisense compound
taagttcaagtttgacaaga

SEQ ID NO: 19188 - DNA, 20 bp, Artificial Sequence
  Antisense compound
gtaagttcaagtttgacaag

SEQ ID NO: 19189 - DNA, 20 bp, Artificial Sequence
  Antisense compound
ggtaagttcaagtttgacaa

SEQ ID NO: 19190 - DNA, 20 bp, Artificial Sequence
  Antisense compound
tggtaagttcaagtttgaca

SEQ ID NO: 19191 - DNA, 20 bp, Artificial Sequence
  Antisense compound
ctggtaagttcaagtttgac

SEQ ID NO: 19192 - DNA, 20 bp, Artificial Sequence
  Antisense compound
cctggtaagttcaagtttga

SEQ ID NO: 19193 - DNA, 20 bp, Artificial Sequence
  Antisense compound
gcctggtaagttcaagtttg

SEQ ID NO: 19194 - DNA, 20 bp, Artificial Sequence
  Antisense compound
agcctggtaagttcaagttt

SEQ ID NO: 19195 - DNA, 20 bp, Artificial Sequence
  Antisense compound
cagcctggtaagttcaagtt

SEQ ID NO: 19196 - DNA, 20 bp, Artificial Sequence
  Antisense compound
acagcctggtaagttcaagt

SEQ ID NO: 19197 - DNA, 20 bp, Artificial Sequence
  Antisense compound
cacagcctggtaagttcaag

SEQ ID NO: 19198 - DNA, 20 bp, Artificial Sequence
  Antisense compound
tcacagcctggtaagttcaa

SEQ ID NO: 19199 - DNA, 20 bp, Artificial Sequence
  Antisense compound
atcacagcctggtaagttca

SEQ ID NO: 19200 - DNA, 20 bp, Artificial Sequence
  Antisense compound
catcacagcctggtaagttc

SEQ ID NO: 19201 - DNA, 20 bp, Artificial Sequence
  Antisense compound
ccatcacagcctggtaagtt

SEQ ID NO: 19202 - DNA, 20 bp, Artificial Sequence
  Antisense compound
accatcacagcctggtaagt

SEQ ID NO: 19203 - DNA, 20 bp, Artificial Sequence
  Antisense compound
caccatcacagcctggtaag

SEQ ID NO: 19204 - DNA, 20 bp, Artificial Sequence
  Antisense compound
ccaccatcacagcctggtaa

SEQ ID NO: 19205 - DNA, 20 bp, Artificial Sequence
  Antisense compound
accaccatcacagcctggta

SEQ ID NO: 19206 - DNA, 20 bp, Artificial Sequence
  Antisense compound
taccaccatcacagcctggt

SEQ ID NO: 19207 - DNA, 20 bp, Artificial Sequence
  Antisense compound
ctaccaccatcacagcctgg

SEQ ID NO: 19208 - DNA, 20 bp, Artificial Sequence
  Antisense compound
actaccaccatcacagcctg

SEQ ID NO: 19209 - DNA, 20 bp, Artificial Sequence
  Antisense compound
aactaccaccatcacagcct

SEQ ID NO: 19210 - DNA, 20 bp, Artificial Sequence
  Antisense compound
aaactaccaccatcacagcc

SEQ ID NO: 19211 - DNA, 20 bp, Artificial Sequence
  Antisense compound
caaactaccaccatcacagc

SEQ ID NO: 19212 - DNA, 20 bp, Artificial Sequence
  Antisense compound
acaaactaccaccatcacag

SEQ ID NO: 19213 - DNA, 20 bp, Artificial Sequence
  Antisense compound
tacaaactaccaccatcaca

SEQ ID NO: 19214 - DNA, 20 bp, Artificial Sequence
  Antisense compound
atacaaactaccaccatcac

SEQ ID NO: 19215 - DNA, 20 bp, Artificial Sequence
  Antisense compound
catacaaactaccaccatca

SEQ ID NO: 19216 - DNA, 20 bp, Artificial Sequence
  Antisense compound
acatacaaactaccaccatc

SEQ ID NO: 19217 - DNA, 20 bp, Artificial Sequence
  Antisense compound
cacatacaaactaccaccat

SEQ ID NO: 19218 - DNA, 20 bp, Artificial Sequence
  Antisense compound
tcacatacaaactaccacca

SEQ ID NO: 19219 - DNA, 20 bp, Artificial Sequence
  Antisense compound
ttcacatacaaactaccacc

SEQ ID NO: 19220 - DNA, 20 bp, Artificial Sequence
  Antisense compound
attcacatacaaactaccac

SEQ ID NO: 19221 - DNA, 20 bp, Artificial Sequence
  Antisense compound
tattcacatacaaactacca

SEQ ID NO: 19222 - DNA, 20 bp, Artificial Sequence
  Antisense compound
ttattcacatacaaactacc

SEQ ID NO: 19223 - DNA, 20 bp, Artificial Sequence
  Antisense compound
cttattcacatacaaactac

SEQ ID NO: 19224 - DNA, 20 bp, Artificial Sequence
  Antisense compound
gcttattcacatacaaacta

SEQ ID NO: 19225 - DNA, 20 bp, Artificial Sequence
  Antisense compound
tgcttattcacatacaaact

SEQ ID NO: 19226 - DNA, 20 bp, Artificial Sequence
  Antisense compound
atgcttattcacatacaaac

SEQ ID NO: 19227 - DNA, 20 bp, Artificial Sequence
  Antisense compound
catgcttattcacatacaaa

SEQ ID NO: 19228 - DNA, 20 bp, Artificial Sequence
  Antisense compound
gcatgcttattcacatacaa

SEQ ID NO: 19229 - DNA, 20 bp, Artificial Sequence
  Antisense compound
tgcatgcttattcacataca

SEQ ID NO: 19230 - DNA, 20 bp, Artificial Sequence
  Antisense compound
atgcatgcttattcacatac

SEQ ID NO: 19231 - DNA, 20 bp, Artificial Sequence
  Antisense compound
aatgcatgcttattcacata

SEQ ID NO: 19232 - DNA, 20 bp, Artificial Sequence
  Antisense compound
gaatgcatgcttattcacat

SEQ ID NO: 19233 - DNA, 20 bp, Artificial Sequence
  Antisense compound
ggaatgcatgcttattcaca

SEQ ID NO: 19234 - DNA, 20 bp, Artificial Sequence
  Antisense compound
tggaatgcatgcttattcac

SEQ ID NO: 19235 - DNA, 20 bp, Artificial Sequence
  Antisense compound
gtggaatgcatgcttattca

SEQ ID NO: 19236 - DNA, 20 bp, Artificial Sequence
  Antisense compound
tgtggaatgcatgcttattc

SEQ ID NO: 19237 - DNA, 20 bp, Artificial Sequence
  Antisense compound
gtgtggaatgcatgcttatt

SEQ ID NO: 19238 - DNA, 20 bp, Artificial Sequence
  Antisense compound
agtgtggaatgcatgcttat

SEQ ID NO: 19239 - DNA, 20 bp, Artificial Sequence
  Antisense compound
gagtgtggaatgcatgctta

SEQ ID NO: 19240 - DNA, 20 bp, Artificial Sequence
  Antisense compound
ggagtgtggaatgcatgctt

SEQ ID NO: 19241 - DNA, 20 bp, Artificial Sequence
  Antisense compound
tggagtgtggaatgcatgct

SEQ ID NO: 19242 - DNA, 20 bp, Artificial Sequence
  Antisense compound
ctggagtgtggaatgcatgc

SEQ ID NO: 19243 - DNA, 20 bp, Artificial Sequence
  Antisense compound
gctggagtgtggaatgcatg

SEQ ID NO: 19244 - DNA, 20 bp, Artificial Sequence
  Antisense compound
agctggagtgtggaatgcat

SEQ ID NO: 19245 - DNA, 20 bp, Artificial Sequence
  Antisense compound
aagctggagtgtggaatgca

SEQ ID NO: 19246 - DNA, 20 bp, Artificial Sequence
  Antisense compound
aaagctggagtgtggaatgc

SEQ ID NO: 19247 - DNA, 20 bp, Artificial Sequence
  Antisense compound
gaaagctggagtgtggaatg

SEQ ID NO: 19248 - DNA, 20 bp, Artificial Sequence
  Antisense compound
cgaaagctggagtgtggaat

SEQ ID NO: 19249 - DNA, 20 bp, Artificial Sequence
  Antisense compound
tcgaaagctggagtgtggaa

SEQ ID NO: 19250 - DNA, 20 bp, Artificial Sequence
  Antisense compound
atcgaaagctggagtgtgga

SEQ ID NO: 19251 - DNA, 20 bp, Artificial Sequence
  Antisense compound
tatcgaaagctggagtgtgg

SEQ ID NO: 19252 - DNA, 20 bp, Artificial Sequence
  Antisense compound
ttatcgaaagctggagtgtg

SEQ ID NO: 19253 - DNA, 20 bp, Artificial Sequence
  Antisense compound
tttatcgaaagctggagtgt

SEQ ID NO: 19254 - DNA, 20 bp, Artificial Sequence
  Antisense compound
ttttatcgaaagctggagtg

SEQ ID NO: 19255 - DNA, 20 bp, Artificial Sequence
  Antisense compound
cttttatcgaaagctggagt

SEQ ID NO: 19256 - DNA, 20 bp, Artificial Sequence
  Antisense compound
acttttatcgaaagctggag

SEQ ID NO: 19257 - DNA, 20 bp, Artificial Sequence
  Antisense compound
cacttttatcgaaagctgga

SEQ ID NO: 19258 - DNA, 20 bp, Artificial Sequence
  Antisense compound
gcacttttatcgaaagctgg

SEQ ID NO: 19259 - DNA, 20 bp, Artificial Sequence
  Antisense compound
tgcacttttatcgaaagctg

SEQ ID NO: 19260 - DNA, 20 bp, Artificial Sequence
  Antisense compound
atgcacttttatcgaaagct

SEQ ID NO: 19261 - DNA, 20 bp, Artificial Sequence
  Antisense compound
aatgcacttttatcgaaagc

SEQ ID NO: 19262 - DNA, 20 bp, Artificial Sequence
  Antisense compound
aaatgcacttttatcgaaag

SEQ ID NO: 19263 - DNA, 20 bp, Artificial Sequence
  Antisense compound
taaatgcacttttatcgaaa

SEQ ID NO: 19264 - DNA, 20 bp, Artificial Sequence
  Antisense compound
gtaaatgcacttttatcgaa

SEQ ID NO: 19265 - DNA, 20 bp, Artificial Sequence
  Antisense compound
agtaaatgcacttttatcga

SEQ ID NO: 19266 - DNA, 20 bp, Artificial Sequence
  Antisense compound
tagtaaatgcacttttatcg

SEQ ID NO: 19267 - DNA, 20 bp, Artificial Sequence
  Antisense compound
ttagtaaatgcacttttatc

SEQ ID NO: 19268 - DNA, 20 bp, Artificial Sequence
  Antisense compound
attagtaaatgcacttttat

SEQ ID NO: 19269 - DNA, 20 bp, Artificial Sequence
  Antisense compound
aattagtaaatgcactttta

SEQ ID NO: 19270 - DNA, 20 bp, Artificial Sequence
  Antisense compound
aaattagtaaatgcactttt

SEQ ID NO: 19271 - DNA, 20 bp, Artificial Sequence
  Antisense compound
taaattagtaaatgcacttt

SEQ ID NO: 19272 - DNA, 20 bp, Artificial Sequence
  Antisense compound
ttaaattagtaaatgcactt

SEQ ID NO: 19273 - DNA, 20 bp, Artificial Sequence
  Antisense compound
tttaaattagtaaatgcact

SEQ ID NO: 19274 - DNA, 20 bp, Artificial Sequence
  Antisense compound
ctttaaattagtaaatgcac

SEQ ID NO: 19275 - DNA, 20 bp, Artificial Sequence
  Antisense compound
gctttaaattagtaaatgca

SEQ ID NO: 19276 - DNA, 20 bp, Artificial Sequence
  Antisense compound
tgctttaaattagtaaatgc

SEQ ID NO: 19277 - DNA, 20 bp, Artificial Sequence
  Antisense compound
ttgctttaaattagtaaatg

SEQ ID NO: 19278 - DNA, 20 bp, Artificial Sequence
  Antisense compound
attgctttaaattagtaaat

SEQ ID NO: 19279 - DNA, 20 bp, Artificial Sequence
  Antisense compound
aattgctttaaattagtaaa

SEQ ID NO: 19280 - DNA, 20 bp, Artificial Sequence
  Antisense compound
caattgctttaaattagtaa

SEQ ID NO: 19281 - DNA, 20 bp, Artificial Sequence
  Antisense compound
gcaattgctttaaattagta

SEQ ID NO: 19282 - DNA, 20 bp, Artificial Sequence
  Antisense compound
ggcaattgctttaaattagt

SEQ ID NO: 19283 - DNA, 20 bp, Artificial Sequence
  Antisense compound
aggcaattgctttaaattag

SEQ ID NO: 19284 - DNA, 20 bp, Artificial Sequence
  Antisense compound
aaggcaattgctttaaatta

SEQ ID NO: 19285 - DNA, 20 bp, Artificial Sequence
  Antisense compound
aaaggcaattgctttaaatt

SEQ ID NO: 19286 - DNA, 20 bp, Artificial Sequence
  Antisense compound
gaaaggcaattgctttaaat

SEQ ID NO: 19287 - DNA, 20 bp, Artificial Sequence
  Antisense compound
agaaaggcaattgctttaaa

SEQ ID NO: 19288 - DNA, 20 bp, Artificial Sequence
  Antisense compound
aagaaaggcaattgctttaa

SEQ ID NO: 19289 - DNA, 20 bp, Artificial Sequence
  Antisense compound
aaagaaaggcaattgcttta

SEQ ID NO: 19290 - DNA, 20 bp, Artificial Sequence
  Antisense compound
aaaagaaaggcaattgcttt

SEQ ID NO: 19291 - DNA, 20 bp, Artificial Sequence
  Antisense compound
taaaagaaaggcaattgctt

SEQ ID NO: 19292 - DNA, 20 bp, Artificial Sequence
  Antisense compound
gtaaaagaaaggcaattgct

SEQ ID NO: 19293 - DNA, 20 bp, Artificial Sequence
  Antisense compound
agtaaaagaaaggcaattgc

SEQ ID NO: 19294 - DNA, 20 bp, Artificial Sequence
  Antisense compound
tagtaaaagaaaggcaattg

SEQ ID NO: 19295 - DNA, 20 bp, Artificial Sequence
  Antisense compound
atagtaaaagaaaggcaatt

SEQ ID NO: 19296 - DNA, 20 bp, Artificial Sequence
  Antisense compound
aatagtaaaagaaaggcaat

SEQ ID NO: 19297 - DNA, 20 bp, Artificial Sequence
  Antisense compound
gaatagtaaaagaaaggcaa

SEQ ID NO: 19298 - DNA, 20 bp, Artificial Sequence
  Antisense compound
agaatagtaaaagaaaggca

SEQ ID NO: 19299 - DNA, 20 bp, Artificial Sequence
  Antisense compound
cagaatagtaaaagaaaggc

SEQ ID NO: 19300 - DNA, 20 bp, Artificial Sequence
  Antisense compound
tcagaatagtaaaagaaagg

SEQ ID NO: 19301 - DNA, 20 bp, Artificial Sequence
  Antisense compound
atcagaatagtaaaagaaag

SEQ ID NO: 19302 - DNA, 20 bp, Artificial Sequence
  Antisense compound
tatcagaatagtaaaagaaa

SEQ ID NO: 19303 - DNA, 20 bp, Artificial Sequence
  Antisense compound
ctatcagaatagtaaaagaa

SEQ ID NO: 19304 - DNA, 20 bp, Artificial Sequence
  Antisense compound
actatcagaatagtaaaaga

SEQ ID NO: 19305 - DNA, 20 bp, Artificial Sequence
  Antisense compound
gactatcagaatagtaaaag

SEQ ID NO: 19306 - DNA, 20 bp, Artificial Sequence
  Antisense compound
ggactatcagaatagtaaaa

SEQ ID NO: 19307 - DNA, 20 bp, Artificial Sequence
  Antisense compound
aggactatcagaatagtaaa

SEQ ID NO: 19308 - DNA, 20 bp, Artificial Sequence
  Antisense compound
aaggactatcagaatagtaa

SEQ ID NO: 19309 - DNA, 20 bp, Artificial Sequence
  Antisense compound
caaggactatcagaatagta

SEQ ID NO: 19310 - DNA, 20 bp, Artificial Sequence
  Antisense compound
acaaggactatcagaatagt

SEQ ID NO: 19311 - DNA, 20 bp, Artificial Sequence
  Antisense compound
cacaaggactatcagaatag

SEQ ID NO: 19312 - DNA, 20 bp, Artificial Sequence
  Antisense compound
tcacaaggactatcagaata

SEQ ID NO: 19313 - DNA, 20 bp, Artificial Sequence
  Antisense compound
ctcacaaggactatcagaat

SEQ ID NO: 19314 - DNA, 20 bp, Artificial Sequence
  Antisense compound
actcacaaggactatcagaa

SEQ ID NO: 19315 - DNA, 20 bp, Artificial Sequence
  Antisense compound
gactcacaaggactatcaga

SEQ ID NO: 19316 - DNA, 20 bp, Artificial Sequence
  Antisense compound
agactcacaaggactatcag

SEQ ID NO: 19317 - DNA, 20 bp, Artificial Sequence
  Antisense compound
gagactcacaaggactatca

SEQ ID NO: 19318 - DNA, 20 bp, Artificial Sequence
  Antisense compound
tgagactcacaaggactatc

SEQ ID NO: 19319 - DNA, 20 bp, Artificial Sequence
  Antisense compound
atgagactcacaaggactat

SEQ ID NO: 19320 - DNA, 20 bp, Artificial Sequence
  Antisense compound
catgagactcacaaggacta

SEQ ID NO: 19321 - DNA, 20 bp, Artificial Sequence
  Antisense compound
ccatgagactcacaaggact

SEQ ID NO: 19322 - DNA, 20 bp, Artificial Sequence
  Antisense compound
gccatgagactcacaaggac

SEQ ID NO: 19323 - DNA, 20 bp, Artificial Sequence
  Antisense compound
tgccatgagactcacaagga

SEQ ID NO: 19324 - DNA, 20 bp, Artificial Sequence
  Antisense compound
ttgccatgagactcacaagg

SEQ ID NO: 19325 - DNA, 20 bp, Artificial Sequence
  Antisense compound
tttgccatgagactcacaag

SEQ ID NO: 19326 - DNA, 20 bp, Artificial Sequence
  Antisense compound
gtttgccatgagactcacaa

SEQ ID NO: 19327 - DNA, 20 bp, Artificial Sequence
  Antisense compound
tgtttgccatgagactcaca

SEQ ID NO: 19328 - DNA, 20 bp, Artificial Sequence
  Antisense compound
ttgtttgccatgagactcac

SEQ ID NO: 19329 - DNA, 20 bp, Artificial Sequence
  Antisense compound
cttgtttgccatgagactca

SEQ ID NO: 19330 - DNA, 20 bp, Artificial Sequence
  Antisense compound
acttgtttgccatgagactc

SEQ ID NO: 19331 - DNA, 20 bp, Artificial Sequence
  Antisense compound
tacttgtttgccatgagact

SEQ ID NO: 19332 - DNA, 20 bp, Artificial Sequence
  Antisense compound
ctacttgtttgccatgagac

SEQ ID NO: 19333 - DNA, 20 bp, Artificial Sequence
  Antisense compound
actacttgtttgccatgaga

SEQ ID NO: 19334 - DNA, 20 bp, Artificial Sequence
  Antisense compound
cactacttgtttgccatgag

SEQ ID NO: 19335 - DNA, 20 bp, Artificial Sequence
  Antisense compound
acactacttgtttgccatga

SEQ ID NO: 19336 - DNA, 20 bp, Artificial Sequence
  Antisense compound
gacactacttgtttgccatg

SEQ ID NO: 19337 - DNA, 20 bp, Artificial Sequence
  Antisense compound
cgacactacttgtttgccat

SEQ ID NO: 19338 - DNA, 20 bp, Artificial Sequence
  Antisense compound
ccgacactacttgtttgcca

SEQ ID NO: 19339 - DNA, 20 bp, Artificial Sequence
  Antisense compound
tccgacactacttgtttgcc

SEQ ID NO: 19340 - DNA, 20 bp, Artificial Sequence
  Antisense compound
atccgacactacttgtttgc

SEQ ID NO: 19341 - DNA, 20 bp, Artificial Sequence
  Antisense compound
tatccgacactacttgtttg

SEQ ID NO: 19342 - DNA, 20 bp, Artificial Sequence
  Antisense compound
atatccgacactacttgttt

SEQ ID NO: 19343 - DNA, 20 bp, Artificial Sequence
  Antisense compound
aatatccgacactacttgtt

SEQ ID NO: 19344 - DNA, 20 bp, Artificial Sequence
  Antisense compound
caatatccgacactacttgt

SEQ ID NO: 19345 - DNA, 20 bp, Artificial Sequence
  Antisense compound
tcaatatccgacactacttg

SEQ ID NO: 19346 - DNA, 20 bp, Artificial Sequence
  Antisense compound
atcaatatccgacactactt

SEQ ID NO: 19347 - DNA, 20 bp, Artificial Sequence
  Antisense compound
aatcaatatccgacactact

SEQ ID NO: 19348 - DNA, 20 bp, Artificial Sequence
  Antisense compound
taatcaatatccgacactac

SEQ ID NO: 19349 - DNA, 20 bp, Artificial Sequence
  Antisense compound
ataatcaatatccgacacta

SEQ ID NO: 19350 - DNA, 20 bp, Artificial Sequence
  Antisense compound
cataatcaatatccgacact

SEQ ID NO: 19351 - DNA, 20 bp, Artificial Sequence
  Antisense compound
acataatcaatatccgacac

SEQ ID NO: 19352 - DNA, 20 bp, Artificial Sequence
  Antisense compound
aacataatcaatatccgaca

SEQ ID NO: 19353 - DNA, 20 bp, Artificial Sequence
  Antisense compound
gaacataatcaatatccgac

SEQ ID NO: 19354 - DNA, 20 bp, Artificial Sequence
  Antisense compound
ggaacataatcaatatccga

SEQ ID NO: 19355 - DNA, 20 bp, Artificial Sequence
  Antisense compound
tggaacataatcaatatccg

SEQ ID NO: 19356 - DNA, 20 bp, Artificial Sequence
  Antisense compound
gtggaacataatcaatatcc

SEQ ID NO: 19357 - DNA, 20 bp, Artificial Sequence
  Antisense compound
agtggaacataatcaatatc

SEQ ID NO: 19358 - DNA, 20 bp, Artificial Sequence
  Antisense compound
gagtggaacataatcaatat

SEQ ID NO: 19359 - DNA, 20 bp, Artificial Sequence
  Antisense compound
tgagtggaacataatcaata

SEQ ID NO: 19360 - DNA, 20 bp, Artificial Sequence
  Antisense compound
ttgagtggaacataatcaat

SEQ ID NO: 19361 - DNA, 20 bp, Artificial Sequence
  Antisense compound
tttgagtggaacataatcaa

SEQ ID NO: 19362 - DNA, 20 bp, Artificial Sequence
  Antisense compound
atttgagtggaacataatca

SEQ ID NO: 19363 - DNA, 20 bp, Artificial Sequence
  Antisense compound
gatttgagtggaacataatc

SEQ ID NO: 19364 - DNA, 20 bp, Artificial Sequence
  Antisense compound
agatttgagtggaacataat

SEQ ID NO: 19365 - DNA, 20 bp, Artificial Sequence
  Antisense compound
cagatttgagtggaacataa

SEQ ID NO: 19366 - DNA, 20 bp, Artificial Sequence
  Antisense compound
gcagatttgagtggaacata

SEQ ID NO: 19367 - DNA, 20 bp, Artificial Sequence
  Antisense compound
agcagatttgagtggaacat

SEQ ID NO: 19368 - DNA, 20 bp, Artificial Sequence
  Antisense compound
tagcagatttgagtggaaca

SEQ ID NO: 19369 - DNA, 20 bp, Artificial Sequence
  Antisense compound
gtagcagatttgagtggaac

SEQ ID NO: 19370 - DNA, 20 bp, Artificial Sequence
  Antisense compound
cgtagcagatttgagtggaa

SEQ ID NO: 19371 - DNA, 20 bp, Artificial Sequence
  Antisense compound
acgtagcagatttgagtgga

SEQ ID NO: 19372 - DNA, 20 bp, Artificial Sequence
  Antisense compound
cacgtagcagatttgagtgg

SEQ ID NO: 19373 - DNA, 20 bp, Artificial Sequence
  Antisense compound
acacgtagcagatttgagtg

SEQ ID NO: 19374 - DNA, 20 bp, Artificial Sequence
  Antisense compound
tacacgtagcagatttgagt

SEQ ID NO: 19375 - DNA, 20 bp, Artificial Sequence
  Antisense compound
atacacgtagcagatttgag

SEQ ID NO: 19376 - DNA, 20 bp, Artificial Sequence
  Antisense compound
aatacacgtagcagatttga

SEQ ID NO: 19377 - DNA, 20 bp, Artificial Sequence
  Antisense compound
taatacacgtagcagatttg

SEQ ID NO: 19378 - DNA, 20 bp, Artificial Sequence
  Antisense compound
gtaatacacgtagcagattt

SEQ ID NO: 19379 - DNA, 20 bp, Artificial Sequence
  Antisense compound
tgtaatacacgtagcagatt

SEQ ID NO: 19380 - DNA, 20 bp, Artificial Sequence
  Antisense compound
gtgtaatacacgtagcagat

SEQ ID NO: 19381 - DNA, 20 bp, Artificial Sequence
  Antisense compound
cgtgtaatacacgtagcaga

SEQ ID NO: 19382 - DNA, 20 bp, Artificial Sequence
  Antisense compound
tcgtgtaatacacgtagcag

SEQ ID NO: 19383 - DNA, 20 bp, Artificial Sequence
  Antisense compound
atcgtgtaatacacgtagca

SEQ ID NO: 19384 - DNA, 20 bp, Artificial Sequence
  Antisense compound
catcgtgtaatacacgtagc

SEQ ID NO: 19385 - DNA, 20 bp, Artificial Sequence
  Antisense compound
gcatcgtgtaatacacgtag

SEQ ID NO: 19386 - DNA, 20 bp, Artificial Sequence
  Antisense compound
tgcatcgtgtaatacacgta

SEQ ID NO: 19387 - DNA, 20 bp, Artificial Sequence
  Antisense compound
ttgcatcgtgtaatacacgt

SEQ ID NO: 19388 - DNA, 20 bp, Artificial Sequence
  Antisense compound
attgcatcgtgtaatacacg

SEQ ID NO: 19389 - DNA, 20 bp, Artificial Sequence
  Antisense compound
aattgcatcgtgtaatacac

SEQ ID NO: 19390 - DNA, 20 bp, Artificial Sequence
  Antisense compound
aaattgcatcgtgtaataca

SEQ ID NO: 19391 - DNA, 20 bp, Artificial Sequence
  Antisense compound
taaattgcatcgtgtaatac

SEQ ID NO: 19392 - DNA, 20 bp, Artificial Sequence
  Antisense compound
ctaaattgcatcgtgtaata

SEQ ID NO: 19393 - DNA, 20 bp, Artificial Sequence
  Antisense compound
cctaaattgcatcgtgtaat

SEQ ID NO: 19394 - DNA, 20 bp, Artificial Sequence
  Antisense compound
acctaaattgcatcgtgtaa

SEQ ID NO: 19395 - DNA, 20 bp, Artificial Sequence
  Antisense compound
cacctaaattgcatcgtgta

SEQ ID NO: 19396 - DNA, 20 bp, Artificial Sequence
  Antisense compound
ccacctaaattgcatcgtgt

SEQ ID NO: 19397 - DNA, 20 bp, Artificial Sequence
  Antisense compound
accacctaaattgcatcgtg

SEQ ID NO: 19398 - DNA, 20 bp, Artificial Sequence
  Antisense compound
caccacctaaattgcatcgt

SEQ ID NO: 19399 - DNA, 20 bp, Artificial Sequence
  Antisense compound
gcaccacctaaattgcatcg

SEQ ID NO: 19400 - DNA, 20 bp, Artificial Sequence
  Antisense compound
agcaccacctaaattgcatc

SEQ ID NO: 19401 - DNA, 20 bp, Artificial Sequence
  Antisense compound
cagcaccacctaaattgcat

SEQ ID NO: 19402 - DNA, 20 bp, Artificial Sequence
  Antisense compound
acagcaccacctaaattgca

SEQ ID NO: 19403 - DNA, 20 bp, Artificial Sequence
  Antisense compound
aacagcaccacctaaattgc

SEQ ID NO: 19404 - DNA, 20 bp, Artificial Sequence
  Antisense compound
aaacagcaccacctaaattg

SEQ ID NO: 19405 - DNA, 20 bp, Artificial Sequence
  Antisense compound
caaacagcaccacctaaatt

SEQ ID NO: 19406 - DNA, 20 bp, Artificial Sequence
  Antisense compound
gcaaacagcaccacctaaat

SEQ ID NO: 19407 - DNA, 20 bp, Artificial Sequence
  Antisense compound
tgcaaacagcaccacctaaa

SEQ ID NO: 19408 - DNA, 20 bp, Artificial Sequence
  Antisense compound
ctgcaaacagcaccacctaa

SEQ ID NO: 19409 - DNA, 20 bp, Artificial Sequence
  Antisense compound
tctgcaaacagcaccaccta

SEQ ID NO: 19410 - DNA, 20 bp, Artificial Sequence
  Antisense compound
gtctgcaaacagcaccacct

SEQ ID NO: 19411 - DNA, 20 bp, Artificial Sequence
  Antisense compound
tgtctgcaaacagcaccacc

SEQ ID NO: 19412 - DNA, 20 bp, Artificial Sequence
  Antisense compound
gtgtctgcaaacagcaccac

SEQ ID NO: 19413 - DNA, 20 bp, Artificial Sequence
  Antisense compound
ggtgtctgcaaacagcacca

SEQ ID NO: 19414 - DNA, 20 bp, Artificial Sequence
  Antisense compound
tggtgtctgcaaacagcacc

SEQ ID NO: 19415 - DNA, 20 bp, Artificial Sequence
  Antisense compound
atggtgtctgcaaacagcac

SEQ ID NO: 19416 - DNA, 20 bp, Artificial Sequence
  Antisense compound
catggtgtctgcaaacagca

SEQ ID NO: 19417 - DNA, 20 bp, Artificial Sequence
  Antisense compound
gcatggtgtctgcaaacagc

SEQ ID NO: 19418 - DNA, 20 bp, Artificial Sequence
  Antisense compound
tgcatggtgtctgcaaacag

SEQ ID NO: 19419 - DNA, 20 bp, Artificial Sequence
  Antisense compound
ttgcatggtgtctgcaaaca

SEQ ID NO: 19420 - DNA, 20 bp, Artificial Sequence
  Antisense compound
tttgcatggtgtctgcaaac

SEQ ID NO: 19421 - DNA, 20 bp, Artificial Sequence
  Antisense compound
atttgcatggtgtctgcaaa

SEQ ID NO: 19422 - DNA, 20 bp, Artificial Sequence
  Antisense compound
catttgcatggtgtctgcaa

SEQ ID NO: 19423 - DNA, 20 bp, Artificial Sequence
  Antisense compound
tcatttgcatggtgtctgca

SEQ ID NO: 19424 - DNA, 20 bp, Artificial Sequence
  Antisense compound
ctcatttgcatggtgtctgc

SEQ ID NO: 19425 - DNA, 20 bp, Artificial Sequence
  Antisense compound
actcatttgcatggtgtctg

SEQ ID NO: 19426 - DNA, 20 bp, Artificial Sequence
  Antisense compound
tactcatttgcatggtgtct

SEQ ID NO: 19427 - DNA, 20 bp, Artificial Sequence
  Antisense compound
gtactcatttgcatggtgtc

SEQ ID NO: 19428 - DNA, 20 bp, Artificial Sequence
  Antisense compound
ggtactcatttgcatggtgt

SEQ ID NO: 19429 - DNA, 20 bp, Artificial Sequence
  Antisense compound
cggtactcatttgcatggtg

SEQ ID NO: 19430 - DNA, 20 bp, Artificial Sequence
  Antisense compound
tcggtactcatttgcatggt

SEQ ID NO: 19431 - DNA, 20 bp, Artificial Sequence
  Antisense compound
gtcggtactcatttgcatgg

SEQ ID NO: 19432 - DNA, 20 bp, Artificial Sequence
  Antisense compound
tgtcggtactcatttgcatg

SEQ ID NO: 19433 - DNA, 20 bp, Artificial Sequence
  Antisense compound
ctgtcggtactcatttgcat

SEQ ID NO: 19434 - DNA, 20 bp, Artificial Sequence
  Antisense compound
actgtcggtactcatttgca

SEQ ID NO: 19435 - DNA, 20 bp, Artificial Sequence
  Antisense compound
tactgtcggtactcatttgc

SEQ ID NO: 19436 - DNA, 20 bp, Artificial Sequence
  Antisense compound
gtactgtcggtactcatttg

SEQ ID NO: 19437 - DNA, 20 bp, Artificial Sequence
  Antisense compound
agtactgtcggtactcattt

SEQ ID NO: 19438 - DNA, 20 bp, Artificial Sequence
  Antisense compound
aagtactgtcggtactcatt

SEQ ID NO: 19439 - DNA, 20 bp, Artificial Sequence
  Antisense compound
caagtactgtcggtactcat

SEQ ID NO: 19440 - DNA, 20 bp, Artificial Sequence
  Antisense compound
ccaagtactgtcggtactca

SEQ ID NO: 19441 - DNA, 20 bp, Artificial Sequence
  Antisense compound
tccaagtactgtcggtactc

SEQ ID NO: 19442 - DNA, 20 bp, Artificial Sequence
  Antisense compound
atccaagtactgtcggtact

SEQ ID NO: 19443 - DNA, 20 bp, Artificial Sequence
  Antisense compound
catccaagtactgtcggtac

SEQ ID NO: 19444 - DNA, 20 bp, Artificial Sequence
  Antisense compound
gcatccaagtactgtcggta

SEQ ID NO: 19445 - DNA, 20 bp, Artificial Sequence
  Antisense compound
tgcatccaagtactgtcggt

SEQ ID NO: 19446 - DNA, 20 bp, Artificial Sequence
  Antisense compound
atgcatccaagtactgtcgg

SEQ ID NO: 19447 - DNA, 20 bp, Artificial Sequence
  Antisense compound
tatgcatccaagtactgtcg

SEQ ID NO: 19448 - DNA, 20 bp, Artificial Sequence
  Antisense compound
atatgcatccaagtactgtc

SEQ ID NO: 19449 - DNA, 20 bp, Artificial Sequence
  Antisense compound
tatatgcatccaagtactgt

SEQ ID NO: 19450 - DNA, 20 bp, Artificial Sequence
  Antisense compound
ttatatgcatccaagtactg

SEQ ID NO: 19451 - DNA, 20 bp, Artificial Sequence
  Antisense compound
attatatgcatccaagtact

SEQ ID NO: 19452 - DNA, 20 bp, Artificial Sequence
  Antisense compound
tattatatgcatccaagtac

SEQ ID NO: 19453 - DNA, 20 bp, Artificial Sequence
  Antisense compound
atattatatgcatccaagta

SEQ ID NO: 19454 - DNA, 20 bp, Artificial Sequence
  Antisense compound
catattatatgcatccaagt

SEQ ID NO: 19455 - DNA, 20 bp, Artificial Sequence
  Antisense compound
tcatattatatgcatccaag

SEQ ID NO: 19456 - DNA, 20 bp, Artificial Sequence
  Antisense compound
atcatattatatgcatccaa

SEQ ID NO: 19457 - DNA, 20 bp, Artificial Sequence
  Antisense compound
catcatattatatgcatcca

SEQ ID NO: 19458 - DNA, 20 bp, Artificial Sequence
  Antisense compound
tcatcatattatatgcatcc

SEQ ID NO: 19459 - DNA, 20 bp, Artificial Sequence
  Antisense compound
atcatcatattatatgcatc

SEQ ID NO: 19460 - DNA, 20 bp, Artificial Sequence
  Antisense compound
aatcatcatattatatgcat

SEQ ID NO: 19461 - DNA, 20 bp, Artificial Sequence
  Antisense compound
aaatcatcatattatatgca

SEQ ID NO: 19462 - DNA, 20 bp, Artificial Sequence
  Antisense compound
gaaatcatcatattatatgc

SEQ ID NO: 19463 - DNA, 20 bp, Artificial Sequence
  Antisense compound
agaaatcatcatattatatg

SEQ ID NO: 19464 - DNA, 20 bp, Artificial Sequence
  Antisense compound
cagaaatcatcatattatat

SEQ ID NO: 19465 - DNA, 20 bp, Artificial Sequence
  Antisense compound
gcagaaatcatcatattata

SEQ ID NO: 19466 - DNA, 20 bp, Artificial Sequence
  Antisense compound
agcagaaatcatcatattat

SEQ ID NO: 19467 - DNA, 20 bp, Artificial Sequence
  Antisense compound
cagcagaaatcatcatatta

SEQ ID NO: 19468 - DNA, 20 bp, Artificial Sequence
  Antisense compound
ccagcagaaatcatcatatt

SEQ ID NO: 19469 - DNA, 20 bp, Artificial Sequence
  Antisense compound
tccagcagaaatcatcatat

SEQ ID NO: 19470 - DNA, 20 bp, Artificial Sequence
  Antisense compound
atccagcagaaatcatcata

SEQ ID NO: 19471 - DNA, 20 bp, Artificial Sequence
  Antisense compound
aatccagcagaaatcatcat

SEQ ID NO: 19472 - DNA, 20 bp, Artificial Sequence
  Antisense compound
aaatccagcagaaatcatca

SEQ ID NO: 19473 - DNA, 20 bp, Artificial Sequence
  Antisense compound
taaatccagcagaaatcatc

SEQ ID NO: 19474 - DNA, 20 bp, Artificial Sequence
  Antisense compound
ctaaatccagcagaaatcat

SEQ ID NO: 19475 - DNA, 20 bp, Artificial Sequence
  Antisense compound
gctaaatccagcagaaatca

SEQ ID NO: 19476 - DNA, 20 bp, Artificial Sequence
  Antisense compound
ggctaaatccagcagaaatc

SEQ ID NO: 19477 - DNA, 20 bp, Artificial Sequence
  Antisense compound
aggctaaatccagcagaaat

SEQ ID NO: 19478 - DNA, 20 bp, Artificial Sequence
  Antisense compound
taggctaaatccagcagaaa

SEQ ID NO: 19479 - DNA, 20 bp, Artificial Sequence
  Antisense compound
ataggctaaatccagcagaa

SEQ ID NO: 19480 - DNA, 20 bp, Artificial Sequence
  Antisense compound
cataggctaaatccagcaga

SEQ ID NO: 19481 - DNA, 20 bp, Artificial Sequence
  Antisense compound
ccataggctaaatccagcag

SEQ ID NO: 19482 - DNA, 20 bp, Artificial Sequence
  Antisense compound
tccataggctaaatccagca

SEQ ID NO: 19483 - DNA, 20 bp, Artificial Sequence
  Antisense compound
atccataggctaaatccagc

SEQ ID NO: 19484 - DNA, 20 bp, Artificial Sequence
  Antisense compound
aatccataggctaaatccag

SEQ ID NO: 19485 - DNA, 20 bp, Artificial Sequence
  Antisense compound
aaatccataggctaaatcca

SEQ ID NO: 19486 - DNA, 20 bp, Artificial Sequence
  Antisense compound
taaatccataggctaaatcc

SEQ ID NO: 19487 - DNA, 20 bp, Artificial Sequence
  Antisense compound
gtaaatccataggctaaatc

SEQ ID NO: 19488 - DNA, 20 bp, Artificial Sequence
  Antisense compound
tgtaaatccataggctaaat

SEQ ID NO: 19489 - DNA, 20 bp, Artificial Sequence
  Antisense compound
ttgtaaatccataggctaaa

SEQ ID NO: 19490 - DNA, 20 bp, Artificial Sequence
  Antisense compound
tttgtaaatccataggctaa

SEQ ID NO: 19491 - DNA, 20 bp, Artificial Sequence
  Antisense compound
gtttgtaaatccataggcta

SEQ ID NO: 19492 - DNA, 20 bp, Artificial Sequence
  Antisense compound
tgtttgtaaatccataggct

SEQ ID NO: 19493 - DNA, 20 bp, Artificial Sequence
  Antisense compound
ttgtttgtaaatccataggc

SEQ ID NO: 19494 - DNA, 20 bp, Artificial Sequence
  Antisense compound
attgtttgtaaatccatagg

SEQ ID NO: 19495 - DNA, 20 bp, Artificial Sequence
  Antisense compound
aattgtttgtaaatccatag

SEQ ID NO: 19496 - DNA, 20 bp, Artificial Sequence
  Antisense compound
aaattgtttgtaaatccata

SEQ ID NO: 19497 - DNA, 20 bp, Artificial Sequence
  Antisense compound
caaattgtttgtaaatccat

SEQ ID NO: 19498 - DNA, 20 bp, Artificial Sequence
  Antisense compound
tcaaattgtttgtaaatcca

SEQ ID NO: 19499 - DNA, 20 bp, Artificial Sequence
  Antisense compound
atcaaattgtttgtaaatcc

SEQ ID NO: 19500 - DNA, 20 bp, Artificial Sequence
  Antisense compound
tatcaaattgtttgtaaatc

SEQ ID NO: 19501 - DNA, 20 bp, Artificial Sequence
  Antisense compound
gtatcaaattgtttgtaaat

SEQ ID NO: 19502 - DNA, 20 bp, Artificial Sequence
  Antisense compound
agtatcaaattgtttgtaaa

SEQ ID NO: 19503 - DNA, 20 bp, Artificial Sequence
  Antisense compound
aagtatcaaattgtttgtaa

SEQ ID NO: 19504 - DNA, 20 bp, Artificial Sequence
  Antisense compound
taagtatcaaattgtttgta

SEQ ID NO: 19505 - DNA, 20 bp, Artificial Sequence
  Antisense compound
ataagtatcaaattgtttgt

SEQ ID NO: 19506 - DNA, 20 bp, Artificial Sequence
  Antisense compound
tataagtatcaaattgtttg

SEQ ID NO: 19507 - DNA, 20 bp, Artificial Sequence
  Antisense compound
ttataagtatcaaattgttt

SEQ ID NO: 19508 - DNA, 20 bp, Artificial Sequence
  Antisense compound
gttataagtatcaaattgtt

SEQ ID NO: 19509 - DNA, 20 bp, Artificial Sequence
  Antisense compound
ggttataagtatcaaattgt

SEQ ID NO: 19510 - DNA, 20 bp, Artificial Sequence
  Antisense compound
aggttataagtatcaaattg

SEQ ID NO: 19511 - DNA, 20 bp, Artificial Sequence
  Antisense compound
caggttataagtatcaaatt

SEQ ID NO: 19512 - DNA, 20 bp, Artificial Sequence
  Antisense compound
acaggttataagtatcaaat

SEQ ID NO: 19513 - DNA, 20 bp, Artificial Sequence
  Antisense compound
cacaggttataagtatcaaa

SEQ ID NO: 19514 - DNA, 20 bp, Artificial Sequence
  Antisense compound
ccacaggttataagtatcaa

SEQ ID NO: 19515 - DNA, 20 bp, Artificial Sequence
  Antisense compound
tccacaggttataagtatca

SEQ ID NO: 19516 - DNA, 20 bp, Artificial Sequence
  Antisense compound
ttccacaggttataagtatc

SEQ ID NO: 19517 - DNA, 20 bp, Artificial Sequence
  Antisense compound
attccacaggttataagtat

SEQ ID NO: 19518 - DNA, 20 bp, Artificial Sequence
  Antisense compound
tattccacaggttataagta

SEQ ID NO: 19519 - DNA, 20 bp, Artificial Sequence
  Antisense compound
gtattccacaggttataagt

SEQ ID NO: 19520 - DNA, 20 bp, Artificial Sequence
  Antisense compound
tgtattccacaggttataag

SEQ ID NO: 19521 - DNA, 20 bp, Artificial Sequence
  Antisense compound
atgtattccacaggttataa

SEQ ID NO: 19522 - DNA, 20 bp, Artificial Sequence
  Antisense compound
aatgtattccacaggttata

SEQ ID NO: 19523 - DNA, 20 bp, Artificial Sequence
  Antisense compound
aaatgtattccacaggttat

SEQ ID NO: 19524 - DNA, 20 bp, Artificial Sequence
  Antisense compound
taaatgtattccacaggtta

SEQ ID NO: 19525 - DNA, 20 bp, Artificial Sequence
  Antisense compound
gtaaatgtattccacaggtt

SEQ ID NO: 19526 - DNA, 20 bp, Artificial Sequence
  Antisense compound
ggtaaatgtattccacaggt

SEQ ID NO: 19527 - DNA, 20 bp, Artificial Sequence
  Antisense compound
tggtaaatgtattccacagg

SEQ ID NO: 19528 - DNA, 20 bp, Artificial Sequence
  Antisense compound
ctggtaaatgtattccacag

SEQ ID NO: 19529 - DNA, 20 bp, Artificial Sequence
  Antisense compound
cctggtaaatgtattccaca

SEQ ID NO: 19530 - DNA, 20 bp, Artificial Sequence
  Antisense compound
acctggtaaatgtattccac

SEQ ID NO: 19531 - DNA, 20 bp, Artificial Sequence
  Antisense compound
aacctggtaaatgtattcca

SEQ ID NO: 19532 - DNA, 20 bp, Artificial Sequence
  Antisense compound
taacctggtaaatgtattcc

SEQ ID NO: 19533 - DNA, 20 bp, Artificial Sequence
  Antisense compound
gtaacctggtaaatgtattc

SEQ ID NO: 19534 - DNA, 20 bp, Artificial Sequence
  Antisense compound
tgtaacctggtaaatgtatt

SEQ ID NO: 19535 - DNA, 20 bp, Artificial Sequence
  Antisense compound
ctgtaacctggtaaatgtat

SEQ ID NO: 19536 - DNA, 20 bp, Artificial Sequence
  Antisense compound
tctgtaacctggtaaatgta

SEQ ID NO: 19537 - DNA, 20 bp, Artificial Sequence
  Antisense compound
ctctgtaacctggtaaatgt

SEQ ID NO: 19538 - DNA, 20 bp, Artificial Sequence
  Antisense compound
actctgtaacctggtaaatg

SEQ ID NO: 19539 - DNA, 20 bp, Artificial Sequence
  Antisense compound
aactctgtaacctggtaaat

SEQ ID NO: 19540 - DNA, 20 bp, Artificial Sequence
  Antisense compound
aaactctgtaacctggtaaa

SEQ ID NO: 19541 - DNA, 20 bp, Artificial Sequence
  Antisense compound
taaactctgtaacctggtaa

SEQ ID NO: 19542 - DNA, 20 bp, Artificial Sequence
  Antisense compound
ctaaactctgtaacctggta

SEQ ID NO: 19543 - DNA, 20 bp, Artificial Sequence
  Antisense compound
tctaaactctgtaacctggt

SEQ ID NO: 19544 - DNA, 20 bp, Artificial Sequence
  Antisense compound
ttctaaactctgtaacctgg

SEQ ID NO: 19545 - DNA, 20 bp, Artificial Sequence
  Antisense compound
tttctaaactctgtaacctg

SEQ ID NO: 19546 - DNA, 20 bp, Artificial Sequence
  Antisense compound
ttttctaaactctgtaacct

SEQ ID NO: 19547 - DNA, 20 bp, Artificial Sequence
  Antisense compound
attttctaaactctgtaacc

SEQ ID NO: 19548 - DNA, 20 bp, Artificial Sequence
  Antisense compound
cattttctaaactctgtaac

SEQ ID NO: 19549 - DNA, 20 bp, Artificial Sequence
  Antisense compound
acattttctaaactctgtaa

SEQ ID NO: 19550 - DNA, 20 bp, Artificial Sequence
  Antisense compound
cacattttctaaactctgta

SEQ ID NO: 19551 - DNA, 20 bp, Artificial Sequence
  Antisense compound
ccacattttctaaactctgt

SEQ ID NO: 19552 - DNA, 20 bp, Artificial Sequence
  Antisense compound
gccacattttctaaactctg

SEQ ID NO: 19553 - DNA, 20 bp, Artificial Sequence
  Antisense compound
agccacattttctaaactct

SEQ ID NO: 19554 - DNA, 20 bp, Artificial Sequence
  Antisense compound
aagccacattttctaaactc

SEQ ID NO: 19555 - DNA, 20 bp, Artificial Sequence
  Antisense compound
taagccacattttctaaact

SEQ ID NO: 19556 - DNA, 20 bp, Artificial Sequence
  Antisense compound
ataagccacattttctaaac

SEQ ID NO: 19557 - DNA, 20 bp, Artificial Sequence
  Antisense compound
tataagccacattttctaaa

SEQ ID NO: 19558 - DNA, 20 bp, Artificial Sequence
  Antisense compound
ttataagccacattttctaa

SEQ ID NO: 19559 - DNA, 20 bp, Artificial Sequence
  Antisense compound
attataagccacattttcta

SEQ ID NO: 19560 - DNA, 20 bp, Artificial Sequence
  Antisense compound
cattataagccacattttct

SEQ ID NO: 19561 - DNA, 20 bp, Artificial Sequence
  Antisense compound
acattataagccacattttc

SEQ ID NO: 19562 - DNA, 20 bp, Artificial Sequence
  Antisense compound
aacattataagccacatttt

SEQ ID NO: 19563 - DNA, 20 bp, Artificial Sequence
  Antisense compound
caacattataagccacattt

SEQ ID NO: 19564 - DNA, 20 bp, Artificial Sequence
  Antisense compound
acaacattataagccacatt

SEQ ID NO: 19565 - DNA, 20 bp, Artificial Sequence
  Antisense compound
aacaacattataagccacat

SEQ ID NO: 19566 - DNA, 20 bp, Artificial Sequence
  Antisense compound
taacaacattataagccaca

SEQ ID NO: 19567 - DNA, 20 bp, Artificial Sequence
  Antisense compound
ttaacaacattataagccac

SEQ ID NO: 19568 - DNA, 20 bp, Artificial Sequence
  Antisense compound
attaacaacattataagcca

SEQ ID NO: 19569 - DNA, 20 bp, Artificial Sequence
  Antisense compound
tattaacaacattataagcc

SEQ ID NO: 19570 - DNA, 20 bp, Artificial Sequence
  Antisense compound
ttattaacaacattataagc

SEQ ID NO: 19571 - DNA, 20 bp, Artificial Sequence
  Antisense compound
tttattaacaacattataag

SEQ ID NO: 19572 - DNA, 20 bp, Artificial Sequence
  Antisense compound
ctttattaacaacattataa

SEQ ID NO: 19573 - DNA, 20 bp, Artificial Sequence
  Antisense compound
cctttattaacaacattata

SEQ ID NO: 19574 - DNA, 20 bp, Artificial Sequence
  Antisense compound
tcctttattaacaacattat

SEQ ID NO: 19575 - DNA, 20 bp, Artificial Sequence
  Antisense compound
gtcctttattaacaacatta

SEQ ID NO: 19576 - DNA, 20 bp, Artificial Sequence
  Antisense compound
tgtcctttattaacaacatt

SEQ ID NO: 19577 - DNA, 20 bp, Artificial Sequence
  Antisense compound
gtgtcctttattaacaacat

SEQ ID NO: 19578 - DNA, 20 bp, Artificial Sequence
  Antisense compound
agtgtcctttattaacaaca

SEQ ID NO: 19579 - DNA, 20 bp, Artificial Sequence
  Antisense compound
aagtgtcctttattaacaac

SEQ ID NO: 19580 - DNA, 20 bp, Artificial Sequence
  Antisense compound
aaagtgtcctttattaacaa

SEQ ID NO: 19581 - DNA, 20 bp, Artificial Sequence
  Antisense compound
caaagtgtcctttattaaca

SEQ ID NO: 19582 - DNA, 20 bp, Artificial Sequence
  Antisense compound
tcaaagtgtcctttattaac

SEQ ID NO: 19583 - DNA, 20 bp, Artificial Sequence
  Antisense compound
atcaaagtgtcctttattaa

SEQ ID NO: 19584 - DNA, 20 bp, Artificial Sequence
  Antisense compound
catcaaagtgtcctttatta

SEQ ID NO: 19585 - DNA, 20 bp, Artificial Sequence
  Antisense compound
ccatcaaagtgtcctttatt

SEQ ID NO: 19586 - DNA, 20 bp, Artificial Sequence
  Antisense compound
tccatcaaagtgtcctttat

SEQ ID NO: 19587 - DNA, 20 bp, Artificial Sequence
  Antisense compound
gtccatcaaagtgtccttta

SEQ ID NO: 19588 - DNA, 20 bp, Artificial Sequence
  Antisense compound
tgtccatcaaagtgtccttt

SEQ ID NO: 19589 - DNA, 20 bp, Artificial Sequence
  Antisense compound
gtgtccatcaaagtgtcctt

SEQ ID NO: 19590 - DNA, 20 bp, Artificial Sequence
  Antisense compound
cgtgtccatcaaagtgtcct

SEQ ID NO: 19591 - DNA, 20 bp, Artificial Sequence
  Antisense compound
gcgtgtccatcaaagtgtcc

SEQ ID NO: 19592 - DNA, 20 bp, Artificial Sequence
  Antisense compound
ggcgtgtccatcaaagtgtc

SEQ ID NO: 19593 - DNA, 20 bp, Artificial Sequence
  Antisense compound
cggcgtgtccatcaaagtgt

SEQ ID NO: 19594 - DNA, 20 bp, Artificial Sequence
  Antisense compound
ccggcgtgtccatcaaagtg

SEQ ID NO: 19595 - DNA, 20 bp, Artificial Sequence
  Antisense compound
gccggcgtgtccatcaaagt

SEQ ID NO: 19596 - DNA, 20 bp, Artificial Sequence
  Antisense compound
cgccggcgtgtccatcaaag

SEQ ID NO: 19597 - DNA, 20 bp, Artificial Sequence
  Antisense compound
tcgccggcgtgtccatcaaa

SEQ ID NO: 19598 - DNA, 20 bp, Artificial Sequence
  Antisense compound
ttcgccggcgtgtccatcaa

SEQ ID NO: 19599 - DNA, 20 bp, Artificial Sequence
  Antisense compound
cttcgccggcgtgtccatca

SEQ ID NO: 19600 - DNA, 20 bp, Artificial Sequence
  Antisense compound
gcttcgccggcgtgtccatc

SEQ ID NO: 19601 - DNA, 20 bp, Artificial Sequence
  Antisense compound
tgcttcgccggcgtgtccat

SEQ ID NO: 19602 - DNA, 20 bp, Artificial Sequence
  Antisense compound
gtgcttcgccggcgtgtcca

SEQ ID NO: 19603 - DNA, 20 bp, Artificial Sequence
  Antisense compound
ggtgcttcgccggcgtgtcc

SEQ ID NO: 19604 - DNA, 20 bp, Artificial Sequence
  Antisense compound
aggtgcttcgccggcgtgtc

SEQ ID NO: 19605 - DNA, 20 bp, Artificial Sequence
  Antisense compound
caggtgcttcgccggcgtgt

SEQ ID NO: 19606 - DNA, 20 bp, Artificial Sequence
  Antisense compound
acaggtgcttcgccggcgtg

SEQ ID NO: 19607 - DNA, 20 bp, Artificial Sequence
  Antisense compound
aacaggtgcttcgccggcgt

SEQ ID NO: 19608 - DNA, 20 bp, Artificial Sequence
  Antisense compound
aaacaggtgcttcgccggcg

SEQ ID NO: 19609 - DNA, 20 bp, Artificial Sequence
  Antisense compound
gaaacaggtgcttcgccggc

SEQ ID NO: 19610 - DNA, 20 bp, Artificial Sequence
  Antisense compound
ggaaacaggtgcttcgccgg

SEQ ID NO: 19611 - DNA, 20 bp, Artificial Sequence
  Antisense compound
tggaaacaggtgcttcgccg

SEQ ID NO: 19612 - DNA, 20 bp, Artificial Sequence
  Antisense compound
atggaaacaggtgcttcgcc

SEQ ID NO: 19613 - DNA, 20 bp, Artificial Sequence
  Antisense compound
gatggaaacaggtgcttcgc

SEQ ID NO: 19614 - DNA, 20 bp, Artificial Sequence
  Antisense compound
tgatggaaacaggtgcttcg

SEQ ID NO: 19615 - DNA, 20 bp, Artificial Sequence
  Antisense compound
atgatggaaacaggtgcttc

SEQ ID NO: 19616 - DNA, 20 bp, Artificial Sequence
  Antisense compound
aatgatggaaacaggtgctt

SEQ ID NO: 19617 - DNA, 20 bp, Artificial Sequence
  Antisense compound
taatgatggaaacaggtgct

SEQ ID NO: 19618 - DNA, 20 bp, Artificial Sequence
  Antisense compound
ttaatgatggaaacaggtgc

SEQ ID NO: 19619 - DNA, 20 bp, Artificial Sequence
  Antisense compound
attaatgatggaaacaggtg

SEQ ID NO: 19620 - DNA, 20 bp, Artificial Sequence
  Antisense compound
tattaatgatggaaacaggt

SEQ ID NO: 19621 - DNA, 20 bp, Artificial Sequence
  Antisense compound
ttattaatgatggaaacagg

SEQ ID NO: 19622 - DNA, 20 bp, Artificial Sequence
  Antisense compound
attattaatgatggaaacag

SEQ ID NO: 19623 - DNA, 20 bp, Artificial Sequence
  Antisense compound
cattattaatgatggaaaca

SEQ ID NO: 19624 - DNA, 20 bp, Artificial Sequence
  Antisense compound
gcattattaatgatggaaac

SEQ ID NO: 19625 - DNA, 20 bp, Artificial Sequence
  Antisense compound
agcattattaatgatggaaa

SEQ ID NO: 19626 - DNA, 20 bp, Artificial Sequence
  Antisense compound
cagcattattaatgatggaa

SEQ ID NO: 19627 - DNA, 20 bp, Artificial Sequence
  Antisense compound
acagcattattaatgatgga

SEQ ID NO: 19628 - DNA, 20 bp, Artificial Sequence
  Antisense compound
aacagcattattaatgatgg

SEQ ID NO: 19629 - DNA, 20 bp, Artificial Sequence
  Antisense compound
aaacagcattattaatgatg

SEQ ID NO: 19630 - DNA, 20 bp, Artificial Sequence
  Antisense compound
taaacagcattattaatgat

SEQ ID NO: 19631 - DNA, 20 bp, Artificial Sequence
  Antisense compound
gtaaacagcattattaatga

SEQ ID NO: 19632 - DNA, 20 bp, Artificial Sequence
  Antisense compound
tgtaaacagcattattaatg

SEQ ID NO: 19633 - DNA, 20 bp, Artificial Sequence
  Antisense compound
gtgtaaacagcattattaat

SEQ ID NO: 19634 - DNA, 20 bp, Artificial Sequence
  Antisense compound
tgtgtaaacagcattattaa

SEQ ID NO: 19635 - DNA, 20 bp, Artificial Sequence
  Antisense compound
ttgtgtaaacagcattatta

SEQ ID NO: 19636 - DNA, 20 bp, Artificial Sequence
  Antisense compound
tttgtgtaaacagcattatt

SEQ ID NO: 19637 - DNA, 20 bp, Artificial Sequence
  Antisense compound
ctttgtgtaaacagcattat

SEQ ID NO: 19638 - DNA, 20 bp, Artificial Sequence
  Antisense compound
cctttgtgtaaacagcatta

SEQ ID NO: 19639 - DNA, 20 bp, Artificial Sequence
  Antisense compound
acctttgtgtaaacagcatt

SEQ ID NO: 19640 - DNA, 20 bp, Artificial Sequence
  Antisense compound
tacctttgtgtaaacagcat

SEQ ID NO: 19641 - DNA, 20 bp, Artificial Sequence
  Antisense compound
ctacctttgtgtaaacagca

SEQ ID NO: 19642 - DNA, 20 bp, Artificial Sequence
  Antisense compound
tctacctttgtgtaaacagc

SEQ ID NO: 19643 - DNA, 20 bp, Artificial Sequence
  Antisense compound
atctacctttgtgtaaacag

SEQ ID NO: 19644 - DNA, 20 bp, Artificial Sequence
  Antisense compound
catctacctttgtgtaaaca

SEQ ID NO: 19645 - DNA, 20 bp, Artificial Sequence
  Antisense compound
ccatctacctttgtgtaaac

SEQ ID NO: 19646 - DNA, 20 bp, Artificial Sequence
  Antisense compound
accatctacctttgtgtaaa

SEQ ID NO: 19647 - DNA, 20 bp, Artificial Sequence
  Antisense compound
taccatctacctttgtgtaa

SEQ ID NO: 19648 - DNA, 20 bp, Artificial Sequence
  Antisense compound
ataccatctacctttgtgta

SEQ ID NO: 19649 - DNA, 20 bp, Artificial Sequence
  Antisense compound
aataccatctacctttgtgt

SEQ ID NO: 19650 - DNA, 20 bp, Artificial Sequence
  Antisense compound
caataccatctacctttgtg

SEQ ID NO: 19651 - DNA, 20 bp, Artificial Sequence
  Antisense compound
tcaataccatctacctttgt

SEQ ID NO: 19652 - DNA, 20 bp, Artificial Sequence
  Antisense compound
atcaataccatctacctttg

SEQ ID NO: 19653 - DNA, 20 bp, Artificial Sequence
  Antisense compound
catcaataccatctaccttt

SEQ ID NO: 19654 - DNA, 20 bp, Artificial Sequence
  Antisense compound
acatcaataccatctacctt

SEQ ID NO: 19655 - DNA, 20 bp, Artificial Sequence
  Antisense compound
cacatcaataccatctacct

SEQ ID NO: 19656 - DNA, 20 bp, Artificial Sequence
  Antisense compound
ccacatcaataccatctacc

SEQ ID NO: 19657 - DNA, 20 bp, Artificial Sequence
  Antisense compound
tccacatcaataccatctac

SEQ ID NO: 19658 - DNA, 20 bp, Artificial Sequence
  Antisense compound
ctccacatcaataccatcta

SEQ ID NO: 19659 - DNA, 20 bp, Artificial Sequence
  Antisense compound
tctccacatcaataccatct

SEQ ID NO: 19660 - DNA, 20 bp, Artificial Sequence
  Antisense compound
atctccacatcaataccatc

SEQ ID NO: 19661 - DNA, 20 bp, Artificial Sequence
  Antisense compound
gatctccacatcaataccat

SEQ ID NO: 19662 - DNA, 20 bp, Artificial Sequence
  Antisense compound
agatctccacatcaatacca

SEQ ID NO: 19663 - DNA, 20 bp, Artificial Sequence
  Antisense compound
aagatctccacatcaatacc

SEQ ID NO: 19664 - DNA, 20 bp, Artificial Sequence
  Antisense compound
aaagatctccacatcaatac

SEQ ID NO: 19665 - DNA, 20 bp, Artificial Sequence
  Antisense compound
caaagatctccacatcaata

SEQ ID NO: 19666 - DNA, 20 bp, Artificial Sequence
  Antisense compound
tcaaagatctccacatcaat

SEQ ID NO: 19667 - DNA, 20 bp, Artificial Sequence
  Antisense compound
ttcaaagatctccacatcaa

SEQ ID NO: 19668 - DNA, 20 bp, Artificial Sequence
  Antisense compound
tttcaaagatctccacatca

SEQ ID NO: 19669 - DNA, 20 bp, Artificial Sequence
  Antisense compound
ttttcaaagatctccacatc

SEQ ID NO: 19670 - DNA, 20 bp, Artificial Sequence
  Antisense compound
attttcaaagatctccacat

SEQ ID NO: 19671 - DNA, 20 bp, Artificial Sequence
  Antisense compound
tattttcaaagatctccaca

SEQ ID NO: 19672 - DNA, 20 bp, Artificial Sequence
  Antisense compound
ttattttcaaagatctccac

SEQ ID NO: 19673 - DNA, 20 bp, Artificial Sequence
  Antisense compound
cttattttcaaagatctcca

SEQ ID NO: 19674 - DNA, 20 bp, Artificial Sequence
  Antisense compound
tcttattttcaaagatctcc

SEQ ID NO: 19675 - DNA, 20 bp, Artificial Sequence
  Antisense compound
gtcttattttcaaagatctc

SEQ ID NO: 19676 - DNA, 20 bp, Artificial Sequence
  Antisense compound
tgtcttattttcaaagatct

SEQ ID NO: 19677 - DNA, 20 bp, Artificial Sequence
  Antisense compound
ttgtcttattttcaaagatc

SEQ ID NO: 19678 - DNA, 20 bp, Artificial Sequence
  Antisense compound
gttgtcttattttcaaagat

SEQ ID NO: 19679 - DNA, 20 bp, Artificial Sequence
  Antisense compound
tgttgtcttattttcaaaga

SEQ ID NO: 19680 - DNA, 20 bp, Artificial Sequence
  Antisense compound
gtgttgtcttattttcaaag

SEQ ID NO: 19681 - DNA, 20 bp, Artificial Sequence
  Antisense compound
agtgttgtcttattttcaaa

SEQ ID NO: 19682 - DNA, 20 bp, Artificial Sequence
  Antisense compound
aagtgttgtcttattttcaa

SEQ ID NO: 19683 - DNA, 20 bp, Artificial Sequence
  Antisense compound
gaagtgttgtcttattttca

SEQ ID NO: 19684 - DNA, 20 bp, Artificial Sequence
  Antisense compound
ggaagtgttgtcttattttc

SEQ ID NO: 19685 - DNA, 20 bp, Artificial Sequence
  Antisense compound
aggaagtgttgtcttatttt

SEQ ID NO: 19686 - DNA, 20 bp, Artificial Sequence
  Antisense compound
caggaagtgttgtcttattt

SEQ ID NO: 19687 - DNA, 20 bp, Artificial Sequence
  Antisense compound
acaggaagtgttgtcttatt

SEQ ID NO: 19688 - DNA, 20 bp, Artificial Sequence
  Antisense compound
aacaggaagtgttgtcttat

SEQ ID NO: 19689 - DNA, 20 bp, Artificial Sequence
  Antisense compound
taacaggaagtgttgtctta

SEQ ID NO: 19690 - DNA, 20 bp, Artificial Sequence
  Antisense compound
ttaacaggaagtgttgtctt

SEQ ID NO: 19691 - DNA, 20 bp, Artificial Sequence
  Antisense compound
attaacaggaagtgttgtct

SEQ ID NO: 19692 - DNA, 20 bp, Artificial Sequence
  Antisense compound
cattaacaggaagtgttgtc

SEQ ID NO: 19693 - DNA, 20 bp, Artificial Sequence
  Antisense compound
acattaacaggaagtgttgt

SEQ ID NO: 19694 - DNA, 20 bp, Artificial Sequence
  Antisense compound
aacattaacaggaagtgttg

SEQ ID NO: 19695 - DNA, 20 bp, Artificial Sequence
  Antisense compound
caacattaacaggaagtgtt

SEQ ID NO: 19696 - DNA, 20 bp, Artificial Sequence
  Antisense compound
gcaacattaacaggaagtgt

SEQ ID NO: 19697 - DNA, 20 bp, Artificial Sequence
  Antisense compound
tgcaacattaacaggaagtg

SEQ ID NO: 19698 - DNA, 20 bp, Artificial Sequence
  Antisense compound
atgcaacattaacaggaagt

SEQ ID NO: 19699 - DNA, 20 bp, Artificial Sequence
  Antisense compound
aatgcaacattaacaggaag

SEQ ID NO: 19700 - DNA, 20 bp, Artificial Sequence
  Antisense compound
aaatgcaacattaacaggaa

SEQ ID NO: 19701 - DNA, 20 bp, Artificial Sequence
  Antisense compound
caaatgcaacattaacagga

SEQ ID NO: 19702 - DNA, 20 bp, Artificial Sequence
  Antisense compound
tcaaatgcaacattaacagg

SEQ ID NO: 19703 - DNA, 20 bp, Artificial Sequence
  Antisense compound
ctcaaatgcaacattaacag

SEQ ID NO: 19704 - DNA, 20 bp, Artificial Sequence
  Antisense compound
gctcaaatgcaacattaaca

SEQ ID NO: 19705 - DNA, 20 bp, Artificial Sequence
  Antisense compound
agctcaaatgcaacattaac

SEQ ID NO: 19706 - DNA, 20 bp, Artificial Sequence
  Antisense compound
aagctcaaatgcaacattaa

SEQ ID NO: 19707 - DNA, 20 bp, Artificial Sequence
  Antisense compound
aaagctcaaatgcaacatta

SEQ ID NO: 19708 - DNA, 20 bp, Artificial Sequence
  Antisense compound
caaagctcaaatgcaacatt

SEQ ID NO: 19709 - DNA, 20 bp, Artificial Sequence
  Antisense compound
ccaaagctcaaatgcaacat

SEQ ID NO: 19710 - DNA, 20 bp, Artificial Sequence
  Antisense compound
cccaaagctcaaatgcaaca

SEQ ID NO: 19711 - DNA, 20 bp, Artificial Sequence
  Antisense compound
gcccaaagctcaaatgcaac

SEQ ID NO: 19712 - DNA, 20 bp, Artificial Sequence
  Antisense compound
agcccaaagctcaaatgcaa

SEQ ID NO: 19713 - DNA, 20 bp, Artificial Sequence
  Antisense compound
tagcccaaagctcaaatgca

SEQ ID NO: 19714 - DNA, 20 bp, Artificial Sequence
  Antisense compound
ttagcccaaagctcaaatgc

SEQ ID NO: 19715 - DNA, 20 bp, Artificial Sequence
  Antisense compound
cttagcccaaagctcaaatg

SEQ ID NO: 19716 - DNA, 20 bp, Artificial Sequence
  Antisense compound
gcttagcccaaagctcaaat

SEQ ID NO: 19717 - DNA, 20 bp, Artificial Sequence
  Antisense compound
cgcttagcccaaagctcaaa

SEQ ID NO: 19718 - DNA, 20 bp, Artificial Sequence
  Antisense compound
acgcttagcccaaagctcaa

SEQ ID NO: 19719 - DNA, 20 bp, Artificial Sequence
  Antisense compound
tacgcttagcccaaagctca

SEQ ID NO: 19720 - DNA, 20 bp, Artificial Sequence
  Antisense compound
ttacgcttagcccaaagctc

SEQ ID NO: 19721 - DNA, 20 bp, Artificial Sequence
  Antisense compound
gttacgcttagcccaaagct

SEQ ID NO: 19722 - DNA, 20 bp, Artificial Sequence
  Antisense compound
tgttacgcttagcccaaagc

SEQ ID NO: 19723 - DNA, 20 bp, Artificial Sequence
  Antisense compound
atgttacgcttagcccaaag

SEQ ID NO: 19724 - DNA, 20 bp, Artificial Sequence
  Antisense compound
aatgttacgcttagcccaaa

SEQ ID NO: 19725 - DNA, 20 bp, Artificial Sequence
  Antisense compound
taatgttacgcttagcccaa

SEQ ID NO: 19726 - DNA, 20 bp, Artificial Sequence
  Antisense compound
ttaatgttacgcttagccca

SEQ ID NO: 19727 - DNA, 20 bp, Artificial Sequence
  Antisense compound
tttaatgttacgcttagccc

SEQ ID NO: 19728 - DNA, 20 bp, Artificial Sequence
  Antisense compound
gtttaatgttacgcttagcc

SEQ ID NO: 19729 - DNA, 20 bp, Artificial Sequence
  Antisense compound
ggtttaatgttacgcttagc

SEQ ID NO: 19730 - DNA, 20 bp, Artificial Sequence
  Antisense compound
tggtttaatgttacgcttag

SEQ ID NO: 19731 - DNA, 20 bp, Artificial Sequence
  Antisense compound
ctggtttaatgttacgctta

SEQ ID NO: 19732 - DNA, 20 bp, Artificial Sequence
  Antisense compound
actggtttaatgttacgctt

SEQ ID NO: 19733 - DNA, 20 bp, Artificial Sequence
  Antisense compound
cactggtttaatgttacgct

SEQ ID NO: 19734 - DNA, 20 bp, Artificial Sequence
  Antisense compound
gcactggtttaatgttacgc

SEQ ID NO: 19735 - DNA, 20 bp, Artificial Sequence
  Antisense compound
ggcactggtttaatgttacg

SEQ ID NO: 19736 - DNA, 20 bp, Artificial Sequence
  Antisense compound
tggcactggtttaatgttac

SEQ ID NO: 19737 - DNA, 20 bp, Artificial Sequence
  Antisense compound
ctggcactggtttaatgtta

SEQ ID NO: 19738 - DNA, 20 bp, Artificial Sequence
  Antisense compound
tctggcactggtttaatgtt

SEQ ID NO: 19739 - DNA, 20 bp, Artificial Sequence
  Antisense compound
ctctggcactggtttaatgt

SEQ ID NO: 19740 - DNA, 20 bp, Artificial Sequence
  Antisense compound
tctctggcactggtttaatg

SEQ ID NO: 19741 - DNA, 20 bp, Artificial Sequence
  Antisense compound
atctctggcactggtttaat

SEQ ID NO: 19742 - DNA, 20 bp, Artificial Sequence
  Antisense compound
aatctctggcactggtttaa

SEQ ID NO: 19743 - DNA, 20 bp, Artificial Sequence
  Antisense compound
taatctctggcactggttta

SEQ ID NO: 19744 - DNA, 20 bp, Artificial Sequence
  Antisense compound
ttaatctctggcactggttt

SEQ ID NO: 19745 - DNA, 20 bp, Artificial Sequence
  Antisense compound
cttaatctctggcactggtt

SEQ ID NO: 19746 - DNA, 20 bp, Artificial Sequence
  Antisense compound
tcttaatctctggcactggt

SEQ ID NO: 19747 - DNA, 20 bp, Artificial Sequence
  Antisense compound
atcttaatctctggcactgg

SEQ ID NO: 19748 - DNA, 20 bp, Artificial Sequence
  Antisense compound
tatcttaatctctggcactg

SEQ ID NO: 19749 - DNA, 20 bp, Artificial Sequence
  Antisense compound
gtatcttaatctctggcact

SEQ ID NO: 19750 - DNA, 20 bp, Artificial Sequence
  Antisense compound
agtatcttaatctctggcac

SEQ ID NO: 19751 - DNA, 20 bp, Artificial Sequence
  Antisense compound
gagtatcttaatctctggca

SEQ ID NO: 19752 - DNA, 20 bp, Artificial Sequence
  Antisense compound
tgagtatcttaatctctggc

SEQ ID NO: 19753 - DNA, 20 bp, Artificial Sequence
  Antisense compound
ttgagtatcttaatctctgg

SEQ ID NO: 19754 - DNA, 20 bp, Artificial Sequence
  Antisense compound
attgagtatcttaatctctg

SEQ ID NO: 19755 - DNA, 20 bp, Artificial Sequence
  Antisense compound
tattgagtatcttaatctct

SEQ ID NO: 19756 - DNA, 20 bp, Artificial Sequence
  Antisense compound
ttattgagtatcttaatctc

SEQ ID NO: 19757 - DNA, 20 bp, Artificial Sequence
  Antisense compound
attattgagtatcttaatct

SEQ ID NO: 19758 - DNA, 20 bp, Artificial Sequence
  Antisense compound
aattattgagtatcttaatc

SEQ ID NO: 19759 - DNA, 20 bp, Artificial Sequence
  Antisense compound
aaattattgagtatcttaat

SEQ ID NO: 19760 - DNA, 20 bp, Artificial Sequence
  Antisense compound
caaattattgagtatcttaa

SEQ ID NO: 19761 - DNA, 20 bp, Artificial Sequence
  Antisense compound
ccaaattattgagtatctta

SEQ ID NO: 19762 - DNA, 20 bp, Artificial Sequence
  Antisense compound
cccaaattattgagtatctt

SEQ ID NO: 19763 - DNA, 20 bp, Artificial Sequence
  Antisense compound
acccaaattattgagtatct

SEQ ID NO: 19764 - DNA, 20 bp, Artificial Sequence
  Antisense compound
cacccaaattattgagtatc

SEQ ID NO: 19765 - DNA, 20 bp, Artificial Sequence
  Antisense compound
acacccaaattattgagtat

SEQ ID NO: 19766 - DNA, 20 bp, Artificial Sequence
  Antisense compound
aacacccaaattattgagta

SEQ ID NO: 19767 - DNA, 20 bp, Artificial Sequence
  Antisense compound
caacacccaaattattgagt

SEQ ID NO: 19768 - DNA, 20 bp, Artificial Sequence
  Antisense compound
tcaacacccaaattattgag

SEQ ID NO: 19769 - DNA, 20 bp, Artificial Sequence
  Antisense compound
atcaacacccaaattattga

SEQ ID NO: 19770 - DNA, 20 bp, Artificial Sequence
  Antisense compound
tatcaacacccaaattattg

SEQ ID NO: 19771 - DNA, 20 bp, Artificial Sequence
  Antisense compound
atatcaacacccaaattatt

SEQ ID NO: 19772 - DNA, 20 bp, Artificial Sequence
  Antisense compound
gatatcaacacccaaattat

SEQ ID NO: 19773 - DNA, 20 bp, Artificial Sequence
  Antisense compound
cgatatcaacacccaaatta

SEQ ID NO: 19774 - DNA, 20 bp, Artificial Sequence
  Antisense compound
gcgatatcaacacccaaatt

SEQ ID NO: 19775 - DNA, 20 bp, Artificial Sequence
  Antisense compound
agcgatatcaacacccaaat

SEQ ID NO: 19776 - DNA, 20 bp, Artificial Sequence
  Antisense compound
cagcgatatcaacacccaaa

SEQ ID NO: 19777 - DNA, 20 bp, Artificial Sequence
  Antisense compound
gcagcgatatcaacacccaa

SEQ ID NO: 19778 - DNA, 20 bp, Artificial Sequence
  Antisense compound
agcagcgatatcaacaccca

SEQ ID NO: 19779 - DNA, 20 bp, Artificial Sequence
  Antisense compound
tagcagcgatatcaacaccc

SEQ ID NO: 19780 - DNA, 20 bp, Artificial Sequence
  Antisense compound
ttagcagcgatatcaacacc

SEQ ID NO: 19781 - DNA, 20 bp, Artificial Sequence
  Antisense compound
attagcagcgatatcaacac

SEQ ID NO: 19782 - DNA, 20 bp, Artificial Sequence
  Antisense compound
tattagcagcgatatcaaca

SEQ ID NO: 19783 - DNA, 20 bp, Artificial Sequence
  Antisense compound
gtattagcagcgatatcaac

SEQ ID NO: 19784 - DNA, 20 bp, Artificial Sequence
  Antisense compound
agtattagcagcgatatcaa

SEQ ID NO: 19785 - DNA, 20 bp, Artificial Sequence
  Antisense compound
cagtattagcagcgatatca

SEQ ID NO: 19786 - DNA, 20 bp, Artificial Sequence
  Antisense compound
acagtattagcagcgatatc

SEQ ID NO: 19787 - DNA, 20 bp, Artificial Sequence
  Antisense compound
tacagtattagcagcgatat

SEQ ID NO: 19788 - DNA, 20 bp, Artificial Sequence
  Antisense compound
ttacagtattagcagcgata

SEQ ID NO: 19789 - DNA, 20 bp, Artificial Sequence
  Antisense compound
attacagtattagcagcgat

SEQ ID NO: 19790 - DNA, 20 bp, Artificial Sequence
  Antisense compound
gattacagtattagcagcga

SEQ ID NO: 19791 - DNA, 20 bp, Artificial Sequence
  Antisense compound
agattacagtattagcagcg

SEQ ID NO: 19792 - DNA, 20 bp, Artificial Sequence
  Antisense compound
cagattacagtattagcagc

SEQ ID NO: 19793 - DNA, 20 bp, Artificial Sequence
  Antisense compound
ccagattacagtattagcag

SEQ ID NO: 19794 - DNA, 20 bp, Artificial Sequence
  Antisense compound
cccagattacagtattagca

SEQ ID NO: 19795 - DNA, 20 bp, Artificial Sequence
  Antisense compound
tcccagattacagtattagc

SEQ ID NO: 19796 - DNA, 20 bp, Artificial Sequence
  Antisense compound
gtcccagattacagtattag

SEQ ID NO: 19797 - DNA, 20 bp, Artificial Sequence
  Antisense compound
agtcccagattacagtatta

SEQ ID NO: 19798 - DNA, 20 bp, Artificial Sequence
  Antisense compound
tagtcccagattacagtatt

SEQ ID NO: 19799 - DNA, 20 bp, Artificial Sequence
  Antisense compound
gtagtcccagattacagtat

SEQ ID NO: 19800 - DNA, 20 bp, Artificial Sequence
  Antisense compound
tgtagtcccagattacagta

SEQ ID NO: 19801 - DNA, 20 bp, Artificial Sequence
  Antisense compound
ttgtagtcccagattacagt

SEQ ID NO: 19802 - DNA, 20 bp, Artificial Sequence
  Antisense compound
tttgtagtcccagattacag

SEQ ID NO: 19803 - DNA, 20 bp, Artificial Sequence
  Antisense compound
ttttgtagtcccagattaca

SEQ ID NO: 19804 - DNA, 20 bp, Artificial Sequence
  Antisense compound
cttttgtagtcccagattac

SEQ ID NO: 19805 - DNA, 20 bp, Artificial Sequence
  Antisense compound
tcttttgtagtcccagatta

SEQ ID NO: 19806 - DNA, 20 bp, Artificial Sequence
  Antisense compound
ctcttttgtagtcccagatt

SEQ ID NO: 19807 - DNA, 20 bp, Artificial Sequence
  Antisense compound
tctcttttgtagtcccagat

SEQ ID NO: 19808 - DNA, 20 bp, Artificial Sequence
  Antisense compound
ttctcttttgtagtcccaga

SEQ ID NO: 19809 - DNA, 20 bp, Artificial Sequence
  Antisense compound
cttctcttttgtagtcccag

SEQ ID NO: 19810 - DNA, 20 bp, Artificial Sequence
  Antisense compound
gcttctcttttgtagtccca

SEQ ID NO: 19811 - DNA, 20 bp, Artificial Sequence
  Antisense compound
ggcttctcttttgtagtccc

SEQ ID NO: 19812 - DNA, 20 bp, Artificial Sequence
  Antisense compound
gggcttctcttttgtagtcc

SEQ ID NO: 19813 - DNA, 20 bp, Artificial Sequence
  Antisense compound
ggggcttctcttttgtagtc

SEQ ID NO: 19814 - DNA, 20 bp, Artificial Sequence
  Antisense compound
tggggcttctcttttgtagt

SEQ ID NO: 19815 - DNA, 20 bp, Artificial Sequence
  Antisense compound
ctggggcttctcttttgtag

SEQ ID NO: 19816 - DNA, 20 bp, Artificial Sequence
  Antisense compound
gctggggcttctcttttgta

SEQ ID NO: 19817 - DNA, 20 bp, Artificial Sequence
  Antisense compound
tgctggggcttctcttttgt

SEQ ID NO: 19818 - DNA, 20 bp, Artificial Sequence
  Antisense compound
gtgctggggcttctcttttg

SEQ ID NO: 19819 - DNA, 20 bp, Artificial Sequence
  Antisense compound
tgtgctggggcttctctttt

SEQ ID NO: 19820 - DNA, 20 bp, Artificial Sequence
  Antisense compound
atgtgctggggcttctcttt

SEQ ID NO: 19821 - DNA, 20 bp, Artificial Sequence
  Antisense compound
catgtgctggggcttctctt

SEQ ID NO: 19822 - DNA, 20 bp, Artificial Sequence
  Antisense compound
acatgtgctggggcttctct

SEQ ID NO: 19823 - DNA, 20 bp, Artificial Sequence
  Antisense compound
tacatgtgctggggcttctc

SEQ ID NO: 19824 - DNA, 20 bp, Artificial Sequence
  Antisense compound
atacatgtgctggggcttct

SEQ ID NO: 19825 - DNA, 20 bp, Artificial Sequence
  Antisense compound
gatacatgtgctggggcttc

SEQ ID NO: 19826 - DNA, 20 bp, Artificial Sequence
  Antisense compound
agatacatgtgctggggctt

SEQ ID NO: 19827 - DNA, 20 bp, Artificial Sequence
  Antisense compound
tagatacatgtgctggggct

SEQ ID NO: 19828 - DNA, 20 bp, Artificial Sequence
  Antisense compound
gtagatacatgtgctggggc

SEQ ID NO: 19829 - DNA, 20 bp, Artificial Sequence
  Antisense compound
tgtagatacatgtgctgggg

SEQ ID NO: 19830 - DNA, 20 bp, Artificial Sequence
  Antisense compound
ttgtagatacatgtgctggg

SEQ ID NO: 19831 - DNA, 20 bp, Artificial Sequence
  Antisense compound
attgtagatacatgtgctgg

SEQ ID NO: 19832 - DNA, 20 bp, Artificial Sequence
  Antisense compound
tattgtagatacatgtgctg

SEQ ID NO: 19833 - DNA, 20 bp, Artificial Sequence
  Antisense compound
ctattgtagatacatgtgct

SEQ ID NO: 19834 - DNA, 20 bp, Artificial Sequence
  Antisense compound
cctattgtagatacatgtgc

SEQ ID NO: 19835 - DNA, 20 bp, Artificial Sequence
  Antisense compound
acctattgtagatacatgtg

SEQ ID NO: 19836 - DNA, 20 bp, Artificial Sequence
  Antisense compound
cacctattgtagatacatgt

SEQ ID NO: 19837 - DNA, 20 bp, Artificial Sequence
  Antisense compound
acacctattgtagatacatg

SEQ ID NO: 19838 - DNA, 20 bp, Artificial Sequence
  Antisense compound
gacacctattgtagatacat

SEQ ID NO: 19839 - DNA, 20 bp, Artificial Sequence
  Antisense compound
agacacctattgtagataca

SEQ ID NO: 19840 - DNA, 20 bp, Artificial Sequence
  Antisense compound
cagacacctattgtagatac

SEQ ID NO: 19841 - DNA, 20 bp, Artificial Sequence
  Antisense compound
gcagacacctattgtagata

SEQ ID NO: 19842 - DNA, 20 bp, Artificial Sequence
  Antisense compound
tgcagacacctattgtagat

SEQ ID NO: 19843 - DNA, 20 bp, Artificial Sequence
  Antisense compound
gtgcagacacctattgtaga

SEQ ID NO: 19844 - DNA, 20 bp, Artificial Sequence
  Antisense compound
tgtgcagacacctattgtag

SEQ ID NO: 19845 - DNA, 20 bp, Artificial Sequence
  Antisense compound
ttgtgcagacacctattgta

SEQ ID NO: 19846 - DNA, 20 bp, Artificial Sequence
  Antisense compound
attgtgcagacacctattgt

SEQ ID NO: 19847 - DNA, 20 bp, Artificial Sequence
  Antisense compound
cattgtgcagacacctattg

SEQ ID NO: 19848 - DNA, 20 bp, Artificial Sequence
  Antisense compound
tcattgtgcagacacctatt

SEQ ID NO: 19849 - DNA, 20 bp, Artificial Sequence
  Antisense compound
gtcattgtgcagacacctat

SEQ ID NO: 19850 - DNA, 20 bp, Artificial Sequence
  Antisense compound
agtcattgtgcagacaccta

SEQ ID NO: 19851 - DNA, 20 bp, Artificial Sequence
  Antisense compound
cagtcattgtgcagacacct

SEQ ID NO: 19852 - DNA, 20 bp, Artificial Sequence
  Antisense compound
tcagtcattgtgcagacacc

SEQ ID NO: 19853 - DNA, 20 bp, Artificial Sequence
  Antisense compound
gtcagtcattgtgcagacac

SEQ ID NO: 19854 - DNA, 20 bp, Artificial Sequence
  Antisense compound
tgtcagtcattgtgcagaca

SEQ ID NO: 19855 - DNA, 20 bp, Artificial Sequence
  Antisense compound
atgtcagtcattgtgcagac

SEQ ID NO: 19856 - DNA, 20 bp, Artificial Sequence
  Antisense compound
aatgtcagtcattgtgcaga

SEQ ID NO: 19857 - DNA, 20 bp, Artificial Sequence
  Antisense compound
caatgtcagtcattgtgcag

SEQ ID NO: 19858 - DNA, 20 bp, Artificial Sequence
  Antisense compound
gcaatgtcagtcattgtgca

SEQ ID NO: 19859 - DNA, 20 bp, Artificial Sequence
  Antisense compound
ggcaatgtcagtcattgtgc

SEQ ID NO: 19860 - DNA, 20 bp, Artificial Sequence
  Antisense compound
tggcaatgtcagtcattgtg

SEQ ID NO: 19861 - DNA, 20 bp, Artificial Sequence
  Antisense compound
ttggcaatgtcagtcattgt

SEQ ID NO: 19862 - DNA, 20 bp, Artificial Sequence
  Antisense compound
cttggcaatgtcagtcattg

SEQ ID NO: 19863 - DNA, 20 bp, Artificial Sequence
  Antisense compound
tcttggcaatgtcagtcatt

SEQ ID NO: 19864 - DNA, 20 bp, Artificial Sequence
  Antisense compound
ttcttggcaatgtcagtcat

SEQ ID NO: 19865 - DNA, 20 bp, Artificial Sequence
  Antisense compound
tttcttggcaatgtcagtca

SEQ ID NO: 19866 - DNA, 20 bp, Artificial Sequence
  Antisense compound
gtttcttggcaatgtcagtc

SEQ ID NO: 19867 - DNA, 20 bp, Artificial Sequence
  Antisense compound
ggtttcttggcaatgtcagt

SEQ ID NO: 19868 - DNA, 20 bp, Artificial Sequence
  Antisense compound
aggtttcttggcaatgtcag

SEQ ID NO: 19869 - DNA, 20 bp, Artificial Sequence
  Antisense compound
taggtttcttggcaatgtca

SEQ ID NO: 19870 - DNA, 20 bp, Artificial Sequence
  Antisense compound
gtaggtttcttggcaatgtc

SEQ ID NO: 19871 - DNA, 20 bp, Artificial Sequence
  Antisense compound
agtaggtttcttggcaatgt

SEQ ID NO: 19872 - DNA, 20 bp, Artificial Sequence
  Antisense compound
cagtaggtttcttggcaatg

SEQ ID NO: 19873 - DNA, 20 bp, Artificial Sequence
  Antisense compound
tcagtaggtttcttggcaat

SEQ ID NO: 19874 - DNA, 20 bp, Artificial Sequence
  Antisense compound
ctcagtaggtttcttggcaa

SEQ ID NO: 19875 - DNA, 20 bp, Artificial Sequence
  Antisense compound
tctcagtaggtttcttggca

SEQ ID NO: 19876 - DNA, 20 bp, Artificial Sequence
  Antisense compound
ctctcagtaggtttcttggc

SEQ ID NO: 19877 - DNA, 20 bp, Artificial Sequence
  Antisense compound
actctcagtaggtttcttgg

SEQ ID NO: 19878 - DNA, 20 bp, Artificial Sequence
  Antisense compound
cactctcagtaggtttcttg

SEQ ID NO: 19879 - DNA, 20 bp, Artificial Sequence
  Antisense compound
gcactctcagtaggtttctt

SEQ ID NO: 19880 - DNA, 20 bp, Artificial Sequence
  Antisense compound
agcactctcagtaggtttct

SEQ ID NO: 19881 - DNA, 20 bp, Artificial Sequence
  Antisense compound
aagcactctcagtaggtttc

SEQ ID NO: 19882 - DNA, 20 bp, Artificial Sequence
  Antisense compound
caagcactctcagtaggttt

SEQ ID NO: 19883 - DNA, 20 bp, Artificial Sequence
  Antisense compound
acaagcactctcagtaggtt

SEQ ID NO: 19884 - DNA, 20 bp, Artificial Sequence
  Antisense compound
aacaagcactctcagtaggt

SEQ ID NO: 19885 - DNA, 20 bp, Artificial Sequence
  Antisense compound
gaacaagcactctcagtagg

SEQ ID NO: 19886 - DNA, 20 bp, Artificial Sequence
  Antisense compound
agaacaagcactctcagtag

SEQ ID NO: 19887 - DNA, 20 bp, Artificial Sequence
  Antisense compound
aagaacaagcactctcagta

SEQ ID NO: 19888 - DNA, 20 bp, Artificial Sequence
  Antisense compound
gaagaacaagcactctcagt

SEQ ID NO: 19889 - DNA, 20 bp, Artificial Sequence
  Antisense compound
tgaagaacaagcactctcag

SEQ ID NO: 19890 - DNA, 20 bp, Artificial Sequence
  Antisense compound
gtgaagaacaagcactctca

SEQ ID NO: 19891 - DNA, 20 bp, Artificial Sequence
  Antisense compound
agtgaagaacaagcactctc

SEQ ID NO: 19892 - DNA, 20 bp, Artificial Sequence
  Antisense compound
aagtgaagaacaagcactct

SEQ ID NO: 19893 - DNA, 20 bp, Artificial Sequence
  Antisense compound
taagtgaagaacaagcactc

SEQ ID NO: 19894 - DNA, 20 bp, Artificial Sequence
  Antisense compound
gtaagtgaagaacaagcact

SEQ ID NO: 19895 - DNA, 20 bp, Artificial Sequence
  Antisense compound
agtaagtgaagaacaagcac

SEQ ID NO: 19896 - DNA, 20 bp, Artificial Sequence
  Antisense compound
cagtaagtgaagaacaagca

SEQ ID NO: 19897 - DNA, 20 bp, Artificial Sequence
  Antisense compound
acagtaagtgaagaacaagc

SEQ ID NO: 19898 - DNA, 20 bp, Artificial Sequence
  Antisense compound
gacagtaagtgaagaacaag

SEQ ID NO: 19899 - DNA, 20 bp, Artificial Sequence
  Antisense compound
agacagtaagtgaagaacaa

SEQ ID NO: 19900 - DNA, 20 bp, Artificial Sequence
  Antisense compound
aagacagtaagtgaagaaca

SEQ ID NO: 19901 - DNA, 20 bp, Artificial Sequence
  Antisense compound
caagacagtaagtgaagaac

SEQ ID NO: 19902 - DNA, 20 bp, Artificial Sequence
  Antisense compound
acaagacagtaagtgaagaa

SEQ ID NO: 19903 - DNA, 20 bp, Artificial Sequence
  Antisense compound
aacaagacagtaagtgaaga

SEQ ID NO: 19904 - DNA, 20 bp, Artificial Sequence
  Antisense compound
aaacaagacagtaagtgaag

SEQ ID NO: 19905 - DNA, 20 bp, Artificial Sequence
  Antisense compound
caaacaagacagtaagtgaa

SEQ ID NO: 19906 - DNA, 20 bp, Artificial Sequence
  Antisense compound
tcaaacaagacagtaagtga

SEQ ID NO: 19907 - DNA, 20 bp, Artificial Sequence
  Antisense compound
atcaaacaagacagtaagtg

SEQ ID NO: 19908 - DNA, 20 bp, Artificial Sequence
  Antisense compound
catcaaacaagacagtaagt

SEQ ID NO: 19909 - DNA, 20 bp, Artificial Sequence
  Antisense compound
ccatcaaacaagacagtaag

SEQ ID NO: 19910 - DNA, 20 bp, Artificial Sequence
  Antisense compound
accatcaaacaagacagtaa

SEQ ID NO: 19911 - DNA, 20 bp, Artificial Sequence
  Antisense compound
taccatcaaacaagacagta

SEQ ID NO: 19912 - DNA, 20 bp, Artificial Sequence
  Antisense compound
ctaccatcaaacaagacagt

SEQ ID NO: 19913 - DNA, 20 bp, Artificial Sequence
  Antisense compound
tctaccatcaaacaagacag

SEQ ID NO: 19914 - DNA, 20 bp, Artificial Sequence
  Antisense compound
ctctaccatcaaacaagaca

SEQ ID NO: 19915 - DNA, 20 bp, Artificial Sequence
  Antisense compound
actctaccatcaaacaagac

SEQ ID NO: 19916 - DNA, 20 bp, Artificial Sequence
  Antisense compound
cactctaccatcaaacaaga

SEQ ID NO: 19917 - DNA, 20 bp, Artificial Sequence
  Antisense compound
ccactctaccatcaaacaag

SEQ ID NO: 19918 - DNA, 20 bp, Artificial Sequence
  Antisense compound
tccactctaccatcaaacaa

SEQ ID NO: 19919 - DNA, 20 bp, Artificial Sequence
  Antisense compound
ttccactctaccatcaaaca

SEQ ID NO: 19920 - DNA, 20 bp, Artificial Sequence
  Antisense compound
cttccactctaccatcaaac

SEQ ID NO: 19921 - DNA, 20 bp, Artificial Sequence
  Antisense compound
ccttccactctaccatcaaa

SEQ ID NO: 19922 - DNA, 20 bp, Artificial Sequence
  Antisense compound
tccttccactctaccatcaa

SEQ ID NO: 19923 - DNA, 20 bp, Artificial Sequence
  Antisense compound
gtccttccactctaccatca

SEQ ID NO: 19924 - DNA, 20 bp, Artificial Sequence
  Antisense compound
tgtccttccactctaccatc

SEQ ID NO: 19925 - DNA, 20 bp, Artificial Sequence
  Antisense compound
ctgtccttccactctaccat

SEQ ID NO: 19926 - DNA, 20 bp, Artificial Sequence
  Antisense compound
cctgtccttccactctacca

SEQ ID NO: 19927 - DNA, 20 bp, Artificial Sequence
  Antisense compound
acctgtccttccactctacc

SEQ ID NO: 19928 - DNA, 20 bp, Artificial Sequence
  Antisense compound
tacctgtccttccactctac

SEQ ID NO: 19929 - DNA, 20 bp, Artificial Sequence
  Antisense compound
ctacctgtccttccactcta

SEQ ID NO: 19930 - DNA, 20 bp, Artificial Sequence
  Antisense compound
tctacctgtccttccactct

SEQ ID NO: 19931 - DNA, 20 bp, Artificial Sequence
  Antisense compound
gtctacctgtccttccactc

SEQ ID NO: 19932 - DNA, 20 bp, Artificial Sequence
  Antisense compound
ggtctacctgtccttccact

SEQ ID NO: 19933 - DNA, 20 bp, Artificial Sequence
  Antisense compound
aggtctacctgtccttccac

SEQ ID NO: 19934 - DNA, 20 bp, Artificial Sequence
  Antisense compound
aaggtctacctgtccttcca

SEQ ID NO: 19935 - DNA, 20 bp, Artificial Sequence
  Antisense compound
aaaggtctacctgtccttcc

SEQ ID NO: 19936 - DNA, 20 bp, Artificial Sequence
  Antisense compound
aaaaggtctacctgtccttc

SEQ ID NO: 19937 - DNA, 20 bp, Artificial Sequence
  Antisense compound
aaaaaggtctacctgtcctt

SEQ ID NO: 19938 - DNA, 20 bp, Artificial Sequence
  Antisense compound
taaaaaggtctacctgtcct

SEQ ID NO: 19939 - DNA, 20 bp, Artificial Sequence
  Antisense compound
ctaaaaaggtctacctgtcc

SEQ ID NO: 19940 - DNA, 20 bp, Artificial Sequence
  Antisense compound
tctaaaaaggtctacctgtc

SEQ ID NO: 19941 - DNA, 20 bp, Artificial Sequence
  Antisense compound
ttctaaaaaggtctacctgt

SEQ ID NO: 19942 - DNA, 20 bp, Artificial Sequence
  Antisense compound
tttctaaaaaggtctacctg

SEQ ID NO: 19943 - DNA, 20 bp, Artificial Sequence
  Antisense compound
gtttctaaaaaggtctacct

SEQ ID NO: 19944 - DNA, 20 bp, Artificial Sequence
  Antisense compound
cgtttctaaaaaggtctacc

SEQ ID NO: 19945 - DNA, 20 bp, Artificial Sequence
  Antisense compound
gcgtttctaaaaaggtctac

SEQ ID NO: 19946 - DNA, 20 bp, Artificial Sequence
  Antisense compound
ggcgtttctaaaaaggtcta

SEQ ID NO: 19947 - DNA, 20 bp, Artificial Sequence
  Antisense compound
gggcgtttctaaaaaggtct

SEQ ID NO: 19948 - DNA, 20 bp, Artificial Sequence
  Antisense compound
cgggcgtttctaaaaaggtc

SEQ ID NO: 19949 - DNA, 20 bp, Artificial Sequence
  Antisense compound
acgggcgtttctaaaaaggt

SEQ ID NO: 19950 - DNA, 20 bp, Artificial Sequence
  Antisense compound
tacgggcgtttctaaaaagg

SEQ ID NO: 19951 - DNA, 20 bp, Artificial Sequence
  Antisense compound
ttacgggcgtttctaaaaag

SEQ ID NO: 19952 - DNA, 20 bp, Artificial Sequence
  Antisense compound
attacgggcgtttctaaaaa

SEQ ID NO: 19953 - DNA, 20 bp, Artificial Sequence
  Antisense compound
cattacgggcgtttctaaaa

SEQ ID NO: 19954 - DNA, 20 bp, Artificial Sequence
  Antisense compound
ccattacgggcgtttctaaa

SEQ ID NO: 19955 - DNA, 20 bp, Artificial Sequence
  Antisense compound
accattacgggcgtttctaa

SEQ ID NO: 19956 - DNA, 20 bp, Artificial Sequence
  Antisense compound
caccattacgggcgtttcta

SEQ ID NO: 19957 - DNA, 20 bp, Artificial Sequence
  Antisense compound
acaccattacgggcgtttct

SEQ ID NO: 19958 - DNA, 20 bp, Artificial Sequence
  Antisense compound
aacaccattacgggcgtttc

SEQ ID NO: 19959 - DNA, 20 bp, Artificial Sequence
  Antisense compound
aaacaccattacgggcgttt

SEQ ID NO: 19960 - DNA, 20 bp, Artificial Sequence
  Antisense compound
aaaacaccattacgggcgtt

SEQ ID NO: 19961 - DNA, 20 bp, Artificial Sequence
  Antisense compound
taaaacaccattacgggcgt

SEQ ID NO: 19962 - DNA, 20 bp, Artificial Sequence
  Antisense compound
ttaaaacaccattacgggcg

SEQ ID NO: 19963 - DNA, 20 bp, Artificial Sequence
  Antisense compound
attaaaacaccattacgggc

SEQ ID NO: 19964 - DNA, 20 bp, Artificial Sequence
  Antisense compound
tattaaaacaccattacggg

SEQ ID NO: 19965 - DNA, 20 bp, Artificial Sequence
  Antisense compound
ttattaaaacaccattacgg

SEQ ID NO: 19966 - DNA, 20 bp, Artificial Sequence
  Antisense compound
gttattaaaacaccattacg

SEQ ID NO: 19967 - DNA, 20 bp, Artificial Sequence
  Antisense compound
tgttattaaaacaccattac

SEQ ID NO: 19968 - DNA, 20 bp, Artificial Sequence
  Antisense compound
ctgttattaaaacaccatta

SEQ ID NO: 19969 - DNA, 20 bp, Artificial Sequence
  Antisense compound
tctgttattaaaacaccatt

SEQ ID NO: 19970 - DNA, 20 bp, Artificial Sequence
  Antisense compound
ttctgttattaaaacaccat

SEQ ID NO: 19971 - DNA, 20 bp, Artificial Sequence
  Antisense compound
cttctgttattaaaacacca

SEQ ID NO: 19972 - DNA, 20 bp, Artificial Sequence
  Antisense compound
ccttctgttattaaaacacc

SEQ ID NO: 19973 - DNA, 20 bp, Artificial Sequence
  Antisense compound
accttctgttattaaaacac

SEQ ID NO: 19974 - DNA, 20 bp, Artificial Sequence
  Antisense compound
aaccttctgttattaaaaca

SEQ ID NO: 19975 - DNA, 20 bp, Artificial Sequence
  Antisense compound
gaaccttctgttattaaaac

SEQ ID NO: 19976 - DNA, 20 bp, Artificial Sequence
  Antisense compound
tgaaccttctgttattaaaa

SEQ ID NO: 19977 - DNA, 20 bp, Artificial Sequence
  Antisense compound
ctgaaccttctgttattaaa

SEQ ID NO: 19978 - DNA, 20 bp, Artificial Sequence
  Antisense compound
actgaaccttctgttattaa

SEQ ID NO: 19979 - DNA, 20 bp, Artificial Sequence
  Antisense compound
gactgaaccttctgttatta

SEQ ID NO: 19980 - DNA, 20 bp, Artificial Sequence
  Antisense compound
tgactgaaccttctgttatt

SEQ ID NO: 19981 - DNA, 20 bp, Artificial Sequence
  Antisense compound
ttgactgaaccttctgttat

SEQ ID NO: 19982 - DNA, 20 bp, Artificial Sequence
  Antisense compound
tttgactgaaccttctgtta

SEQ ID NO: 19983 - DNA, 20 bp, Artificial Sequence
  Antisense compound
ctttgactgaaccttctgtt

SEQ ID NO: 19984 - DNA, 20 bp, Artificial Sequence
  Antisense compound
cctttgactgaaccttctgt

SEQ ID NO: 19985 - DNA, 20 bp, Artificial Sequence
  Antisense compound
acctttgactgaaccttctg

SEQ ID NO: 19986 - DNA, 20 bp, Artificial Sequence
  Antisense compound
gacctttgactgaaccttct

SEQ ID NO: 19987 - DNA, 20 bp, Artificial Sequence
  Antisense compound
agacctttgactgaaccttc

SEQ ID NO: 19988 - DNA, 20 bp, Artificial Sequence
  Antisense compound
tagacctttgactgaacctt

SEQ ID NO: 19989 - DNA, 20 bp, Artificial Sequence
  Antisense compound
ttagacctttgactgaacct

SEQ ID NO: 19990 - DNA, 20 bp, Artificial Sequence
  Antisense compound
gttagacctttgactgaacc

SEQ ID NO: 19991 - DNA, 20 bp, Artificial Sequence
  Antisense compound
tgttagacctttgactgaac

SEQ ID NO: 19992 - DNA, 20 bp, Artificial Sequence
  Antisense compound
gtgttagacctttgactgaa

SEQ ID NO: 19993 - DNA, 20 bp, Artificial Sequence
  Antisense compound
ggtgttagacctttgactga

SEQ ID NO: 19994 - DNA, 20 bp, Artificial Sequence
  Antisense compound
aggtgttagacctttgactg

SEQ ID NO: 19995 - DNA, 20 bp, Artificial Sequence
  Antisense compound
aaggtgttagacctttgact

SEQ ID NO: 19996 - DNA, 20 bp, Artificial Sequence
  Antisense compound
gaaggtgttagacctttgac

SEQ ID NO: 19997 - DNA, 20 bp, Artificial Sequence
  Antisense compound
tgaaggtgttagacctttga

SEQ ID NO: 19998 - DNA, 20 bp, Artificial Sequence
  Antisense compound
ttgaaggtgttagacctttg

SEQ ID NO: 19999 - DNA, 20 bp, Artificial Sequence
  Antisense compound
tttgaaggtgttagaccttt

SEQ ID NO: 20000 - DNA, 20 bp, Artificial Sequence
  Antisense compound
ctttgaaggtgttagacctt

SEQ ID NO: 20001 - DNA, 20 bp, Artificial Sequence
  Antisense compound
cctttgaaggtgttagacct

SEQ ID NO: 20002 - DNA, 20 bp, Artificial Sequence
  Antisense compound
ccctttgaaggtgttagacc

SEQ ID NO: 20003 - DNA, 20 bp, Artificial Sequence
  Antisense compound
tccctttgaaggtgttagac

SEQ ID NO: 20004 - DNA, 20 bp, Artificial Sequence
  Antisense compound
gtccctttgaaggtgttaga

SEQ ID NO: 20005 - DNA, 20 bp, Artificial Sequence
  Antisense compound
ggtccctttgaaggtgttag

SEQ ID NO: 20006 - DNA, 20 bp, Artificial Sequence
  Antisense compound
tggtccctttgaaggtgtta

SEQ ID NO: 20007 - DNA, 20 bp, Artificial Sequence
  Antisense compound
ctggtccctttgaaggtgtt

SEQ ID NO: 20008 - DNA, 20 bp, Artificial Sequence
  Antisense compound
gctggtccctttgaaggtgt

SEQ ID NO: 20009 - DNA, 20 bp, Artificial Sequence
  Antisense compound
tgctggtccctttgaaggtg

SEQ ID NO: 20010 - DNA, 20 bp, Artificial Sequence
  Antisense compound
gtgctggtccctttgaaggt

SEQ ID NO: 20011 - DNA, 20 bp, Artificial Sequence
  Antisense compound
tgtgctggtccctttgaagg

SEQ ID NO: 20012 - DNA, 20 bp, Artificial Sequence
  Antisense compound
ttgtgctggtccctttgaag

SEQ ID NO: 20013 - DNA, 20 bp, Artificial Sequence
  Antisense compound
cttgtgctggtccctttgaa

SEQ ID NO: 20014 - DNA, 20 bp, Artificial Sequence
  Antisense compound
gcttgtgctggtccctttga

SEQ ID NO: 20015 - DNA, 20 bp, Artificial Sequence
  Antisense compound
agcttgtgctggtccctttg

SEQ ID NO: 20016 - DNA, 20 bp, Artificial Sequence
  Antisense compound
tagcttgtgctggtcccttt

SEQ ID NO: 20017 - DNA, 20 bp, Artificial Sequence
  Antisense compound
ctagcttgtgctggtccctt

SEQ ID NO: 20018 - DNA, 20 bp, Artificial Sequence
  Antisense compound
gctagcttgtgctggtccct

SEQ ID NO: 20019 - DNA, 20 bp, Artificial Sequence
  Antisense compound
cgctagcttgtgctggtccc

SEQ ID NO: 20020 - DNA, 20 bp, Artificial Sequence
  Antisense compound
acgctagcttgtgctggtcc

SEQ ID NO: 20021 - DNA, 20 bp, Artificial Sequence
  Antisense compound
gacgctagcttgtgctggtc

SEQ ID NO: 20022 - DNA, 20 bp, Artificial Sequence
  Antisense compound
tgacgctagcttgtgctggt

SEQ ID NO: 20023 - DNA, 20 bp, Artificial Sequence
  Antisense compound
ttgacgctagcttgtgctgg

SEQ ID NO: 20024 - DNA, 20 bp, Artificial Sequence
  Antisense compound
attgacgctagcttgtgctg

SEQ ID NO: 20025 - DNA, 20 bp, Artificial Sequence
  Antisense compound
cattgacgctagcttgtgct

SEQ ID NO: 20026 - DNA, 20 bp, Artificial Sequence
  Antisense compound
ccattgacgctagcttgtgc

SEQ ID NO: 20027 - DNA, 20 bp, Artificial Sequence
  Antisense compound
tccattgacgctagcttgtg

SEQ ID NO: 20028 - DNA, 20 bp, Artificial Sequence
  Antisense compound
ctccattgacgctagcttgt

SEQ ID NO: 20029 - DNA, 20 bp, Artificial Sequence
  Antisense compound
actccattgacgctagcttg

SEQ ID NO: 20030 - DNA, 20 bp, Artificial Sequence
  Antisense compound
gactccattgacgctagctt

SEQ ID NO: 20031 - DNA, 20 bp, Artificial Sequence
  Antisense compound
tgactccattgacgctagct

SEQ ID NO: 20032 - DNA, 20 bp, Artificial Sequence
  Antisense compound
gtgactccattgacgctagc

SEQ ID NO: 20033 - DNA, 20 bp, Artificial Sequence
  Antisense compound
tgtgactccattgacgctag

SEQ ID NO: 20034 - DNA, 20 bp, Artificial Sequence
  Antisense compound
atgtgactccattgacgcta

SEQ ID NO: 20035 - DNA, 20 bp, Artificial Sequence
  Antisense compound
aatgtgactccattgacgct

SEQ ID NO: 20036 - DNA, 20 bp, Artificial Sequence
  Antisense compound
taatgtgactccattgacgc

SEQ ID NO: 20037 - DNA, 20 bp, Artificial Sequence
  Antisense compound
ttaatgtgactccattgacg

SEQ ID NO: 20038 - DNA, 20 bp, Artificial Sequence
  Antisense compound
attaatgtgactccattgac

SEQ ID NO: 20039 - DNA, 20 bp, Artificial Sequence
  Antisense compound
aattaatgtgactccattga

SEQ ID NO: 20040 - DNA, 20 bp, Artificial Sequence
  Antisense compound
caattaatgtgactccattg

SEQ ID NO: 20041 - DNA, 20 bp, Artificial Sequence
  Antisense compound
ccaattaatgtgactccatt

SEQ ID NO: 20042 - DNA, 20 bp, Artificial Sequence
  Antisense compound
tccaattaatgtgactccat

SEQ ID NO: 20043 - DNA, 20 bp, Artificial Sequence
  Antisense compound
ctccaattaatgtgactcca

SEQ ID NO: 20044 - DNA, 20 bp, Artificial Sequence
  Antisense compound
tctccaattaatgtgactcc

SEQ ID NO: 20045 - DNA, 20 bp, Artificial Sequence
  Antisense compound
ttctccaattaatgtgactc

SEQ ID NO: 20046 - DNA, 20 bp, Artificial Sequence
  Antisense compound
attctccaattaatgtgact

SEQ ID NO: 20047 - DNA, 20 bp, Artificial Sequence
  Antisense compound
gattctccaattaatgtgac

SEQ ID NO: 20048 - DNA, 20 bp, Artificial Sequence
  Antisense compound
tgattctccaattaatgtga

SEQ ID NO: 20049 - DNA, 20 bp, Artificial Sequence
  Antisense compound
ctgattctccaattaatgtg

SEQ ID NO: 20050 - DNA, 20 bp, Artificial Sequence
  Antisense compound
actgattctccaattaatgt

SEQ ID NO: 20051 - DNA, 20 bp, Artificial Sequence
  Antisense compound
tactgattctccaattaatg

SEQ ID NO: 20052 - DNA, 20 bp, Artificial Sequence
  Antisense compound
ttactgattctccaattaat

SEQ ID NO: 20053 - DNA, 20 bp, Artificial Sequence
  Antisense compound
tttactgattctccaattaa

SEQ ID NO: 20054 - DNA, 20 bp, Artificial Sequence
  Antisense compound
ttttactgattctccaatta

SEQ ID NO: 20055 - DNA, 20 bp, Artificial Sequence
  Antisense compound
tttttactgattctccaatt

SEQ ID NO: 20056 - DNA, 20 bp, Artificial Sequence
  Antisense compound
gtttttactgattctccaat

SEQ ID NO: 20057 - DNA, 20 bp, Artificial Sequence
  Antisense compound
tgtttttactgattctccaa

SEQ ID NO: 20058 - DNA, 20 bp, Artificial Sequence
  Antisense compound
gtgtttttactgattctcca

SEQ ID NO: 20059 - DNA, 20 bp, Artificial Sequence
  Antisense compound
tgtgtttttactgattctcc

SEQ ID NO: 20060 - DNA, 20 bp, Artificial Sequence
  Antisense compound
ctgtgtttttactgattctc

SEQ ID NO: 20061 - DNA, 20 bp, Artificial Sequence
  Antisense compound
actgtgtttttactgattct

SEQ ID NO: 20062 - DNA, 20 bp, Artificial Sequence
  Antisense compound
aactgtgtttttactgattc

SEQ ID NO: 20063 - DNA, 20 bp, Artificial Sequence
  Antisense compound
aaactgtgtttttactgatt

SEQ ID NO: 20064 - DNA, 20 bp, Artificial Sequence
  Antisense compound
taaactgtgtttttactgat

SEQ ID NO: 20065 - DNA, 20 bp, Artificial Sequence
  Antisense compound
ttaaactgtgtttttactga

SEQ ID NO: 20066 - DNA, 20 bp, Artificial Sequence
  Antisense compound
gttaaactgtgtttttactg

SEQ ID NO: 20067 - DNA, 20 bp, Artificial Sequence
  Antisense compound
agttaaactgtgtttttact

SEQ ID NO: 20068 - DNA, 20 bp, Artificial Sequence
  Antisense compound
tagttaaactgtgtttttac

SEQ ID NO: 20069 - DNA, 20 bp, Artificial Sequence
  Antisense compound
gtagttaaactgtgttttta

SEQ ID NO: 20070 - DNA, 20 bp, Artificial Sequence
  Antisense compound
agtagttaaactgtgttttt

SEQ ID NO: 20071 - DNA, 20 bp, Artificial Sequence
  Antisense compound
aagtagttaaactgtgtttt

SEQ ID NO: 20072 - DNA, 20 bp, Artificial Sequence
  Antisense compound
aaagtagttaaactgtgttt

SEQ ID NO: 20073 - DNA, 20 bp, Artificial Sequence
  Antisense compound
taaagtagttaaactgtgtt

SEQ ID NO: 20074 - DNA, 20 bp, Artificial Sequence
  Antisense compound
ttaaagtagttaaactgtgt

SEQ ID NO: 20075 - DNA, 20 bp, Artificial Sequence
  Antisense compound
cttaaagtagttaaactgtg

SEQ ID NO: 20076 - DNA, 20 bp, Artificial Sequence
  Antisense compound
tcttaaagtagttaaactgt

SEQ ID NO: 20077 - DNA, 20 bp, Artificial Sequence
  Antisense compound
ttcttaaagtagttaaactg

SEQ ID NO: 20078 - DNA, 20 bp, Artificial Sequence
  Antisense compound
tttcttaaagtagttaaact

SEQ ID NO: 20079 - DNA, 20 bp, Artificial Sequence
  Antisense compound
ctttcttaaagtagttaaac

SEQ ID NO: 20080 - DNA, 20 bp, Artificial Sequence
  Antisense compound
actttcttaaagtagttaaa

SEQ ID NO: 20081 - DNA, 20 bp, Artificial Sequence
  Antisense compound
tactttcttaaagtagttaa

SEQ ID NO: 20082 - DNA, 20 bp, Artificial Sequence
  Antisense compound
ctactttcttaaagtagtta

SEQ ID NO: 20083 - DNA, 20 bp, Artificial Sequence
  Antisense compound
tctactttcttaaagtagtt

SEQ ID NO: 20084 - DNA, 20 bp, Artificial Sequence
  Antisense compound
gtctactttcttaaagtagt

SEQ ID NO: 20085 - DNA, 20 bp, Artificial Sequence
  Antisense compound
cgtctactttcttaaagtag

SEQ ID NO: 20086 - DNA, 20 bp, Artificial Sequence
  Antisense compound
ccgtctactttcttaaagta

SEQ ID NO: 20087 - DNA, 20 bp, Artificial Sequence
  Antisense compound
gccgtctactttcttaaagt

SEQ ID NO: 20088 - DNA, 20 bp, Artificial Sequence
  Antisense compound
tgccgtctactttcttaaag

SEQ ID NO: 20089 - DNA, 20 bp, Artificial Sequence
  Antisense compound
atgccgtctactttcttaaa

SEQ ID NO: 20090 - DNA, 20 bp, Artificial Sequence
  Antisense compound
aatgccgtctactttcttaa

SEQ ID NO: 20091 - DNA, 20 bp, Artificial Sequence
  Antisense compound
taatgccgtctactttctta

SEQ ID NO: 20092 - DNA, 20 bp, Artificial Sequence
  Antisense compound
ataatgccgtctactttctt

SEQ ID NO: 20093 - DNA, 20 bp, Artificial Sequence
  Antisense compound
aataatgccgtctactttct

SEQ ID NO: 20094 - DNA, 20 bp, Artificial Sequence
  Antisense compound
gaataatgccgtctactttc

SEQ ID NO: 20095 - DNA, 20 bp, Artificial Sequence
  Antisense compound
tgaataatgccgtctacttt

SEQ ID NO: 20096 - DNA, 20 bp, Artificial Sequence
  Antisense compound
ttgaataatgccgtctactt

SEQ ID NO: 20097 - DNA, 20 bp, Artificial Sequence
  Antisense compound
gttgaataatgccgtctact

SEQ ID NO: 20098 - DNA, 20 bp, Artificial Sequence
  Antisense compound
tgttgaataatgccgtctac

SEQ ID NO: 20099 - DNA, 20 bp, Artificial Sequence
  Antisense compound
ctgttgaataatgccgtcta

SEQ ID NO: 20100 - DNA, 20 bp, Artificial Sequence
  Antisense compound
actgttgaataatgccgtct

SEQ ID NO: 20101 - DNA, 20 bp, Artificial Sequence
  Antisense compound
aactgttgaataatgccgtc

SEQ ID NO: 20102 - DNA, 20 bp, Artificial Sequence
  Antisense compound
caactgttgaataatgccgt

SEQ ID NO: 20103 - DNA, 20 bp, Artificial Sequence
  Antisense compound
gcaactgttgaataatgccg

SEQ ID NO: 20104 - DNA, 20 bp, Artificial Sequence
  Antisense compound
ggcaactgttgaataatgcc

SEQ ID NO: 20105 - DNA, 20 bp, Artificial Sequence
  Antisense compound
aggcaactgttgaataatgc

SEQ ID NO: 20106 - DNA, 20 bp, Artificial Sequence
  Antisense compound
caggcaactgttgaataatg

SEQ ID NO: 20107 - DNA, 20 bp, Artificial Sequence
  Antisense compound
tcaggcaactgttgaataat

SEQ ID NO: 20108 - DNA, 20 bp, Artificial Sequence
  Antisense compound
ttcaggcaactgttgaataa

SEQ ID NO: 20109 - DNA, 20 bp, Artificial Sequence
  Antisense compound
tttcaggcaactgttgaata

SEQ ID NO: 20110 - DNA, 20 bp, Artificial Sequence
  Antisense compound
gtttcaggcaactgttgaat

SEQ ID NO: 20111 - DNA, 20 bp, Artificial Sequence
  Antisense compound
ggtttcaggcaactgttgaa

SEQ ID NO: 20112 - DNA, 20 bp, Artificial Sequence
  Antisense compound
aggtttcaggcaactgttga

SEQ ID NO: 20113 - DNA, 20 bp, Artificial Sequence
  Antisense compound
taggtttcaggcaactgttg

SEQ ID NO: 20114 - DNA, 20 bp, Artificial Sequence
  Antisense compound
gtaggtttcaggcaactgtt

SEQ ID NO: 20115 - DNA, 20 bp, Artificial Sequence
  Antisense compound
agtaggtttcaggcaactgt

SEQ ID NO: 20116 - DNA, 20 bp, Artificial Sequence
  Antisense compound
aagtaggtttcaggcaactg

SEQ ID NO: 20117 - DNA, 20 bp, Artificial Sequence
  Antisense compound
aaagtaggtttcaggcaact

SEQ ID NO: 20118 - DNA, 20 bp, Artificial Sequence
  Antisense compound
taaagtaggtttcaggcaac

SEQ ID NO: 20119 - DNA, 20 bp, Artificial Sequence
  Antisense compound
gtaaagtaggtttcaggcaa

SEQ ID NO: 20120 - DNA, 20 bp, Artificial Sequence
  Antisense compound
agtaaagtaggtttcaggca

SEQ ID NO: 20121 - DNA, 20 bp, Artificial Sequence
  Antisense compound
gagtaaagtaggtttcaggc

SEQ ID NO: 20122 - DNA, 20 bp, Artificial Sequence
  Antisense compound
tgagtaaagtaggtttcagg

SEQ ID NO: 20123 - DNA, 20 bp, Artificial Sequence
  Antisense compound
ctgagtaaagtaggtttcag

SEQ ID NO: 20124 - DNA, 20 bp, Artificial Sequence
  Antisense compound
tctgagtaaagtaggtttca

SEQ ID NO: 20125 - DNA, 20 bp, Artificial Sequence
  Antisense compound
ctctgagtaaagtaggtttc

SEQ ID NO: 20126 - DNA, 20 bp, Artificial Sequence
  Antisense compound
gctctgagtaaagtaggttt

SEQ ID NO: 20127 - DNA, 20 bp, Artificial Sequence
  Antisense compound
tgctctgagtaaagtaggtt

SEQ ID NO: 20128 - DNA, 20 bp, Artificial Sequence
  Antisense compound
ctgctctgagtaaagtaggt

SEQ ID NO: 20129 - DNA, 20 bp, Artificial Sequence
  Antisense compound
tctgctctgagtaaagtagg

SEQ ID NO: 20130 - DNA, 20 bp, Artificial Sequence
  Antisense compound
ctctgctctgagtaaagtag

SEQ ID NO: 20131 - DNA, 20 bp, Artificial Sequence
  Antisense compound
tctctgctctgagtaaagta

SEQ ID NO: 20132 - DNA, 20 bp, Artificial Sequence
  Antisense compound
gtctctgctctgagtaaagt

SEQ ID NO: 20133 - DNA, 20 bp, Artificial Sequence
  Antisense compound
agtctctgctctgagtaaag

SEQ ID NO: 20134 - DNA, 20 bp, Artificial Sequence
  Antisense compound
aagtctctgctctgagtaaa

SEQ ID NO: 20135 - DNA, 20 bp, Artificial Sequence
  Antisense compound
taagtctctgctctgagtaa

SEQ ID NO: 20136 - DNA, 20 bp, Artificial Sequence
  Antisense compound
ctaagtctctgctctgagta

SEQ ID NO: 20137 - DNA, 20 bp, Artificial Sequence
  Antisense compound
tctaagtctctgctctgagt

SEQ ID NO: 20138 - DNA, 20 bp, Artificial Sequence
  Antisense compound
ctctaagtctctgctctgag

SEQ ID NO: 20139 - DNA, 20 bp, Artificial Sequence
  Antisense compound
cctctaagtctctgctctga

SEQ ID NO: 20140 - DNA, 20 bp, Artificial Sequence
  Antisense compound
tcctctaagtctctgctctg

SEQ ID NO: 20141 - DNA, 20 bp, Artificial Sequence
  Antisense compound
atcctctaagtctctgctct

SEQ ID NO: 20142 - DNA, 20 bp, Artificial Sequence
  Antisense compound
aatcctctaagtctctgctc

SEQ ID NO: 20143 - DNA, 20 bp, Artificial Sequence
  Antisense compound
aaatcctctaagtctctgct

SEQ ID NO: 20144 - DNA, 20 bp, Artificial Sequence
  Antisense compound
aaaatcctctaagtctctgc

SEQ ID NO: 20145 - DNA, 20 bp, Artificial Sequence
  Antisense compound
taaaatcctctaagtctctg

SEQ ID NO: 20146 - DNA, 20 bp, Artificial Sequence
  Antisense compound
ttaaaatcctctaagtctct

SEQ ID NO: 20147 - DNA, 20 bp, Artificial Sequence
  Antisense compound
cttaaaatcctctaagtctc

SEQ ID NO: 20148 - DNA, 20 bp, Artificial Sequence
  Antisense compound
gcttaaaatcctctaagtct

SEQ ID NO: 20149 - DNA, 20 bp, Artificial Sequence
  Antisense compound
ggcttaaaatcctctaagtc

SEQ ID NO: 20150 - DNA, 20 bp, Artificial Sequence
  Antisense compound
gggcttaaaatcctctaagt

SEQ ID NO: 20151 - DNA, 20 bp, Artificial Sequence
  Antisense compound
tgggcttaaaatcctctaag

SEQ ID NO: 20152 - DNA, 20 bp, Artificial Sequence
  Antisense compound
ctgggcttaaaatcctctaa

SEQ ID NO: 20153 - DNA, 20 bp, Artificial Sequence
  Antisense compound
tctgggcttaaaatcctcta

SEQ ID NO: 20154 - DNA, 20 bp, Artificial Sequence
  Antisense compound
atctgggcttaaaatcctct

SEQ ID NO: 20155 - DNA, 20 bp, Artificial Sequence
  Antisense compound
gatctgggcttaaaatcctc

SEQ ID NO: 20156 - DNA, 20 bp, Artificial Sequence
  Antisense compound
tgatctgggcttaaaatcct

SEQ ID NO: 20157 - DNA, 20 bp, Artificial Sequence
  Antisense compound
gtgatctgggcttaaaatcc

SEQ ID NO: 20158 - DNA, 20 bp, Artificial Sequence
  Antisense compound
tgtgatctgggcttaaaatc

SEQ ID NO: 20159 - DNA, 20 bp, Artificial Sequence
  Antisense compound
ttgtgatctgggcttaaaat

SEQ ID NO: 20160 - DNA, 20 bp, Artificial Sequence
  Antisense compound
tttgtgatctgggcttaaaa

SEQ ID NO: 20161 - DNA, 20 bp, Artificial Sequence
  Antisense compound
atttgtgatctgggcttaaa

SEQ ID NO: 20162 - DNA, 20 bp, Artificial Sequence
  Antisense compound
catttgtgatctgggcttaa

SEQ ID NO: 20163 - DNA, 20 bp, Artificial Sequence
  Antisense compound
ccatttgtgatctgggctta

SEQ ID NO: 20164 - DNA, 20 bp, Artificial Sequence
  Antisense compound
tccatttgtgatctgggctt

SEQ ID NO: 20165 - DNA, 20 bp, Artificial Sequence
  Antisense compound
ttccatttgtgatctgggct

SEQ ID NO: 20166 - DNA, 20 bp, Artificial Sequence
  Antisense compound
tttccatttgtgatctgggc

SEQ ID NO: 20167 - DNA, 20 bp, Artificial Sequence
  Antisense compound
gtttccatttgtgatctggg

SEQ ID NO: 20168 - DNA, 20 bp, Artificial Sequence
  Antisense compound
agtttccatttgtgatctgg

SEQ ID NO: 20169 - DNA, 20 bp, Artificial Sequence
  Antisense compound
cagtttccatttgtgatctg

SEQ ID NO: 20170 - DNA, 20 bp, Artificial Sequence
  Antisense compound
tcagtttccatttgtgatct

SEQ ID NO: 20171 - DNA, 20 bp, Artificial Sequence
  Antisense compound
gtcagtttccatttgtgatc

SEQ ID NO: 20172 - DNA, 20 bp, Artificial Sequence
  Antisense compound
agtcagtttccatttgtgat

SEQ ID NO: 20173 - DNA, 20 bp, Artificial Sequence
  Antisense compound
aagtcagtttccatttgtga

SEQ ID NO: 20174 - DNA, 20 bp, Artificial Sequence
  Antisense compound
aaagtcagtttccatttgtg

SEQ ID NO: 20175 - DNA, 20 bp, Artificial Sequence
  Antisense compound
gaaagtcagtttccatttgt

SEQ ID NO: 20176 - DNA, 20 bp, Artificial Sequence
  Antisense compound
agaaagtcagtttccatttg

SEQ ID NO: 20177 - DNA, 20 bp, Artificial Sequence
  Antisense compound
gagaaagtcagtttccattt

SEQ ID NO: 20178 - DNA, 20 bp, Artificial Sequence
  Antisense compound
cgagaaagtcagtttccatt

SEQ ID NO: 20179 - DNA, 20 bp, Artificial Sequence
  Antisense compound
tcgagaaagtcagtttccat

SEQ ID NO: 20180 - DNA, 20 bp, Artificial Sequence
  Antisense compound
ctcgagaaagtcagtttcca

SEQ ID NO: 20181 - DNA, 20 bp, Artificial Sequence
  Antisense compound
gctcgagaaagtcagtttcc

SEQ ID NO: 20182 - DNA, 20 bp, Artificial Sequence
  Antisense compound
agctcgagaaagtcagtttc

SEQ ID NO: 20183 - DNA, 20 bp, Artificial Sequence
  Antisense compound
gagctcgagaaagtcagttt

SEQ ID NO: 20184 - DNA, 20 bp, Artificial Sequence
  Antisense compound
cgagctcgagaaagtcagtt

SEQ ID NO: 20185 - DNA, 20 bp, Artificial Sequence
  Antisense compound
gcgagctcgagaaagtcagt

SEQ ID NO: 20186 - DNA, 20 bp, Artificial Sequence
  Antisense compound
agcgagctcgagaaagtcag

SEQ ID NO: 20187 - DNA, 20 bp, Artificial Sequence
  Antisense compound
tagcgagctcgagaaagtca

SEQ ID NO: 20188 - DNA, 20 bp, Artificial Sequence
  Antisense compound
atagcgagctcgagaaagtc

SEQ ID NO: 20189 - DNA, 20 bp, Artificial Sequence
  Antisense compound
catagcgagctcgagaaagt

SEQ ID NO: 20190 - DNA, 20 bp, Artificial Sequence
  Antisense compound
ccatagcgagctcgagaaag

SEQ ID NO: 20191 - DNA, 20 bp, Artificial Sequence
  Antisense compound
tccatagcgagctcgagaaa

SEQ ID NO: 20192 - DNA, 20 bp, Artificial Sequence
  Antisense compound
atccatagcgagctcgagaa

SEQ ID NO: 20193 - DNA, 20 bp, Artificial Sequence
  Antisense compound
catccatagcgagctcgaga

SEQ ID NO: 20194 - DNA, 20 bp, Artificial Sequence
  Antisense compound
tcatccatagcgagctcgag

SEQ ID NO: 20195 - DNA, 20 bp, Artificial Sequence
  Antisense compound
ttcatccatagcgagctcga

SEQ ID NO: 20196 - DNA, 20 bp, Artificial Sequence
  Antisense compound
attcatccatagcgagctcg

SEQ ID NO: 20197 - DNA, 20 bp, Artificial Sequence
  Antisense compound
aattcatccatagcgagctc

SEQ ID NO: 20198 - DNA, 20 bp, Artificial Sequence
  Antisense compound
gaattcatccatagcgagct

SEQ ID NO: 20199 - DNA, 20 bp, Artificial Sequence
  Antisense compound
tgaattcatccatagcgagc

SEQ ID NO: 20200 - DNA, 20 bp, Artificial Sequence
  Antisense compound
atgaattcatccatagcgag

SEQ ID NO: 20201 - DNA, 20 bp, Artificial Sequence
  Antisense compound
tatgaattcatccatagcga

SEQ ID NO: 20202 - DNA, 20 bp, Artificial Sequence
  Antisense compound
gtatgaattcatccatagcg

SEQ ID NO: 20203 - DNA, 20 bp, Artificial Sequence
  Antisense compound
tgtatgaattcatccatagc

SEQ ID NO: 20204 - DNA, 20 bp, Artificial Sequence
  Antisense compound
ctgtatgaattcatccatag

SEQ ID NO: 20205 - DNA, 20 bp, Artificial Sequence
  Antisense compound
gctgtatgaattcatccata

SEQ ID NO: 20206 - DNA, 20 bp, Artificial Sequence
  Antisense compound
cgctgtatgaattcatccat

SEQ ID NO: 20207 - DNA, 20 bp, Artificial Sequence
  Antisense compound
tcgctgtatgaattcatcca

SEQ ID NO: 20208 - DNA, 20 bp, Artificial Sequence
  Antisense compound
atcgctgtatgaattcatcc

SEQ ID NO: 20209 - DNA, 20 bp, Artificial Sequence
  Antisense compound
tatcgctgtatgaattcatc

SEQ ID NO: 20210 - DNA, 20 bp, Artificial Sequence
  Antisense compound
atatcgctgtatgaattcat

SEQ ID NO: 20211 - DNA, 20 bp, Artificial Sequence
  Antisense compound
tatatcgctgtatgaattca

SEQ ID NO: 20212 - DNA, 20 bp, Artificial Sequence
  Antisense compound
ttatatcgctgtatgaattc

SEQ ID NO: 20213 - DNA, 20 bp, Artificial Sequence
  Antisense compound
cttatatcgctgtatgaatt

SEQ ID NO: 20214 - DNA, 20 bp, Artificial Sequence
  Antisense compound
gcttatatcgctgtatgaat

SEQ ID NO: 20215 - DNA, 20 bp, Artificial Sequence
  Antisense compound
agcttatatcgctgtatgaa

SEQ ID NO: 20216 - DNA, 20 bp, Artificial Sequence
  Antisense compound
gagcttatatcgctgtatga

SEQ ID NO: 20217 - DNA, 20 bp, Artificial Sequence
  Antisense compound
cgagcttatatcgctgtatg

SEQ ID NO: 20218 - DNA, 20 bp, Artificial Sequence
  Antisense compound
tcgagcttatatcgctgtat

SEQ ID NO: 20219 - DNA, 20 bp, Artificial Sequence
  Antisense compound
ctcgagcttatatcgctgta

SEQ ID NO: 20220 - DNA, 20 bp, Artificial Sequence
  Antisense compound
cctcgagcttatatcgctgt

SEQ ID NO: 20221 - DNA, 20 bp, Artificial Sequence
  Antisense compound
ccctcgagcttatatcgctg

SEQ ID NO: 20222 - DNA, 20 bp, Artificial Sequence
  Antisense compound
gccctcgagcttatatcgct

SEQ ID NO: 20223 - DNA, 20 bp, Artificial Sequence
  Antisense compound
agccctcgagcttatatcgc

SEQ ID NO: 20224 - DNA, 20 bp, Artificial Sequence
  Antisense compound
tagccctcgagcttatatcg

SEQ ID NO: 20225 - DNA, 20 bp, Artificial Sequence
  Antisense compound
atagccctcgagcttatatc

SEQ ID NO: 20226 - DNA, 20 bp, Artificial Sequence
  Antisense compound
catagccctcgagcttatat

SEQ ID NO: 20227 - DNA, 20 bp, Artificial Sequence
  Antisense compound
gcatagccctcgagcttata

SEQ ID NO: 20228 - DNA, 20 bp, Artificial Sequence
  Antisense compound
ggcatagccctcgagcttat

SEQ ID NO: 20229 - DNA, 20 bp, Artificial Sequence
  Antisense compound
aggcatagccctcgagctta

SEQ ID NO: 20230 - DNA, 20 bp, Artificial Sequence
  Antisense compound
aaggcatagccctcgagctt

SEQ ID NO: 20231 - DNA, 20 bp, Artificial Sequence
  Antisense compound
gaaggcatagccctcgagct

SEQ ID NO: 20232 - DNA, 20 bp, Artificial Sequence
  Antisense compound
cgaaggcatagccctcgagc

SEQ ID NO: 20233 - DNA, 20 bp, Artificial Sequence
  Antisense compound
tcgaaggcatagccctcgag

SEQ ID NO: 20234 - DNA, 20 bp, Artificial Sequence
  Antisense compound
ttcgaaggcatagccctcga

SEQ ID NO: 20235 - DNA, 20 bp, Artificial Sequence
  Antisense compound
gttcgaaggcatagccctcg

SEQ ID NO: 20236 - DNA, 20 bp, Artificial Sequence
  Antisense compound
tgttcgaaggcatagccctc

SEQ ID NO: 20237 - DNA, 20 bp, Artificial Sequence
  Antisense compound
gtgttcgaaggcatagccct

SEQ ID NO: 20238 - DNA, 20 bp, Artificial Sequence
  Antisense compound
tgtgttcgaaggcatagccc

SEQ ID NO: 20239 - DNA, 20 bp, Artificial Sequence
  Antisense compound
atgtgttcgaaggcatagcc

SEQ ID NO: 20240 - DNA, 20 bp, Artificial Sequence
  Antisense compound
gatgtgttcgaaggcatagc

SEQ ID NO: 20241 - DNA, 20 bp, Artificial Sequence
  Antisense compound
cgatgtgttcgaaggcatag

SEQ ID NO: 20242 - DNA, 20 bp, Artificial Sequence
  Antisense compound
acgatgtgttcgaaggcata

SEQ ID NO: 20243 - DNA, 20 bp, Artificial Sequence
  Antisense compound
aacgatgtgttcgaaggcat

SEQ ID NO: 20244 - DNA, 20 bp, Artificial Sequence
  Antisense compound
aaacgatgtgttcgaaggca

SEQ ID NO: 20245 - DNA, 20 bp, Artificial Sequence
  Antisense compound
taaacgatgtgttcgaaggc

SEQ ID NO: 20246 - DNA, 20 bp, Artificial Sequence
  Antisense compound
ataaacgatgtgttcgaagg

SEQ ID NO: 20247 - DNA, 20 bp, Artificial Sequence
  Antisense compound
cataaacgatgtgttcgaag

SEQ ID NO: 20248 - DNA, 20 bp, Artificial Sequence
  Antisense compound
ccataaacgatgtgttcgaa

SEQ ID NO: 20249 - DNA, 20 bp, Artificial Sequence
  Antisense compound
tccataaacgatgtgttcga

SEQ ID NO: 20250 - DNA, 20 bp, Artificial Sequence
  Antisense compound
ctccataaacgatgtgttcg

SEQ ID NO: 20251 - DNA, 20 bp, Artificial Sequence
  Antisense compound
tctccataaacgatgtgttc

SEQ ID NO: 20252 - DNA, 20 bp, Artificial Sequence
  Antisense compound
atctccataaacgatgtgtt

SEQ ID NO: 20253 - DNA, 20 bp, Artificial Sequence
  Antisense compound
aatctccataaacgatgtgt

SEQ ID NO: 20254 - DNA, 20 bp, Artificial Sequence
  Antisense compound
aaatctccataaacgatgtg

SEQ ID NO: 20255 - DNA, 20 bp, Artificial Sequence
  Antisense compound
gaaatctccataaacgatgt

SEQ ID NO: 20256 - DNA, 20 bp, Artificial Sequence
  Antisense compound
tgaaatctccataaacgatg

SEQ ID NO: 20257 - DNA, 20 bp, Artificial Sequence
  Antisense compound
ctgaaatctccataaacgat

SEQ ID NO: 20258 - DNA, 20 bp, Artificial Sequence
  Antisense compound
actgaaatctccataaacga

SEQ ID NO: 20259 - DNA, 20 bp, Artificial Sequence
  Antisense compound
gactgaaatctccataaacg

SEQ ID NO: 20260 - DNA, 20 bp, Artificial Sequence
  Antisense compound
tgactgaaatctccataaac

SEQ ID NO: 20261 - DNA, 20 bp, Artificial Sequence
  Antisense compound
atgactgaaatctccataaa

SEQ ID NO: 20262 - DNA, 20 bp, Artificial Sequence
  Antisense compound
catgactgaaatctccataa

SEQ ID NO: 20263 - DNA, 20 bp, Artificial Sequence
  Antisense compound
ccatgactgaaatctccata

SEQ ID NO: 20264 - DNA, 20 bp, Artificial Sequence
  Antisense compound
tccatgactgaaatctccat

SEQ ID NO: 20265 - DNA, 20 bp, Artificial Sequence
  Antisense compound
gtccatgactgaaatctcca

SEQ ID NO: 20266 - DNA, 20 bp, Artificial Sequence
  Antisense compound
tgtccatgactgaaatctcc

SEQ ID NO: 20267 - DNA, 20 bp, Artificial Sequence
  Antisense compound
ttgtccatgactgaaatctc

SEQ ID NO: 20268 - DNA, 20 bp, Artificial Sequence
  Antisense compound
gttgtccatgactgaaatct

SEQ ID NO: 20269 - DNA, 20 bp, Artificial Sequence
  Antisense compound
agttgtccatgactgaaatc

SEQ ID NO: 20270 - DNA, 20 bp, Artificial Sequence
  Antisense compound
aagttgtccatgactgaaat

SEQ ID NO: 20271 - DNA, 20 bp, Artificial Sequence
  Antisense compound
caagttgtccatgactgaaa

SEQ ID NO: 20272 - DNA, 20 bp, Artificial Sequence
  Antisense compound
ccaagttgtccatgactgaa

SEQ ID NO: 20273 - DNA, 20 bp, Artificial Sequence
  Antisense compound
gccaagttgtccatgactga

SEQ ID NO: 20274 - DNA, 20 bp, Artificial Sequence
  Antisense compound
cgccaagttgtccatgactg

SEQ ID NO: 20275 - DNA, 20 bp, Artificial Sequence
  Antisense compound
ccgccaagttgtccatgact

SEQ ID NO: 20276 - DNA, 20 bp, Artificial Sequence
  Antisense compound
accgccaagttgtccatgac

SEQ ID NO: 20277 - DNA, 20 bp, Artificial Sequence
  Antisense compound
gaccgccaagttgtccatga

SEQ ID NO: 20278 - DNA, 20 bp, Artificial Sequence
  Antisense compound
agaccgccaagttgtccatg

SEQ ID NO: 20279 - DNA, 20 bp, Artificial Sequence
  Antisense compound
aagaccgccaagttgtccat

SEQ ID NO: 20280 - DNA, 20 bp, Artificial Sequence
  Antisense compound
gaagaccgccaagttgtcca

SEQ ID NO: 20281 - DNA, 20 bp, Artificial Sequence
  Antisense compound
tgaagaccgccaagttgtcc

SEQ ID NO: 20282 - DNA, 20 bp, Artificial Sequence
  Antisense compound
atgaagaccgccaagttgtc

SEQ ID NO: 20283 - DNA, 20 bp, Artificial Sequence
  Antisense compound
aatgaagaccgccaagttgt

SEQ ID NO: 20284 - DNA, 20 bp, Artificial Sequence
  Antisense compound
aaatgaagaccgccaagttg

SEQ ID NO: 20285 - DNA, 20 bp, Artificial Sequence
  Antisense compound
taaatgaagaccgccaagtt

SEQ ID NO: 20286 - DNA, 20 bp, Artificial Sequence
  Antisense compound
ttaaatgaagaccgccaagt

SEQ ID NO: 20287 - DNA, 20 bp, Artificial Sequence
  Antisense compound
attaaatgaagaccgccaag

SEQ ID NO: 20288 - DNA, 20 bp, Artificial Sequence
  Antisense compound
cattaaatgaagaccgccaa

SEQ ID NO: 20289 - DNA, 20 bp, Artificial Sequence
  Antisense compound
tcattaaatgaagaccgcca

SEQ ID NO: 20290 - DNA, 20 bp, Artificial Sequence
  Antisense compound
atcattaaatgaagaccgcc

SEQ ID NO: 20291 - DNA, 20 bp, Artificial Sequence
  Antisense compound
tatcattaaatgaagaccgc

SEQ ID NO: 20292 - DNA, 20 bp, Artificial Sequence
  Antisense compound
ctatcattaaatgaagaccg

SEQ ID NO: 20293 - DNA, 20 bp, Artificial Sequence
  Antisense compound
cctatcattaaatgaagacc

SEQ ID NO: 20294 - DNA, 20 bp, Artificial Sequence
  Antisense compound
gcctatcattaaatgaagac

SEQ ID NO: 20295 - DNA, 20 bp, Artificial Sequence
  Antisense compound
agcctatcattaaatgaaga

SEQ ID NO: 20296 - DNA, 20 bp, Artificial Sequence
  Antisense compound
aagcctatcattaaatgaag

SEQ ID NO: 20297 - DNA, 20 bp, Artificial Sequence
  Antisense compound
taagcctatcattaaatgaa

SEQ ID NO: 20298 - DNA, 20 bp, Artificial Sequence
  Antisense compound
ctaagcctatcattaaatga

SEQ ID NO: 20299 - DNA, 20 bp, Artificial Sequence
  Antisense compound
gctaagcctatcattaaatg

SEQ ID NO: 20300 - DNA, 20 bp, Artificial Sequence
  Antisense compound
ggctaagcctatcattaaat

SEQ ID NO: 20301 - DNA, 20 bp, Artificial Sequence
  Antisense compound
tggctaagcctatcattaaa

SEQ ID NO: 20302 - DNA, 20 bp, Artificial Sequence
  Antisense compound
ttggctaagcctatcattaa

SEQ ID NO: 20303 - DNA, 20 bp, Artificial Sequence
  Antisense compound
cttggctaagcctatcatta

SEQ ID NO: 20304 - DNA, 20 bp, Artificial Sequence
  Antisense compound
gcttggctaagcctatcatt

SEQ ID NO: 20305 - DNA, 20 bp, Artificial Sequence
  Antisense compound
cgcttggctaagcctatcat

SEQ ID NO: 20306 - DNA, 20 bp, Artificial Sequence
  Antisense compound
gcgcttggctaagcctatca

SEQ ID NO: 20307 - DNA, 20 bp, Artificial Sequence
  Antisense compound
agcgcttggctaagcctatc

SEQ ID NO: 20308 - DNA, 20 bp, Artificial Sequence
  Antisense compound
gagcgcttggctaagcctat

SEQ ID NO: 20309 - DNA, 20 bp, Artificial Sequence
  Antisense compound
tgagcgcttggctaagccta

SEQ ID NO: 20310 - DNA, 20 bp, Artificial Sequence
  Antisense compound
gtgagcgcttggctaagcct

SEQ ID NO: 20311 - DNA, 20 bp, Artificial Sequence
  Antisense compound
tgtgagcgcttggctaagcc

SEQ ID NO: 20312 - DNA, 20 bp, Artificial Sequence
  Antisense compound
ttgtgagcgcttggctaagc

SEQ ID NO: 20313 - DNA, 20 bp, Artificial Sequence
  Antisense compound
cttgtgagcgcttggctaag

SEQ ID NO: 20314 - DNA, 20 bp, Artificial Sequence
  Antisense compound
tcttgtgagcgcttggctaa

SEQ ID NO: 20315 - DNA, 20 bp, Artificial Sequence
  Antisense compound
atcttgtgagcgcttggcta

SEQ ID NO: 20316 - DNA, 20 bp, Artificial Sequence
  Antisense compound
aatcttgtgagcgcttggct

SEQ ID NO: 20317 - DNA, 20 bp, Artificial Sequence
  Antisense compound
gaatcttgtgagcgcttggc

SEQ ID NO: 20318 - DNA, 20 bp, Artificial Sequence
  Antisense compound
tgaatcttgtgagcgcttgg

SEQ ID NO: 20319 - DNA, 20 bp, Artificial Sequence
  Antisense compound
gtgaatcttgtgagcgcttg

SEQ ID NO: 20320 - DNA, 20 bp, Artificial Sequence
  Antisense compound
ggtgaatcttgtgagcgctt

SEQ ID NO: 20321 - DNA, 20 bp, Artificial Sequence
  Antisense compound
tggtgaatcttgtgagcgct

SEQ ID NO: 20322 - DNA, 20 bp, Artificial Sequence
  Antisense compound
gtggtgaatcttgtgagcgc

SEQ ID NO: 20323 - DNA, 20 bp, Artificial Sequence
  Antisense compound
agtggtgaatcttgtgagcg

SEQ ID NO: 20324 - DNA, 20 bp, Artificial Sequence
  Antisense compound
aagtggtgaatcttgtgagc

SEQ ID NO: 20325 - DNA, 20 bp, Artificial Sequence
  Antisense compound
taagtggtgaatcttgtgag

SEQ ID NO: 20326 - DNA, 20 bp, Artificial Sequence
  Antisense compound
ttaagtggtgaatcttgtga

SEQ ID NO: 20327 - DNA, 20 bp, Artificial Sequence
  Antisense compound
tttaagtggtgaatcttgtg

SEQ ID NO: 20328 - DNA, 20 bp, Artificial Sequence
  Antisense compound
atttaagtggtgaatcttgt

SEQ ID NO: 20329 - DNA, 20 bp, Artificial Sequence
  Antisense compound
aatttaagtggtgaatcttg

SEQ ID NO: 20330 - DNA, 20 bp, Artificial Sequence
  Antisense compound
taatttaagtggtgaatctt

SEQ ID NO: 20331 - DNA, 20 bp, Artificial Sequence
  Antisense compound
ctaatttaagtggtgaatct

SEQ ID NO: 20332 - DNA, 20 bp, Artificial Sequence
  Antisense compound
tctaatttaagtggtgaatc

SEQ ID NO: 20333 - DNA, 20 bp, Artificial Sequence
  Antisense compound
ctctaatttaagtggtgaat

SEQ ID NO: 20334 - DNA, 20 bp, Artificial Sequence
  Antisense compound
cctctaatttaagtggtgaa

SEQ ID NO: 20335 - DNA, 20 bp, Artificial Sequence
  Antisense compound
tcctctaatttaagtggtga

SEQ ID NO: 20336 - DNA, 20 bp, Artificial Sequence
  Antisense compound
atcctctaatttaagtggtg

SEQ ID NO: 20337 - DNA, 20 bp, Artificial Sequence
  Antisense compound
aatcctctaatttaagtggt

SEQ ID NO: 20338 - DNA, 20 bp, Artificial Sequence
  Antisense compound
aaatcctctaatttaagtgg

SEQ ID NO: 20339 - DNA, 20 bp, Artificial Sequence
  Antisense compound
aaaatcctctaatttaagtg

SEQ ID NO: 20340 - DNA, 20 bp, Artificial Sequence
  Antisense compound
taaaatcctctaatttaagt

SEQ ID NO: 20341 - DNA, 20 bp, Artificial Sequence
  Antisense compound
ataaaatcctctaatttaag

SEQ ID NO: 20342 - DNA, 20 bp, Artificial Sequence
  Antisense compound
gataaaatcctctaatttaa

SEQ ID NO: 20343 - DNA, 20 bp, Artificial Sequence
  Antisense compound
ggataaaatcctctaattta

SEQ ID NO: 20344 - DNA, 20 bp, Artificial Sequence
  Antisense compound
gggataaaatcctctaattt

SEQ ID NO: 20345 - DNA, 20 bp, Artificial Sequence
  Antisense compound
agggataaaatcctctaatt

SEQ ID NO: 20346 - DNA, 20 bp, Artificial Sequence
  Antisense compound
tagggataaaatcctctaat

SEQ ID NO: 20347 - DNA, 20 bp, Artificial Sequence
  Antisense compound
atagggataaaatcctctaa

SEQ ID NO: 20348 - DNA, 20 bp, Artificial Sequence
  Antisense compound
catagggataaaatcctcta

SEQ ID NO: 20349 - DNA, 20 bp, Artificial Sequence
  Antisense compound
ccatagggataaaatcctct

SEQ ID NO: 20350 - DNA, 20 bp, Artificial Sequence
  Antisense compound
tccatagggataaaatcctc

SEQ ID NO: 20351 - DNA, 20 bp, Artificial Sequence
  Antisense compound
gtccatagggataaaatcct

SEQ ID NO: 20352 - DNA, 20 bp, Artificial Sequence
  Antisense compound
tgtccatagggataaaatcc

SEQ ID NO: 20353 - DNA, 20 bp, Artificial Sequence
  Antisense compound
ctgtccatagggataaaatc

SEQ ID NO: 20354 - DNA, 20 bp, Artificial Sequence
  Antisense compound
gctgtccatagggataaaat

SEQ ID NO: 20355 - DNA, 20 bp, Artificial Sequence
  Antisense compound
tgctgtccatagggataaaa

SEQ ID NO: 20356 - DNA, 20 bp, Artificial Sequence
  Antisense compound
gtgctgtccatagggataaa

SEQ ID NO: 20357 - DNA, 20 bp, Artificial Sequence
  Antisense compound
tgtgctgtccatagggataa

SEQ ID NO: 20358 - DNA, 20 bp, Artificial Sequence
  Antisense compound
ctgtgctgtccatagggata

SEQ ID NO: 20359 - DNA, 20 bp, Artificial Sequence
  Antisense compound
actgtgctgtccatagggat

SEQ ID NO: 20360 - DNA, 20 bp, Artificial Sequence
  Antisense compound
cactgtgctgtccataggga

SEQ ID NO: 20361 - DNA, 20 bp, Artificial Sequence
  Antisense compound
tcactgtgctgtccataggg

SEQ ID NO: 20362 - DNA, 20 bp, Artificial Sequence
  Antisense compound
ttcactgtgctgtccatagg

SEQ ID NO: 20363 - DNA, 20 bp, Artificial Sequence
  Antisense compound
tttcactgtgctgtccatag

SEQ ID NO: 20364 - DNA, 20 bp, Artificial Sequence
  Antisense compound
ttttcactgtgctgtccata

SEQ ID NO: 20365 - DNA, 20 bp, Artificial Sequence
  Antisense compound
tttttcactgtgctgtccat

SEQ ID NO: 20366 - DNA, 20 bp, Artificial Sequence
  Antisense compound
atttttcactgtgctgtcca

SEQ ID NO: 20367 - DNA, 20 bp, Artificial Sequence
  Antisense compound
aatttttcactgtgctgtcc

SEQ ID NO: 20368 - DNA, 20 bp, Artificial Sequence
  Antisense compound
taatttttcactgtgctgtc

SEQ ID NO: 20369 - DNA, 20 bp, Artificial Sequence
  Antisense compound
gtaatttttcactgtgctgt

SEQ ID NO: 20370 - DNA, 20 bp, Artificial Sequence
  Antisense compound
agtaatttttcactgtgctg

SEQ ID NO: 20371 - DNA, 20 bp, Artificial Sequence
  Antisense compound
aagtaatttttcactgtgct

SEQ ID NO: 20372 - DNA, 20 bp, Artificial Sequence
  Antisense compound
gaagtaatttttcactgtgc

SEQ ID NO: 20373 - DNA, 20 bp, Artificial Sequence
  Antisense compound
tgaagtaatttttcactgtg

SEQ ID NO: 20374 - DNA, 20 bp, Artificial Sequence
  Antisense compound
atgaagtaatttttcactgt

SEQ ID NO: 20375 - DNA, 20 bp, Artificial Sequence
  Antisense compound
tatgaagtaatttttcactg

SEQ ID NO: 20376 - DNA, 20 bp, Artificial Sequence
  Antisense compound
ttatgaagtaatttttcact

SEQ ID NO: 20377 - DNA, 20 bp, Artificial Sequence
  Antisense compound
gttatgaagtaatttttcac

SEQ ID NO: 20378 - DNA, 20 bp, Artificial Sequence
  Antisense compound
tgttatgaagtaatttttca

SEQ ID NO: 20379 - DNA, 20 bp, Artificial Sequence
  Antisense compound
ctgttatgaagtaatttttc

SEQ ID NO: 20380 - DNA, 20 bp, Artificial Sequence
  Antisense compound
tctgttatgaagtaattttt

SEQ ID NO: 20381 - DNA, 20 bp, Artificial Sequence
  Antisense compound
atctgttatgaagtaatttt

SEQ ID NO: 20382 - DNA, 20 bp, Artificial Sequence
  Antisense compound
catctgttatgaagtaattt

SEQ ID NO: 20383 - DNA, 20 bp, Artificial Sequence
  Antisense compound
gcatctgttatgaagtaatt

SEQ ID NO: 20384 - DNA, 20 bp, Artificial Sequence
  Antisense compound
cgcatctgttatgaagtaat

SEQ ID NO: 20385 - DNA, 20 bp, Artificial Sequence
  Antisense compound
gcgcatctgttatgaagtaa

SEQ ID NO: 20386 - DNA, 20 bp, Artificial Sequence
  Antisense compound
tgcgcatctgttatgaagta

SEQ ID NO: 20387 - DNA, 20 bp, Artificial Sequence
  Antisense compound
ttgcgcatctgttatgaagt

SEQ ID NO: 20388 - DNA, 20 bp, Artificial Sequence
  Antisense compound
tttgcgcatctgttatgaag

SEQ ID NO: 20389 - DNA, 20 bp, Artificial Sequence
  Antisense compound
gtttgcgcatctgttatgaa

SEQ ID NO: 20390 - DNA, 20 bp, Artificial Sequence
  Antisense compound
tgtttgcgcatctgttatga

SEQ ID NO: 20391 - DNA, 20 bp, Artificial Sequence
  Antisense compound
ctgtttgcgcatctgttatg

SEQ ID NO: 20392 - DNA, 20 bp, Artificial Sequence
  Antisense compound
cctgtttgcgcatctgttat

SEQ ID NO: 20393 - DNA, 20 bp, Artificial Sequence
  Antisense compound
acctgtttgcgcatctgtta

SEQ ID NO: 20394 - DNA, 20 bp, Artificial Sequence
  Antisense compound
aacctgtttgcgcatctgtt

SEQ ID NO: 20395 - DNA, 20 bp, Artificial Sequence
  Antisense compound
gaacctgtttgcgcatctgt

SEQ ID NO: 20396 - DNA, 20 bp, Artificial Sequence
  Antisense compound
tgaacctgtttgcgcatctg

SEQ ID NO: 20397 - DNA, 20 bp, Artificial Sequence
  Antisense compound
atgaacctgtttgcgcatct

SEQ ID NO: 20398 - DNA, 20 bp, Artificial Sequence
  Antisense compound
gatgaacctgtttgcgcatc

SEQ ID NO: 20399 - DNA, 20 bp, Artificial Sequence
  Antisense compound
tgatgaacctgtttgcgcat

SEQ ID NO: 20400 - DNA, 20 bp, Artificial Sequence
  Antisense compound
ttgatgaacctgtttgcgca

SEQ ID NO: 20401 - DNA, 20 bp, Artificial Sequence
  Antisense compound
tttgatgaacctgtttgcgc

SEQ ID NO: 20402 - DNA, 20 bp, Artificial Sequence
  Antisense compound
ttttgatgaacctgtttgcg

SEQ ID NO: 20403 - DNA, 20 bp, Artificial Sequence
  Antisense compound
attttgatgaacctgtttgc

SEQ ID NO: 20404 - DNA, 20 bp, Artificial Sequence
  Antisense compound
cattttgatgaacctgtttg

SEQ ID NO: 20405 - DNA, 20 bp, Artificial Sequence
  Antisense compound
acattttgatgaacctgttt

SEQ ID NO: 20406 - DNA, 20 bp, Artificial Sequence
  Antisense compound
cacattttgatgaacctgtt

SEQ ID NO: 20407 - DNA, 20 bp, Artificial Sequence
  Antisense compound
acacattttgatgaacctgt

SEQ ID NO: 20408 - DNA, 20 bp, Artificial Sequence
  Antisense compound
cacacattttgatgaacctg

SEQ ID NO: 20409 - DNA, 20 bp, Artificial Sequence
  Antisense compound
acacacattttgatgaacct

SEQ ID NO: 20410 - DNA, 20 bp, Artificial Sequence
  Antisense compound
cacacacattttgatgaacc

SEQ ID NO: 20411 - DNA, 20 bp, Artificial Sequence
  Antisense compound
acacacacattttgatgaac

SEQ ID NO: 20412 - DNA, 20 bp, Artificial Sequence
  Antisense compound
aacacacacattttgatgaa

SEQ ID NO: 20413 - DNA, 20 bp, Artificial Sequence
  Antisense compound
gaacacacacattttgatga

SEQ ID NO: 20414 - DNA, 20 bp, Artificial Sequence
  Antisense compound
agaacacacacattttgatg

SEQ ID NO: 20415 - DNA, 20 bp, Artificial Sequence
  Antisense compound
cagaacacacacattttgat

SEQ ID NO: 20416 - DNA, 20 bp, Artificial Sequence
  Antisense compound
acagaacacacacattttga

SEQ ID NO: 20417 - DNA, 20 bp, Artificial Sequence
  Antisense compound
cacagaacacacacattttg

SEQ ID NO: 20418 - DNA, 20 bp, Artificial Sequence
  Antisense compound
tcacagaacacacacatttt

SEQ ID NO: 20419 - DNA, 20 bp, Artificial Sequence
  Antisense compound
atcacagaacacacacattt

SEQ ID NO: 20420 - DNA, 20 bp, Artificial Sequence
  Antisense compound
aatcacagaacacacacatt

SEQ ID NO: 20421 - DNA, 20 bp, Artificial Sequence
  Antisense compound
caatcacagaacacacacat

SEQ ID NO: 20422 - DNA, 20 bp, Artificial Sequence
  Antisense compound
tcaatcacagaacacacaca

SEQ ID NO: 20423 - DNA, 20 bp, Artificial Sequence
  Antisense compound
atcaatcacagaacacacac

SEQ ID NO: 20424 - DNA, 20 bp, Artificial Sequence
  Antisense compound
gatcaatcacagaacacaca

SEQ ID NO: 20425 - DNA, 20 bp, Artificial Sequence
  Antisense compound
agatcaatcacagaacacac

SEQ ID NO: 20426 - DNA, 20 bp, Artificial Sequence
  Antisense compound
aagatcaatcacagaacaca

SEQ ID NO: 20427 - DNA, 20 bp, Artificial Sequence
  Antisense compound
aaagatcaatcacagaacac

SEQ ID NO: 20428 - DNA, 20 bp, Artificial Sequence
  Antisense compound
aaaagatcaatcacagaaca

SEQ ID NO: 20429 - DNA, 20 bp, Artificial Sequence
  Antisense compound
taaaagatcaatcacagaac

SEQ ID NO: 20430 - DNA, 20 bp, Artificial Sequence
  Antisense compound
gtaaaagatcaatcacagaa

SEQ ID NO: 20431 - DNA, 20 bp, Artificial Sequence
  Antisense compound
agtaaaagatcaatcacaga

SEQ ID NO: 20432 - DNA, 20 bp, Artificial Sequence
  Antisense compound
aagtaaaagatcaatcacag

SEQ ID NO: 20433 - DNA, 20 bp, Artificial Sequence
  Antisense compound
caagtaaaagatcaatcaca

SEQ ID NO: 20434 - DNA, 20 bp, Artificial Sequence
  Antisense compound
tcaagtaaaagatcaatcac

SEQ ID NO: 20435 - DNA, 20 bp, Artificial Sequence
  Antisense compound
atcaagtaaaagatcaatca

SEQ ID NO: 20436 - DNA, 20 bp, Artificial Sequence
  Antisense compound
catcaagtaaaagatcaatc

SEQ ID NO: 20437 - DNA, 20 bp, Artificial Sequence
  Antisense compound
tcatcaagtaaaagatcaat

SEQ ID NO: 20438 - DNA, 20 bp, Artificial Sequence
  Antisense compound
gtcatcaagtaaaagatcaa

SEQ ID NO: 20439 - DNA, 20 bp, Artificial Sequence
  Antisense compound
agtcatcaagtaaaagatca

SEQ ID NO: 20440 - DNA, 20 bp, Artificial Sequence
  Antisense compound
aagtcatcaagtaaaagatc

SEQ ID NO: 20441 - DNA, 20 bp, Artificial Sequence
  Antisense compound
aaagtcatcaagtaaaagat

SEQ ID NO: 20442 - DNA, 20 bp, Artificial Sequence
  Antisense compound
caaagtcatcaagtaaaaga

SEQ ID NO: 20443 - DNA, 20 bp, Artificial Sequence
  Antisense compound
acaaagtcatcaagtaaaag

SEQ ID NO: 20444 - DNA, 20 bp, Artificial Sequence
  Antisense compound
gacaaagtcatcaagtaaaa

SEQ ID NO: 20445 - DNA, 20 bp, Artificial Sequence
  Antisense compound
cgacaaagtcatcaagtaaa

SEQ ID NO: 20446 - DNA, 20 bp, Artificial Sequence
  Antisense compound
tcgacaaagtcatcaagtaa

SEQ ID NO: 20447 - DNA, 20 bp, Artificial Sequence
  Antisense compound
ctcgacaaagtcatcaagta

SEQ ID NO: 20448 - DNA, 20 bp, Artificial Sequence
  Antisense compound
tctcgacaaagtcatcaagt

SEQ ID NO: 20449 - DNA, 20 bp, Artificial Sequence
  Antisense compound
atctcgacaaagtcatcaag

SEQ ID NO: 20450 - DNA, 20 bp, Artificial Sequence
  Antisense compound
tatctcgacaaagtcatcaa

SEQ ID NO: 20451 - DNA, 20 bp, Artificial Sequence
  Antisense compound
ttatctcgacaaagtcatca

SEQ ID NO: 20452 - DNA, 20 bp, Artificial Sequence
  Antisense compound
attatctcgacaaagtcatc

SEQ ID NO: 20453 - DNA, 20 bp, Artificial Sequence
  Antisense compound
tattatctcgacaaagtcat

SEQ ID NO: 20454 - DNA, 20 bp, Artificial Sequence
  Antisense compound
ttattatctcgacaaagtca

SEQ ID NO: 20455 - DNA, 20 bp, Artificial Sequence
  Antisense compound
tttattatctcgacaaagtc

SEQ ID NO: 20456 - DNA, 20 bp, Artificial Sequence
  Antisense compound
ctttattatctcgacaaagt

SEQ ID NO: 20457 - DNA, 20 bp, Artificial Sequence
  Antisense compound
actttattatctcgacaaag

SEQ ID NO: 20458 - DNA, 20 bp, Artificial Sequence
  Antisense compound
gactttattatctcgacaaa

SEQ ID NO: 20459 - DNA, 20 bp, Artificial Sequence
  Antisense compound
tgactttattatctcgacaa

SEQ ID NO: 20460 - DNA, 20 bp, Artificial Sequence
  Antisense compound
gtgactttattatctcgaca

SEQ ID NO: 20461 - DNA, 20 bp, Artificial Sequence
  Antisense compound
tgtgactttattatctcgac

SEQ ID NO: 20462 - DNA, 20 bp, Artificial Sequence
  Antisense compound
ttgtgactttattatctcga

SEQ ID NO: 20463 - DNA, 20 bp, Artificial Sequence
  Antisense compound
cttgtgactttattatctcg

SEQ ID NO: 20464 - DNA, 20 bp, Artificial Sequence
  Antisense compound
tcttgtgactttattatctc

SEQ ID NO: 20465 - DNA, 20 bp, Artificial Sequence
  Antisense compound
atcttgtgactttattatct

SEQ ID NO: 20466 - DNA, 20 bp, Artificial Sequence
  Antisense compound
aatcttgtgactttattatc

SEQ ID NO: 20467 - DNA, 20 bp, Artificial Sequence
  Antisense compound
aaatcttgtgactttattat

SEQ ID NO: 20468 - DNA, 20 bp, Artificial Sequence
  Antisense compound
caaatcttgtgactttatta

SEQ ID NO: 20469 - DNA, 20 bp, Artificial Sequence
  Antisense compound
acaaatcttgtgactttatt

SEQ ID NO: 20470 - DNA, 20 bp, Artificial Sequence
  Antisense compound
gacaaatcttgtgactttat

SEQ ID NO: 20471 - DNA, 20 bp, Artificial Sequence
  Antisense compound
tgacaaatcttgtgacttta

SEQ ID NO: 20472 - DNA, 20 bp, Artificial Sequence
  Antisense compound
ctgacaaatcttgtgacttt

SEQ ID NO: 20473 - DNA, 20 bp, Artificial Sequence
  Antisense compound
actgacaaatcttgtgactt

SEQ ID NO: 20474 - DNA, 20 bp, Artificial Sequence
  Antisense compound
cactgacaaatcttgtgact

SEQ ID NO: 20475 - DNA, 20 bp, Artificial Sequence
  Antisense compound
tcactgacaaatcttgtgac

SEQ ID NO: 20476 - DNA, 20 bp, Artificial Sequence
  Antisense compound
atcactgacaaatcttgtga

SEQ ID NO: 20477 - DNA, 20 bp, Artificial Sequence
  Antisense compound
aatcactgacaaatcttgtg

SEQ ID NO: 20478 - DNA, 20 bp, Artificial Sequence
  Antisense compound
aaatcactgacaaatcttgt

SEQ ID NO: 20479 - DNA, 20 bp, Artificial Sequence
  Antisense compound
gaaatcactgacaaatcttg

SEQ ID NO: 20480 - DNA, 20 bp, Artificial Sequence
  Antisense compound
tgaaatcactgacaaatctt

SEQ ID NO: 20481 - DNA, 20 bp, Artificial Sequence
  Antisense compound
ttgaaatcactgacaaatct

SEQ ID NO: 20482 - DNA, 20 bp, Artificial Sequence
  Antisense compound
tttgaaatcactgacaaatc

SEQ ID NO: 20483 - DNA, 20 bp, Artificial Sequence
  Antisense compound
ttttgaaatcactgacaaat

SEQ ID NO: 20484 - DNA, 20 bp, Artificial Sequence
  Antisense compound
cttttgaaatcactgacaaa

SEQ ID NO: 20485 - DNA, 20 bp, Artificial Sequence
  Antisense compound
acttttgaaatcactgacaa

SEQ ID NO: 20486 - DNA, 20 bp, Artificial Sequence
  Antisense compound
cacttttgaaatcactgaca

SEQ ID NO: 20487 - DNA, 20 bp, Artificial Sequence
  Antisense compound
ccacttttgaaatcactgac

SEQ ID NO: 20488 - DNA, 20 bp, Artificial Sequence
  Antisense compound
accacttttgaaatcactga

SEQ ID NO: 20489 - DNA, 20 bp, Artificial Sequence
  Antisense compound
gaccacttttgaaatcactg

SEQ ID NO: 20490 - DNA, 20 bp, Artificial Sequence
  Antisense compound
tgaccacttttgaaatcact

SEQ ID NO: 20491 - DNA, 20 bp, Artificial Sequence
  Antisense compound
ttgaccacttttgaaatcac

SEQ ID NO: 20492 - DNA, 20 bp, Artificial Sequence
  Antisense compound
cttgaccacttttgaaatca

SEQ ID NO: 20493 - DNA, 20 bp, Artificial Sequence
  Antisense compound
ccttgaccacttttgaaatc

SEQ ID NO: 20494 - DNA, 20 bp, Artificial Sequence
  Antisense compound
accttgaccacttttgaaat

SEQ ID NO: 20495 - DNA, 20 bp, Artificial Sequence
  Antisense compound
aaccttgaccacttttgaaa

SEQ ID NO: 20496 - DNA, 20 bp, Artificial Sequence
  Antisense compound
taaccttgaccacttttgaa

SEQ ID NO: 20497 - DNA, 20 bp, Artificial Sequence
  Antisense compound
gtaaccttgaccacttttga

SEQ ID NO: 20498 - DNA, 20 bp, Artificial Sequence
  Antisense compound
tgtaaccttgaccacttttg

SEQ ID NO: 20499 - DNA, 20 bp, Artificial Sequence
  Antisense compound
ttgtaaccttgaccactttt

SEQ ID NO: 20500 - DNA, 20 bp, Artificial Sequence
  Antisense compound
attgtaaccttgaccacttt

SEQ ID NO: 20501 - DNA, 20 bp, Artificial Sequence
  Antisense compound
aattgtaaccttgaccactt

SEQ ID NO: 20502 - DNA, 20 bp, Artificial Sequence
  Antisense compound
caattgtaaccttgaccact

SEQ ID NO: 20503 - DNA, 20 bp, Artificial Sequence
  Antisense compound
tcaattgtaaccttgaccac

SEQ ID NO: 20504 - DNA, 20 bp, Artificial Sequence
  Antisense compound
gtcaattgtaaccttgacca

SEQ ID NO: 20505 - DNA, 20 bp, Artificial Sequence
  Antisense compound
agtcaattgtaaccttgacc

SEQ ID NO: 20506 - DNA, 20 bp, Artificial Sequence
  Antisense compound
tagtcaattgtaaccttgac

SEQ ID NO: 20507 - DNA, 20 bp, Artificial Sequence
  Antisense compound
atagtcaattgtaaccttga

SEQ ID NO: 20508 - DNA, 20 bp, Artificial Sequence
  Antisense compound
catagtcaattgtaaccttg

SEQ ID NO: 20509 - DNA, 20 bp, Artificial Sequence
  Antisense compound
gcatagtcaattgtaacctt

SEQ ID NO: 20510 - DNA, 20 bp, Artificial Sequence
  Antisense compound
agcatagtcaattgtaacct

SEQ ID NO: 20511 - DNA, 20 bp, Artificial Sequence
  Antisense compound
cagcatagtcaattgtaacc

SEQ ID NO: 20512 - DNA, 20 bp, Artificial Sequence
  Antisense compound
tcagcatagtcaattgtaac

SEQ ID NO: 20513 - DNA, 20 bp, Artificial Sequence
  Antisense compound
ttcagcatagtcaattgtaa

SEQ ID NO: 20514 - DNA, 20 bp, Artificial Sequence
  Antisense compound
tttcagcatagtcaattgta

SEQ ID NO: 20515 - DNA, 20 bp, Artificial Sequence
  Antisense compound
atttcagcatagtcaattgt

SEQ ID NO: 20516 - DNA, 20 bp, Artificial Sequence
  Antisense compound
aatttcagcatagtcaattg

SEQ ID NO: 20517 - DNA, 20 bp, Artificial Sequence
  Antisense compound
aaatttcagcatagtcaatt

SEQ ID NO: 20518 - DNA, 20 bp, Artificial Sequence
  Antisense compound
gaaatttcagcatagtcaat

SEQ ID NO: 20519 - DNA, 20 bp, Artificial Sequence
  Antisense compound
tgaaatttcagcatagtcaa

SEQ ID NO: 20520 - DNA, 20 bp, Artificial Sequence
  Antisense compound
atgaaatttcagcatagtca

SEQ ID NO: 20521 - DNA, 20 bp, Artificial Sequence
  Antisense compound
aatgaaatttcagcatagtc

SEQ ID NO: 20522 - DNA, 20 bp, Artificial Sequence
  Antisense compound
gaatgaaatttcagcatagt

SEQ ID NO: 20523 - DNA, 20 bp, Artificial Sequence
  Antisense compound
tgaatgaaatttcagcatag

SEQ ID NO: 20524 - DNA, 20 bp, Artificial Sequence
  Antisense compound
atgaatgaaatttcagcata

SEQ ID NO: 20525 - DNA, 20 bp, Artificial Sequence
  Antisense compound
catgaatgaaatttcagcat

SEQ ID NO: 20526 - DNA, 20 bp, Artificial Sequence
  Antisense compound
gcatgaatgaaatttcagca

SEQ ID NO: 20527 - DNA, 20 bp, Artificial Sequence
  Antisense compound
agcatgaatgaaatttcagc

SEQ ID NO: 20528 - DNA, 20 bp, Artificial Sequence
  Antisense compound
aagcatgaatgaaatttcag

SEQ ID NO: 20529 - DNA, 20 bp, Artificial Sequence
  Antisense compound
aaagcatgaatgaaatttca

SEQ ID NO: 20530 - DNA, 20 bp, Artificial Sequence
  Antisense compound
caaagcatgaatgaaatttc

SEQ ID NO: 20531 - DNA, 20 bp, Artificial Sequence
  Antisense compound
ccaaagcatgaatgaaattt

SEQ ID NO: 20532 - DNA, 20 bp, Artificial Sequence
  Antisense compound
accaaagcatgaatgaaatt

SEQ ID NO: 20533 - DNA, 20 bp, Artificial Sequence
  Antisense compound
caccaaagcatgaatgaaat

SEQ ID NO: 20534 - DNA, 20 bp, Artificial Sequence
  Antisense compound
acaccaaagcatgaatgaaa

SEQ ID NO: 20535 - DNA, 20 bp, Artificial Sequence
  Antisense compound
tacaccaaagcatgaatgaa

SEQ ID NO: 20536 - DNA, 20 bp, Artificial Sequence
  Antisense compound
ttacaccaaagcatgaatga

SEQ ID NO: 20537 - DNA, 20 bp, Artificial Sequence
  Antisense compound
cttacaccaaagcatgaatg

SEQ ID NO: 20538 - DNA, 20 bp, Artificial Sequence
  Antisense compound
ccttacaccaaagcatgaat

SEQ ID NO: 20539 - DNA, 20 bp, Artificial Sequence
  Antisense compound
tccttacaccaaagcatgaa

SEQ ID NO: 20540 - DNA, 20 bp, Artificial Sequence
  Antisense compound
atccttacaccaaagcatga

SEQ ID NO: 20541 - DNA, 20 bp, Artificial Sequence
  Antisense compound
catccttacaccaaagcatg

SEQ ID NO: 20542 - DNA, 20 bp, Artificial Sequence
  Antisense compound
ccatccttacaccaaagcat

SEQ ID NO: 20543 - DNA, 20 bp, Artificial Sequence
  Antisense compound
tccatccttacaccaaagca

SEQ ID NO: 20544 - DNA, 20 bp, Artificial Sequence
  Antisense compound
gtccatccttacaccaaagc

SEQ ID NO: 20545 - DNA, 20 bp, Artificial Sequence
  Antisense compound
tgtccatccttacaccaaag

SEQ ID NO: 20546 - DNA, 20 bp, Artificial Sequence
  Antisense compound
atgtccatccttacaccaaa

SEQ ID NO: 20547 - DNA, 20 bp, Artificial Sequence
  Antisense compound
catgtccatccttacaccaa

SEQ ID NO: 20548 - DNA, 20 bp, Artificial Sequence
  Antisense compound
acatgtccatccttacacca

SEQ ID NO: 20549 - DNA, 20 bp, Artificial Sequence
  Antisense compound
aacatgtccatccttacacc

SEQ ID NO: 20550 - DNA, 20 bp, Artificial Sequence
  Antisense compound
caacatgtccatccttacac

SEQ ID NO: 20551 - DNA, 20 bp, Artificial Sequence
  Antisense compound
tcaacatgtccatccttaca

SEQ ID NO: 20552 - DNA, 20 bp, Artificial Sequence
  Antisense compound
ttcaacatgtccatccttac

SEQ ID NO: 20553 - DNA, 20 bp, Artificial Sequence
  Antisense compound
tttcaacatgtccatcctta

SEQ ID NO: 20554 - DNA, 20 bp, Artificial Sequence
  Antisense compound
gtttcaacatgtccatcctt

SEQ ID NO: 20555 - DNA, 20 bp, Artificial Sequence
  Antisense compound
ggtttcaacatgtccatcct

SEQ ID NO: 20556 - DNA, 20 bp, Artificial Sequence
  Antisense compound
aggtttcaacatgtccatcc

SEQ ID NO: 20557 - DNA, 20 bp, Artificial Sequence
  Antisense compound
aaggtttcaacatgtccatc

SEQ ID NO: 20558 - DNA, 20 bp, Artificial Sequence
  Antisense compound
gaaggtttcaacatgtccat

SEQ ID NO: 20559 - DNA, 20 bp, Artificial Sequence
  Antisense compound
agaaggtttcaacatgtcca

SEQ ID NO: 20560 - DNA, 20 bp, Artificial Sequence
  Antisense compound
tagaaggtttcaacatgtcc

SEQ ID NO: 20561 - DNA, 20 bp, Artificial Sequence
  Antisense compound
gtagaaggtttcaacatgtc

SEQ ID NO: 20562 - DNA, 20 bp, Artificial Sequence
  Antisense compound
ggtagaaggtttcaacatgt

SEQ ID NO: 20563 - DNA, 20 bp, Artificial Sequence
  Antisense compound
gggtagaaggtttcaacatg

SEQ ID NO: 20564 - DNA, 20 bp, Artificial Sequence
  Antisense compound
tgggtagaaggtttcaacat

SEQ ID NO: 20565 - DNA, 20 bp, Artificial Sequence
  Antisense compound
ttgggtagaaggtttcaaca

SEQ ID NO: 20566 - DNA, 20 bp, Artificial Sequence
  Antisense compound
tttgggtagaaggtttcaac

SEQ ID NO: 20567 - DNA, 20 bp, Artificial Sequence
  Antisense compound
ttttgggtagaaggtttcaa

SEQ ID NO: 20568 - DNA, 20 bp, Artificial Sequence
  Antisense compound
gttttgggtagaaggtttca

SEQ ID NO: 20569 - DNA, 20 bp, Artificial Sequence
  Antisense compound
agttttgggtagaaggtttc

SEQ ID NO: 20570 - DNA, 20 bp, Artificial Sequence
  Antisense compound
tagttttgggtagaaggttt

SEQ ID NO: 20571 - DNA, 20 bp, Artificial Sequence
  Antisense compound
gtagttttgggtagaaggtt

SEQ ID NO: 20572 - DNA, 20 bp, Artificial Sequence
  Antisense compound
tgtagttttgggtagaaggt

SEQ ID NO: 20573 - DNA, 20 bp, Artificial Sequence
  Antisense compound
ttgtagttttgggtagaagg

SEQ ID NO: 20574 - DNA, 20 bp, Artificial Sequence
  Antisense compound
cttgtagttttgggtagaag

SEQ ID NO: 20575 - DNA, 20 bp, Artificial Sequence
  Antisense compound
gcttgtagttttgggtagaa

SEQ ID NO: 20576 - DNA, 20 bp, Artificial Sequence
  Antisense compound
tgcttgtagttttgggtaga

SEQ ID NO: 20577 - DNA, 20 bp, Artificial Sequence
  Antisense compound
ttgcttgtagttttgggtag

SEQ ID NO: 20578 - DNA, 20 bp, Artificial Sequence
  Antisense compound
cttgcttgtagttttgggta

SEQ ID NO: 20579 - DNA, 20 bp, Artificial Sequence
  Antisense compound
acttgcttgtagttttgggt

SEQ ID NO: 20580 - DNA, 20 bp, Artificial Sequence
  Antisense compound
gacttgcttgtagttttggg

SEQ ID NO: 20581 - DNA, 20 bp, Artificial Sequence
  Antisense compound
cgacttgcttgtagttttgg

SEQ ID NO: 20582 - DNA, 20 bp, Artificial Sequence
  Antisense compound
tcgacttgcttgtagttttg

SEQ ID NO: 20583 - DNA, 20 bp, Artificial Sequence
  Antisense compound
ctcgacttgcttgtagtttt

SEQ ID NO: 20584 - DNA, 20 bp, Artificial Sequence
  Antisense compound
gctcgacttgcttgtagttt

SEQ ID NO: 20585 - DNA, 20 bp, Artificial Sequence
  Antisense compound
cgctcgacttgcttgtagtt

SEQ ID NO: 20586 - DNA, 20 bp, Artificial Sequence
  Antisense compound
acgctcgacttgcttgtagt

SEQ ID NO: 20587 - DNA, 20 bp, Artificial Sequence
  Antisense compound
cacgctcgacttgcttgtag

SEQ ID NO: 20588 - DNA, 20 bp, Artificial Sequence
  Antisense compound
ccacgctcgacttgcttgta

SEQ ID NO: 20589 - DNA, 20 bp, Artificial Sequence
  Antisense compound
gccacgctcgacttgcttgt

SEQ ID NO: 20590 - DNA, 20 bp, Artificial Sequence
  Antisense compound
tgccacgctcgacttgcttg

SEQ ID NO: 20591 - DNA, 20 bp, Artificial Sequence
  Antisense compound
ttgccacgctcgacttgctt

SEQ ID NO: 20592 - DNA, 20 bp, Artificial Sequence
  Antisense compound
gttgccacgctcgacttgct

SEQ ID NO: 20593 - DNA, 20 bp, Artificial Sequence
  Antisense compound
ggttgccacgctcgacttgc

SEQ ID NO: 20594 - DNA, 20 bp, Artificial Sequence
  Antisense compound
tggttgccacgctcgacttg

SEQ ID NO: 20595 - DNA, 20 bp, Artificial Sequence
  Antisense compound
ctggttgccacgctcgactt

SEQ ID NO: 20596 - DNA, 20 bp, Artificial Sequence
  Antisense compound
cctggttgccacgctcgact

SEQ ID NO: 20597 - DNA, 20 bp, Artificial Sequence
  Antisense compound
acctggttgccacgctcgac

SEQ ID NO: 20598 - DNA, 20 bp, Artificial Sequence
  Antisense compound
cacctggttgccacgctcga

SEQ ID NO: 20599 - DNA, 20 bp, Artificial Sequence
  Antisense compound
acacctggttgccacgctcg

SEQ ID NO: 20600 - DNA, 20 bp, Artificial Sequence
  Antisense compound
aacacctggttgccacgctc

SEQ ID NO: 20601 - DNA, 20 bp, Artificial Sequence
  Antisense compound
caacacctggttgccacgct

SEQ ID NO: 20602 - DNA, 20 bp, Artificial Sequence
  Antisense compound
gcaacacctggttgccacgc

SEQ ID NO: 20603 - DNA, 20 bp, Artificial Sequence
  Antisense compound
cgcaacacctggttgccacg

SEQ ID NO: 20604 - DNA, 20 bp, Artificial Sequence
  Antisense compound
tcgcaacacctggttgccac

SEQ ID NO: 20605 - DNA, 20 bp, Artificial Sequence
  Antisense compound
atcgcaacacctggttgcca

SEQ ID NO: 20606 - DNA, 20 bp, Artificial Sequence
  Antisense compound
catcgcaacacctggttgcc

SEQ ID NO: 20607 - DNA, 20 bp, Artificial Sequence
  Antisense compound
gcatcgcaacacctggttgc

SEQ ID NO: 20608 - DNA, 20 bp, Artificial Sequence
  Antisense compound
ggcatcgcaacacctggttg

SEQ ID NO: 20609 - DNA, 20 bp, Artificial Sequence
  Antisense compound
aggcatcgcaacacctggtt

SEQ ID NO: 20610 - DNA, 20 bp, Artificial Sequence
  Antisense compound
taggcatcgcaacacctggt

SEQ ID NO: 20611 - DNA, 20 bp, Artificial Sequence
  Antisense compound
ttaggcatcgcaacacctgg

SEQ ID NO: 20612 - DNA, 20 bp, Artificial Sequence
  Antisense compound
gttaggcatcgcaacacctg

SEQ ID NO: 20613 - DNA, 20 bp, Artificial Sequence
  Antisense compound
agttaggcatcgcaacacct

SEQ ID NO: 20614 - DNA, 20 bp, Artificial Sequence
  Antisense compound
aagttaggcatcgcaacacc

SEQ ID NO: 20615 - DNA, 20 bp, Artificial Sequence
  Antisense compound
caagttaggcatcgcaacac

SEQ ID NO: 20616 - DNA, 20 bp, Artificial Sequence
  Antisense compound
acaagttaggcatcgcaaca

SEQ ID NO: 20617 - DNA, 20 bp, Artificial Sequence
  Antisense compound
tacaagttaggcatcgcaac

SEQ ID NO: 20618 - DNA, 20 bp, Artificial Sequence
  Antisense compound
gtacaagttaggcatcgcaa

SEQ ID NO: 20619 - DNA, 20 bp, Artificial Sequence
  Antisense compound
tgtacaagttaggcatcgca

SEQ ID NO: 20620 - DNA, 20 bp, Artificial Sequence
  Antisense compound
ttgtacaagttaggcatcgc

SEQ ID NO: 20621 - DNA, 20 bp, Artificial Sequence
  Antisense compound
cttgtacaagttaggcatcg

SEQ ID NO: 20622 - DNA, 20 bp, Artificial Sequence
  Antisense compound
tcttgtacaagttaggcatc

SEQ ID NO: 20623 - DNA, 20 bp, Artificial Sequence
  Antisense compound
atcttgtacaagttaggcat

SEQ ID NO: 20624 - DNA, 20 bp, Artificial Sequence
  Antisense compound
catcttgtacaagttaggca

SEQ ID NO: 20625 - DNA, 20 bp, Artificial Sequence
  Antisense compound
gcatcttgtacaagttaggc

SEQ ID NO: 20626 - DNA, 20 bp, Artificial Sequence
  Antisense compound
tgcatcttgtacaagttagg

SEQ ID NO: 20627 - DNA, 20 bp, Artificial Sequence
  Antisense compound
ttgcatcttgtacaagttag

SEQ ID NO: 20628 - DNA, 20 bp, Artificial Sequence
  Antisense compound
tttgcatcttgtacaagtta

SEQ ID NO: 20629 - DNA, 20 bp, Artificial Sequence
  Antisense compound
ctttgcatcttgtacaagtt

SEQ ID NO: 20630 - DNA, 20 bp, Artificial Sequence
  Antisense compound
tctttgcatcttgtacaagt

SEQ ID NO: 20631 - DNA, 20 bp, Artificial Sequence
  Antisense compound
ttctttgcatcttgtacaag

SEQ ID NO: 20632 - DNA, 20 bp, Artificial Sequence
  Antisense compound
attctttgcatcttgtacaa

SEQ ID NO: 20633 - DNA, 20 bp, Artificial Sequence
  Antisense compound
cattctttgcatcttgtaca

SEQ ID NO: 20634 - DNA, 20 bp, Artificial Sequence
  Antisense compound
gcattctttgcatcttgtac

SEQ ID NO: 20635 - DNA, 20 bp, Artificial Sequence
  Antisense compound
agcattctttgcatcttgta

SEQ ID NO: 20636 - DNA, 20 bp, Artificial Sequence
  Antisense compound
aagcattctttgcatcttgt

SEQ ID NO: 20637 - DNA, 20 bp, Artificial Sequence
  Antisense compound
gaagcattctttgcatcttg

SEQ ID NO: 20638 - DNA, 20 bp, Artificial Sequence
  Antisense compound
agaagcattctttgcatctt

SEQ ID NO: 20639 - DNA, 20 bp, Artificial Sequence
  Antisense compound
aagaagcattctttgcatct

SEQ ID NO: 20640 - DNA, 20 bp, Artificial Sequence
  Antisense compound
caagaagcattctttgcatc

SEQ ID NO: 20641 - DNA, 20 bp, Artificial Sequence
  Antisense compound
tcaagaagcattctttgcat

SEQ ID NO: 20642 - DNA, 20 bp, Artificial Sequence
  Antisense compound
ttcaagaagcattctttgca

SEQ ID NO: 20643 - DNA, 20 bp, Artificial Sequence
  Antisense compound
tttcaagaagcattctttgc

SEQ ID NO: 20644 - DNA, 20 bp, Artificial Sequence
  Antisense compound
ttttcaagaagcattctttg

SEQ ID NO: 20645 - DNA, 20 bp, Artificial Sequence
  Antisense compound
cttttcaagaagcattcttt

SEQ ID NO: 20646 - DNA, 20 bp, Artificial Sequence
  Antisense compound
acttttcaagaagcattctt

SEQ ID NO: 20647 - DNA, 20 bp, Artificial Sequence
  Antisense compound
cacttttcaagaagcattct

SEQ ID NO: 20648 - DNA, 20 bp, Artificial Sequence
  Antisense compound
acacttttcaagaagcattc

SEQ ID NO: 20649 - DNA, 20 bp, Artificial Sequence
  Antisense compound
cacacttttcaagaagcatt

SEQ ID NO: 20650 - DNA, 20 bp, Artificial Sequence
  Antisense compound
tcacacttttcaagaagcat

SEQ ID NO: 20651 - DNA, 20 bp, Artificial Sequence
  Antisense compound
gtcacacttttcaagaagca

SEQ ID NO: 20652 - DNA, 20 bp, Artificial Sequence
  Antisense compound
ggtcacacttttcaagaagc

SEQ ID NO: 20653 - DNA, 20 bp, Artificial Sequence
  Antisense compound
aggtcacacttttcaagaag

SEQ ID NO: 20654 - DNA, 20 bp, Artificial Sequence
  Antisense compound
aaggtcacacttttcaagaa

SEQ ID NO: 20655 - DNA, 20 bp, Artificial Sequence
  Antisense compound
gaaggtcacacttttcaaga

SEQ ID NO: 20656 - DNA, 20 bp, Artificial Sequence
  Antisense compound
tgaaggtcacacttttcaag

SEQ ID NO: 20657 - DNA, 20 bp, Artificial Sequence
  Antisense compound
ctgaaggtcacacttttcaa

SEQ ID NO: 20658 - DNA, 20 bp, Artificial Sequence
  Antisense compound
tctgaaggtcacacttttca

SEQ ID NO: 20659 - DNA, 20 bp, Artificial Sequence
  Antisense compound
ttctgaaggtcacacttttc

SEQ ID NO: 20660 - DNA, 20 bp, Artificial Sequence
  Antisense compound
attctgaaggtcacactttt

SEQ ID NO: 20661 - DNA, 20 bp, Artificial Sequence
  Antisense compound
aattctgaaggtcacacttt

SEQ ID NO: 20662 - DNA, 20 bp, Artificial Sequence
  Antisense compound
taattctgaaggtcacactt

SEQ ID NO: 20663 - DNA, 20 bp, Artificial Sequence
  Antisense compound
ataattctgaaggtcacact

SEQ ID NO: 20664 - DNA, 20 bp, Artificial Sequence
  Antisense compound
cataattctgaaggtcacac

SEQ ID NO: 20665 - DNA, 20 bp, Artificial Sequence
  Antisense compound
ccataattctgaaggtcaca

SEQ ID NO: 20666 - DNA, 20 bp, Artificial Sequence
  Antisense compound
accataattctgaaggtcac

SEQ ID NO: 20667 - DNA, 20 bp, Artificial Sequence
  Antisense compound
caccataattctgaaggtca

SEQ ID NO: 20668 - DNA, 20 bp, Artificial Sequence
  Antisense compound
tcaccataattctgaaggtc

SEQ ID NO: 20669 - DNA, 20 bp, Artificial Sequence
  Antisense compound
ttcaccataattctgaaggt

SEQ ID NO: 20670 - DNA, 20 bp, Artificial Sequence
  Antisense compound
tttcaccataattctgaagg

SEQ ID NO: 20671 - DNA, 20 bp, Artificial Sequence
  Antisense compound
ttttcaccataattctgaag

SEQ ID NO: 20672 - DNA, 20 bp, Artificial Sequence
  Antisense compound
attttcaccataattctgaa

SEQ ID NO: 20673 - DNA, 20 bp, Artificial Sequence
  Antisense compound
cattttcaccataattctga

SEQ ID NO: 20674 - DNA, 20 bp, Artificial Sequence
  Antisense compound
gcattttcaccataattctg

SEQ ID NO: 20675 - DNA, 20 bp, Artificial Sequence
  Antisense compound
agcattttcaccataattct

SEQ ID NO: 20676 - DNA, 20 bp, Artificial Sequence
  Antisense compound
cagcattttcaccataattc

SEQ ID NO: 20677 - DNA, 20 bp, Artificial Sequence
  Antisense compound
acagcattttcaccataatt

SEQ ID NO: 20678 - DNA, 20 bp, Artificial Sequence
  Antisense compound
aacagcattttcaccataat

SEQ ID NO: 20679 - DNA, 20 bp, Artificial Sequence
  Antisense compound
taacagcattttcaccataa

SEQ ID NO: 20680 - DNA, 20 bp, Artificial Sequence
  Antisense compound
ataacagcattttcaccata

SEQ ID NO: 20681 - DNA, 20 bp, Artificial Sequence
  Antisense compound
tataacagcattttcaccat

SEQ ID NO: 20682 - DNA, 20 bp, Artificial Sequence
  Antisense compound
gtataacagcattttcacca

SEQ ID NO: 20683 - DNA, 20 bp, Artificial Sequence
  Antisense compound
ggtataacagcattttcacc

SEQ ID NO: 20684 - DNA, 20 bp, Artificial Sequence
  Antisense compound
tggtataacagcattttcac

SEQ ID NO: 20685 - DNA, 20 bp, Artificial Sequence
  Antisense compound
ttggtataacagcattttca

SEQ ID NO: 20686 - DNA, 20 bp, Artificial Sequence
  Antisense compound
tttggtataacagcattttc

SEQ ID NO: 20687 - DNA, 20 bp, Artificial Sequence
  Antisense compound
ttttggtataacagcatttt

SEQ ID NO: 20688 - DNA, 20 bp, Artificial Sequence
  Antisense compound
cttttggtataacagcattt

SEQ ID NO: 20689 - DNA, 20 bp, Artificial Sequence
  Antisense compound
ccttttggtataacagcatt

SEQ ID NO: 20690 - DNA, 20 bp, Artificial Sequence
  Antisense compound
tccttttggtataacagcat

SEQ ID NO: 20691 - DNA, 20 bp, Artificial Sequence
  Antisense compound
ttccttttggtataacagca

SEQ ID NO: 20692 - DNA, 20 bp, Artificial Sequence
  Antisense compound
attccttttggtataacagc

SEQ ID NO: 20693 - DNA, 20 bp, Artificial Sequence
  Antisense compound
tattccttttggtataacag

SEQ ID NO: 20694 - DNA, 20 bp, Artificial Sequence
  Antisense compound
ttattccttttggtataaca

SEQ ID NO: 20695 - DNA, 20 bp, Artificial Sequence
  Antisense compound
attattccttttggtataac

SEQ ID NO: 20696 - DNA, 20 bp, Artificial Sequence
  Antisense compound
cattattccttttggtataa

SEQ ID NO: 20697 - DNA, 20 bp, Artificial Sequence
  Antisense compound
tcattattccttttggtata

SEQ ID NO: 20698 - DNA, 20 bp, Artificial Sequence
  Antisense compound
atcattattccttttggtat

SEQ ID NO: 20699 - DNA, 20 bp, Artificial Sequence
  Antisense compound
catcattattccttttggta

SEQ ID NO: 20700 - DNA, 20 bp, Artificial Sequence
  Antisense compound
tcatcattattccttttggt

SEQ ID NO: 20701 - DNA, 20 bp, Artificial Sequence
  Antisense compound
ttcatcattattccttttgg

SEQ ID NO: 20702 - DNA, 20 bp, Artificial Sequence
  Antisense compound
attcatcattattccttttg

SEQ ID NO: 20703 - DNA, 20 bp, Artificial Sequence
  Antisense compound
cattcatcattattcctttt

SEQ ID NO: 20704 - DNA, 20 bp, Artificial Sequence
  Antisense compound
acattcatcattattccttt

SEQ ID NO: 20705 - DNA, 20 bp, Artificial Sequence
  Antisense compound
gacattcatcattattcctt

SEQ ID NO: 20706 - DNA, 20 bp, Artificial Sequence
  Antisense compound
cgacattcatcattattcct

SEQ ID NO: 20707 - DNA, 20 bp, Artificial Sequence
  Antisense compound
gcgacattcatcattattcc

SEQ ID NO: 20708 - DNA, 20 bp, Artificial Sequence
  Antisense compound
tgcgacattcatcattattc

SEQ ID NO: 20709 - DNA, 20 bp, Artificial Sequence
  Antisense compound
ttgcgacattcatcattatt

SEQ ID NO: 20710 - DNA, 20 bp, Artificial Sequence
  Antisense compound
tttgcgacattcatcattat

SEQ ID NO: 20711 - DNA, 20 bp, Artificial Sequence
  Antisense compound
ctttgcgacattcatcatta

SEQ ID NO: 20712 - DNA, 20 bp, Artificial Sequence
  Antisense compound
actttgcgacattcatcatt

SEQ ID NO: 20713 - DNA, 20 bp, Artificial Sequence
  Antisense compound
tactttgcgacattcatcat

SEQ ID NO: 20714 - DNA, 20 bp, Artificial Sequence
  Antisense compound
atactttgcgacattcatca

SEQ ID NO: 20715 - DNA, 20 bp, Artificial Sequence
  Antisense compound
tatactttgcgacattcatc

SEQ ID NO: 20716 - DNA, 20 bp, Artificial Sequence
  Antisense compound
gtatactttgcgacattcat

SEQ ID NO: 20717 - DNA, 20 bp, Artificial Sequence
  Antisense compound
agtatactttgcgacattca

SEQ ID NO: 20718 - DNA, 20 bp, Artificial Sequence
  Antisense compound
gagtatactttgcgacattc

SEQ ID NO: 20719 - DNA, 20 bp, Artificial Sequence
  Antisense compound
tgagtatactttgcgacatt

SEQ ID NO: 20720 - DNA, 20 bp, Artificial Sequence
  Antisense compound
ttgagtatactttgcgacat

SEQ ID NO: 20721 - DNA, 20 bp, Artificial Sequence
  Antisense compound
gttgagtatactttgcgaca

SEQ ID NO: 20722 - DNA, 20 bp, Artificial Sequence
  Antisense compound
agttgagtatactttgcgac

SEQ ID NO: 20723 - DNA, 20 bp, Artificial Sequence
  Antisense compound
cagttgagtatactttgcga

SEQ ID NO: 20724 - DNA, 20 bp, Artificial Sequence
  Antisense compound
acagttgagtatactttgcg

SEQ ID NO: 20725 - DNA, 20 bp, Artificial Sequence
  Antisense compound
cacagttgagtatactttgc

SEQ ID NO: 20726 - DNA, 20 bp, Artificial Sequence
  Antisense compound
acacagttgagtatactttg

SEQ ID NO: 20727 - DNA, 20 bp, Artificial Sequence
  Antisense compound
gacacagttgagtatacttt

SEQ ID NO: 20728 - DNA, 20 bp, Artificial Sequence
  Antisense compound
tgacacagttgagtatactt

SEQ ID NO: 20729 - DNA, 20 bp, Artificial Sequence
  Antisense compound
ttgacacagttgagtatact

SEQ ID NO: 20730 - DNA, 20 bp, Artificial Sequence
  Antisense compound
attgacacagttgagtatac

SEQ ID NO: 20731 - DNA, 20 bp, Artificial Sequence
  Antisense compound
tattgacacagttgagtata

SEQ ID NO: 20732 - DNA, 20 bp, Artificial Sequence
  Antisense compound
gtattgacacagttgagtat

SEQ ID NO: 20733 - DNA, 20 bp, Artificial Sequence
  Antisense compound
agtattgacacagttgagta

SEQ ID NO: 20734 - DNA, 20 bp, Artificial Sequence
  Antisense compound
aagtattgacacagttgagt

SEQ ID NO: 20735 - DNA, 20 bp, Artificial Sequence
  Antisense compound
taagtattgacacagttgag

SEQ ID NO: 20736 - DNA, 20 bp, Artificial Sequence
  Antisense compound
ttaagtattgacacagttga

SEQ ID NO: 20737 - DNA, 20 bp, Artificial Sequence
  Antisense compound
tttaagtattgacacagttg

SEQ ID NO: 20738 - DNA, 20 bp, Artificial Sequence
  Antisense compound
atttaagtattgacacagtt

SEQ ID NO: 20739 - DNA, 20 bp, Artificial Sequence
  Antisense compound
tatttaagtattgacacagt

SEQ ID NO: 20740 - DNA, 20 bp, Artificial Sequence
  Antisense compound
gtatttaagtattgacacag

SEQ ID NO: 20741 - DNA, 20 bp, Artificial Sequence
  Antisense compound
tgtatttaagtattgacaca

SEQ ID NO: 20742 - DNA, 20 bp, Artificial Sequence
  Antisense compound
gtgtatttaagtattgacac

SEQ ID NO: 20743 - DNA, 20 bp, Artificial Sequence
  Antisense compound
agtgtatttaagtattgaca

SEQ ID NO: 20744 - DNA, 20 bp, Artificial Sequence
  Antisense compound
aagtgtatttaagtattgac

SEQ ID NO: 20745 - DNA, 20 bp, Artificial Sequence
  Antisense compound
taagtgtatttaagtattga

SEQ ID NO: 20746 - DNA, 20 bp, Artificial Sequence
  Antisense compound
gtaagtgtatttaagtattg

SEQ ID NO: 20747 - DNA, 20 bp, Artificial Sequence
  Antisense compound
agtaagtgtatttaagtatt

SEQ ID NO: 20748 - DNA, 20 bp, Artificial Sequence
  Antisense compound
aagtaagtgtatttaagtat

SEQ ID NO: 20749 - DNA, 20 bp, Artificial Sequence
  Antisense compound
aaagtaagtgtatttaagta

SEQ ID NO: 20750 - DNA, 20 bp, Artificial Sequence
  Antisense compound
taaagtaagtgtatttaagt

SEQ ID NO: 20751 - DNA, 20 bp, Artificial Sequence
  Antisense compound
ctaaagtaagtgtatttaag

SEQ ID NO: 20752 - DNA, 20 bp, Artificial Sequence
  Antisense compound
gctaaagtaagtgtatttaa

SEQ ID NO: 20753 - DNA, 20 bp, Artificial Sequence
  Antisense compound
agctaaagtaagtgtattta

SEQ ID NO: 20754 - DNA, 20 bp, Artificial Sequence
  Antisense compound
cagctaaagtaagtgtattt

SEQ ID NO: 20755 - DNA, 20 bp, Artificial Sequence
  Antisense compound
acagctaaagtaagtgtatt

SEQ ID NO: 20756 - DNA, 20 bp, Artificial Sequence
  Antisense compound
tacagctaaagtaagtgtat

SEQ ID NO: 20757 - DNA, 20 bp, Artificial Sequence
  Antisense compound
gtacagctaaagtaagtgta

SEQ ID NO: 20758 - DNA, 20 bp, Artificial Sequence
  Antisense compound
ggtacagctaaagtaagtgt

SEQ ID NO: 20759 - DNA, 20 bp, Artificial Sequence
  Antisense compound
gggtacagctaaagtaagtg

SEQ ID NO: 20760 - DNA, 20 bp, Artificial Sequence
  Antisense compound
agggtacagctaaagtaagt

SEQ ID NO: 20761 - DNA, 20 bp, Artificial Sequence
  Antisense compound
tagggtacagctaaagtaag

SEQ ID NO: 20762 - DNA, 20 bp, Artificial Sequence
  Antisense compound
gtagggtacagctaaagtaa

SEQ ID NO: 20763 - DNA, 20 bp, Artificial Sequence
  Antisense compound
tgtagggtacagctaaagta

SEQ ID NO: 20764 - DNA, 20 bp, Artificial Sequence
  Antisense compound
ttgtagggtacagctaaagt

SEQ ID NO: 20765 - DNA, 20 bp, Artificial Sequence
  Antisense compound
gttgtagggtacagctaaag

SEQ ID NO: 20766 - DNA, 20 bp, Artificial Sequence
  Antisense compound
tgttgtagggtacagctaaa

SEQ ID NO: 20767 - DNA, 20 bp, Artificial Sequence
  Antisense compound
atgttgtagggtacagctaa

SEQ ID NO: 20768 - DNA, 20 bp, Artificial Sequence
  Antisense compound
catgttgtagggtacagcta

SEQ ID NO: 20769 - DNA, 20 bp, Artificial Sequence
  Antisense compound
tcatgttgtagggtacagct

SEQ ID NO: 20770 - DNA, 20 bp, Artificial Sequence
  Antisense compound
ctcatgttgtagggtacagc

SEQ ID NO: 20771 - DNA, 20 bp, Artificial Sequence
  Antisense compound
tctcatgttgtagggtacag

SEQ ID NO: 20772 - DNA, 20 bp, Artificial Sequence
  Antisense compound
ctctcatgttgtagggtaca

SEQ ID NO: 20773 - DNA, 20 bp, Artificial Sequence
  Antisense compound
actctcatgttgtagggtac

SEQ ID NO: 20774 - DNA, 20 bp, Artificial Sequence
  Antisense compound
aactctcatgttgtagggta

SEQ ID NO: 20775 - DNA, 20 bp, Artificial Sequence
  Antisense compound
taactctcatgttgtagggt

SEQ ID NO: 20776 - DNA, 20 bp, Artificial Sequence
  Antisense compound
ataactctcatgttgtaggg

SEQ ID NO: 20777 - DNA, 20 bp, Artificial Sequence
  Antisense compound
aataactctcatgttgtagg

SEQ ID NO: 20778 - DNA, 20 bp, Artificial Sequence
  Antisense compound
gaataactctcatgttgtag

SEQ ID NO: 20779 - DNA, 20 bp, Artificial Sequence
  Antisense compound
tgaataactctcatgttgta

SEQ ID NO: 20780 - DNA, 20 bp, Artificial Sequence
  Antisense compound
gtgaataactctcatgttgt

SEQ ID NO: 20781 - DNA, 20 bp, Artificial Sequence
  Antisense compound
agtgaataactctcatgttg

SEQ ID NO: 20782 - DNA, 20 bp, Artificial Sequence
  Antisense compound
aagtgaataactctcatgtt

SEQ ID NO: 20783 - DNA, 20 bp, Artificial Sequence
  Antisense compound
aaagtgaataactctcatgt

SEQ ID NO: 20784 - DNA, 20 bp, Artificial Sequence
  Antisense compound
caaagtgaataactctcatg

SEQ ID NO: 20785 - DNA, 20 bp, Artificial Sequence
  Antisense compound
ccaaagtgaataactctcat

SEQ ID NO: 20786 - DNA, 20 bp, Artificial Sequence
  Antisense compound
accaaagtgaataactctca

SEQ ID NO: 20787 - DNA, 20 bp, Artificial Sequence
  Antisense compound
caccaaagtgaataactctc

SEQ ID NO: 20788 - DNA, 20 bp, Artificial Sequence
  Antisense compound
gcaccaaagtgaataactct

SEQ ID NO: 20789 - DNA, 20 bp, Artificial Sequence
  Antisense compound
agcaccaaagtgaataactc

SEQ ID NO: 20790 - DNA, 20 bp, Artificial Sequence
  Antisense compound
cagcaccaaagtgaataact

SEQ ID NO: 20791 - DNA, 20 bp, Artificial Sequence
  Antisense compound
ccagcaccaaagtgaataac

SEQ ID NO: 20792 - DNA, 20 bp, Artificial Sequence
  Antisense compound
gccagcaccaaagtgaataa

SEQ ID NO: 20793 - DNA, 20 bp, Artificial Sequence
  Antisense compound
agccagcaccaaagtgaata

SEQ ID NO: 20794 - DNA, 20 bp, Artificial Sequence
  Antisense compound
gagccagcaccaaagtgaat

SEQ ID NO: 20795 - DNA, 20 bp, Artificial Sequence
  Antisense compound
agagccagcaccaaagtgaa

SEQ ID NO: 20796 - DNA, 20 bp, Artificial Sequence
  Antisense compound
cagagccagcaccaaagtga

SEQ ID NO: 20797 - DNA, 20 bp, Artificial Sequence
  Antisense compound
tcagagccagcaccaaagtg

SEQ ID NO: 20798 - DNA, 20 bp, Artificial Sequence
  Antisense compound
atcagagccagcaccaaagt

SEQ ID NO: 20799 - DNA, 20 bp, Artificial Sequence
  Antisense compound
tatcagagccagcaccaaag

SEQ ID NO: 20800 - DNA, 20 bp, Artificial Sequence
  Antisense compound
ttatcagagccagcaccaaa

SEQ ID NO: 20801 - DNA, 20 bp, Artificial Sequence
  Antisense compound
tttatcagagccagcaccaa

SEQ ID NO: 20802 - DNA, 20 bp, Artificial Sequence
  Antisense compound
ctttatcagagccagcacca

SEQ ID NO: 20803 - DNA, 20 bp, Artificial Sequence
  Antisense compound
cctttatcagagccagcacc

SEQ ID NO: 20804 - DNA, 20 bp, Artificial Sequence
  Antisense compound
tcctttatcagagccagcac

SEQ ID NO: 20805 - DNA, 20 bp, Artificial Sequence
  Antisense compound
ctcctttatcagagccagca

SEQ ID NO: 20806 - DNA, 20 bp, Artificial Sequence
  Antisense compound
actcctttatcagagccagc

SEQ ID NO: 20807 - DNA, 20 bp, Artificial Sequence
  Antisense compound
aactcctttatcagagccag

SEQ ID NO: 20808 - DNA, 20 bp, Artificial Sequence
  Antisense compound
caactcctttatcagagcca

SEQ ID NO: 20809 - DNA, 20 bp, Artificial Sequence
  Antisense compound
gcaactcctttatcagagcc

SEQ ID NO: 20810 - DNA, 20 bp, Artificial Sequence
  Antisense compound
tgcaactcctttatcagagc

SEQ ID NO: 20811 - DNA, 20 bp, Artificial Sequence
  Antisense compound
gtgcaactcctttatcagag

SEQ ID NO: 20812 - DNA, 20 bp, Artificial Sequence
  Antisense compound
ggtgcaactcctttatcaga

SEQ ID NO: 20813 - DNA, 20 bp, Artificial Sequence
  Antisense compound
tggtgcaactcctttatcag

SEQ ID NO: 20814 - DNA, 20 bp, Artificial Sequence
  Antisense compound
ctggtgcaactcctttatca

SEQ ID NO: 20815 - DNA, 20 bp, Artificial Sequence
  Antisense compound
cctggtgcaactcctttatc

SEQ ID NO: 20816 - DNA, 20 bp, Artificial Sequence
  Antisense compound
acctggtgcaactcctttat

SEQ ID NO: 20817 - DNA, 20 bp, Artificial Sequence
  Antisense compound
tacctggtgcaactccttta

SEQ ID NO: 20818 - DNA, 20 bp, Artificial Sequence
  Antisense compound
gtacctggtgcaactccttt

SEQ ID NO: 20819 - DNA, 20 bp, Artificial Sequence
  Antisense compound
tgtacctggtgcaactcctt

SEQ ID NO: 20820 - DNA, 20 bp, Artificial Sequence
  Antisense compound
ctgtacctggtgcaactcct

SEQ ID NO: 20821 - DNA, 20 bp, Artificial Sequence
  Antisense compound
gctgtacctggtgcaactcc

SEQ ID NO: 20822 - DNA, 20 bp, Artificial Sequence
  Antisense compound
agctgtacctggtgcaactc

SEQ ID NO: 20823 - DNA, 20 bp, Artificial Sequence
  Antisense compound
cagctgtacctggtgcaact

SEQ ID NO: 20824 - DNA, 20 bp, Artificial Sequence
  Antisense compound
acagctgtacctggtgcaac

SEQ ID NO: 20825 - DNA, 20 bp, Artificial Sequence
  Antisense compound
cacagctgtacctggtgcaa

SEQ ID NO: 20826 - DNA, 20 bp, Artificial Sequence
  Antisense compound
gcacagctgtacctggtgca

SEQ ID NO: 20827 - DNA, 20 bp, Artificial Sequence
  Antisense compound
agcacagctgtacctggtgc

SEQ ID NO: 20828 - DNA, 20 bp, Artificial Sequence
  Antisense compound
gagcacagctgtacctggtg

SEQ ID NO: 20829 - DNA, 20 bp, Artificial Sequence
  Antisense compound
tgagcacagctgtacctggt

SEQ ID NO: 20830 - DNA, 20 bp, Artificial Sequence
  Antisense compound
ctgagcacagctgtacctgg

SEQ ID NO: 20831 - DNA, 20 bp, Artificial Sequence
  Antisense compound
tctgagcacagctgtacctg

SEQ ID NO: 20832 - DNA, 20 bp, Artificial Sequence
  Antisense compound
gtctgagcacagctgtacct

SEQ ID NO: 20833 - DNA, 20 bp, Artificial Sequence
  Antisense compound
tgtctgagcacagctgtacc

SEQ ID NO: 20834 - DNA, 20 bp, Artificial Sequence
  Antisense compound
ttgtctgagcacagctgtac

SEQ ID NO: 20835 - DNA, 20 bp, Artificial Sequence
  Antisense compound
attgtctgagcacagctgta

SEQ ID NO: 20836 - DNA, 20 bp, Artificial Sequence
  Antisense compound
cattgtctgagcacagctgt

SEQ ID NO: 20837 - DNA, 20 bp, Artificial Sequence
  Antisense compound
ccattgtctgagcacagctg

SEQ ID NO: 20838 - DNA, 20 bp, Artificial Sequence
  Antisense compound
accattgtctgagcacagct

SEQ ID NO: 20839 - DNA, 20 bp, Artificial Sequence
  Antisense compound
aaccattgtctgagcacagc

SEQ ID NO: 20840 - DNA, 20 bp, Artificial Sequence
  Antisense compound
caaccattgtctgagcacag

SEQ ID NO: 20841 - DNA, 20 bp, Artificial Sequence
  Antisense compound
gcaaccattgtctgagcaca

SEQ ID NO: 20842 - DNA, 20 bp, Artificial Sequence
  Antisense compound
ggcaaccattgtctgagcac

SEQ ID NO: 20843 - DNA, 20 bp, Artificial Sequence
  Antisense compound
tggcaaccattgtctgagca

SEQ ID NO: 20844 - DNA, 20 bp, Artificial Sequence
  Antisense compound
ttggcaaccattgtctgagc

SEQ ID NO: 20845 - DNA, 20 bp, Artificial Sequence
  Antisense compound
gttggcaaccattgtctgag

SEQ ID NO: 20846 - DNA, 20 bp, Artificial Sequence
  Antisense compound
agttggcaaccattgtctga

SEQ ID NO: 20847 - DNA, 20 bp, Artificial Sequence
  Antisense compound
cagttggcaaccattgtctg

SEQ ID NO: 20848 - DNA, 20 bp, Artificial Sequence
  Antisense compound
ccagttggcaaccattgtct

SEQ ID NO: 20849 - DNA, 20 bp, Artificial Sequence
  Antisense compound
gccagttggcaaccattgtc

SEQ ID NO: 20850 - DNA, 20 bp, Artificial Sequence
  Antisense compound
tgccagttggcaaccattgt

SEQ ID NO: 20851 - DNA, 20 bp, Artificial Sequence
  Antisense compound
gtgccagttggcaaccattg

SEQ ID NO: 20852 - DNA, 20 bp, Artificial Sequence
  Antisense compound
tgtgccagttggcaaccatt

SEQ ID NO: 20853 - DNA, 20 bp, Artificial Sequence
  Antisense compound
gtgtgccagttggcaaccat

SEQ ID NO: 20854 - DNA, 20 bp, Artificial Sequence
  Antisense compound
agtgtgccagttggcaacca

SEQ ID NO: 20855 - DNA, 20 bp, Artificial Sequence
  Antisense compound
tagtgtgccagttggcaacc

SEQ ID NO: 20856 - DNA, 20 bp, Artificial Sequence
  Antisense compound
gtagtgtgccagttggcaac

SEQ ID NO: 20857 - DNA, 20 bp, Artificial Sequence
  Antisense compound
agtagtgtgccagttggcaa

SEQ ID NO: 20858 - DNA, 20 bp, Artificial Sequence
  Antisense compound
aagtagtgtgccagttggca

SEQ ID NO: 20859 - DNA, 20 bp, Artificial Sequence
  Antisense compound
caagtagtgtgccagttggc

SEQ ID NO: 20860 - DNA, 20 bp, Artificial Sequence
  Antisense compound
acaagtagtgtgccagttgg

SEQ ID NO: 20861 - DNA, 20 bp, Artificial Sequence
  Antisense compound
gacaagtagtgtgccagttg

SEQ ID NO: 20862 - DNA, 20 bp, Artificial Sequence
  Antisense compound
cgacaagtagtgtgccagtt

SEQ ID NO: 20863 - DNA, 20 bp, Artificial Sequence
  Antisense compound
tcgacaagtagtgtgccagt

SEQ ID NO: 20864 - DNA, 20 bp, Artificial Sequence
  Antisense compound
atcgacaagtagtgtgccag

SEQ ID NO: 20865 - DNA, 20 bp, Artificial Sequence
  Antisense compound
aatcgacaagtagtgtgcca

SEQ ID NO: 20866 - DNA, 20 bp, Artificial Sequence
  Antisense compound
gaatcgacaagtagtgtgcc

SEQ ID NO: 20867 - DNA, 20 bp, Artificial Sequence
  Antisense compound
tgaatcgacaagtagtgtgc

SEQ ID NO: 20868 - DNA, 20 bp, Artificial Sequence
  Antisense compound
ctgaatcgacaagtagtgtg

SEQ ID NO: 20869 - DNA, 20 bp, Artificial Sequence
  Antisense compound
tctgaatcgacaagtagtgt

SEQ ID NO: 20870 - DNA, 20 bp, Artificial Sequence
  Antisense compound
atctgaatcgacaagtagtg

SEQ ID NO: 20871 - DNA, 20 bp, Artificial Sequence
  Antisense compound
gatctgaatcgacaagtagt

SEQ ID NO: 20872 - DNA, 20 bp, Artificial Sequence
  Antisense compound
agatctgaatcgacaagtag

SEQ ID NO: 20873 - DNA, 20 bp, Artificial Sequence
  Antisense compound
aagatctgaatcgacaagta

SEQ ID NO: 20874 - DNA, 20 bp, Artificial Sequence
  Antisense compound
taagatctgaatcgacaagt

SEQ ID NO: 20875 - DNA, 20 bp, Artificial Sequence
  Antisense compound
ttaagatctgaatcgacaag

SEQ ID NO: 20876 - DNA, 20 bp, Artificial Sequence
  Antisense compound
attaagatctgaatcgacaa

SEQ ID NO: 20877 - DNA, 20 bp, Artificial Sequence
  Antisense compound
cattaagatctgaatcgaca

SEQ ID NO: 20878 - DNA, 20 bp, Artificial Sequence
  Antisense compound
tcattaagatctgaatcgac

SEQ ID NO: 20879 - DNA, 20 bp, Artificial Sequence
  Antisense compound
gtcattaagatctgaatcga

SEQ ID NO: 20880 - DNA, 20 bp, Artificial Sequence
  Antisense compound
agtcattaagatctgaatcg

SEQ ID NO: 20881 - DNA, 20 bp, Artificial Sequence
  Antisense compound
aagtcattaagatctgaatc

SEQ ID NO: 20882 - DNA, 20 bp, Artificial Sequence
  Antisense compound
gaagtcattaagatctgaat

SEQ ID NO: 20883 - DNA, 20 bp, Artificial Sequence
  Antisense compound
cgaagtcattaagatctgaa

SEQ ID NO: 20884 - DNA, 20 bp, Artificial Sequence
  Antisense compound
acgaagtcattaagatctga

SEQ ID NO: 20885 - DNA, 20 bp, Artificial Sequence
  Antisense compound
gacgaagtcattaagatctg

SEQ ID NO: 20886 - DNA, 20 bp, Artificial Sequence
  Antisense compound
agacgaagtcattaagatct

SEQ ID NO: 20887 - DNA, 20 bp, Artificial Sequence
  Antisense compound
gagacgaagtcattaagatc

SEQ ID NO: 20888 - DNA, 20 bp, Artificial Sequence
  Antisense compound
ggagacgaagtcattaagat

SEQ ID NO: 20889 - DNA, 20 bp, Artificial Sequence
  Antisense compound
cggagacgaagtcattaaga

SEQ ID NO: 20890 - DNA, 20 bp, Artificial Sequence
  Antisense compound
tcggagacgaagtcattaag

SEQ ID NO: 20891 - DNA, 20 bp, Artificial Sequence
  Antisense compound
gtcggagacgaagtcattaa

SEQ ID NO: 20892 - DNA, 20 bp, Artificial Sequence
  Antisense compound
cgtcggagacgaagtcatta

SEQ ID NO: 20893 - DNA, 20 bp, Artificial Sequence
  Antisense compound
gcgtcggagacgaagtcatt

SEQ ID NO: 20894 - DNA, 20 bp, Artificial Sequence
  Antisense compound
tgcgtcggagacgaagtcat

SEQ ID NO: 20895 - DNA, 20 bp, Artificial Sequence
  Antisense compound
atgcgtcggagacgaagtca

SEQ ID NO: 20896 - DNA, 20 bp, Artificial Sequence
  Antisense compound
tatgcgtcggagacgaagtc

SEQ ID NO: 20897 - DNA, 20 bp, Artificial Sequence
  Antisense compound
atatgcgtcggagacgaagt

SEQ ID NO: 20898 - DNA, 20 bp, Artificial Sequence
  Antisense compound
aatatgcgtcggagacgaag

SEQ ID NO: 20899 - DNA, 20 bp, Artificial Sequence
  Antisense compound
gaatatgcgtcggagacgaa

SEQ ID NO: 20900 - DNA, 20 bp, Artificial Sequence
  Antisense compound
agaatatgcgtcggagacga

SEQ ID NO: 20901 - DNA, 20 bp, Artificial Sequence
  Antisense compound
tagaatatgcgtcggagacg

SEQ ID NO: 20902 - DNA, 20 bp, Artificial Sequence
  Antisense compound
gtagaatatgcgtcggagac

SEQ ID NO: 20903 - DNA, 20 bp, Artificial Sequence
  Antisense compound
agtagaatatgcgtcggaga

SEQ ID NO: 20904 - DNA, 20 bp, Artificial Sequence
  Antisense compound
aagtagaatatgcgtcggag

SEQ ID NO: 20905 - DNA, 20 bp, Artificial Sequence
  Antisense compound
aaagtagaatatgcgtcgga

SEQ ID NO: 20906 - DNA, 20 bp, Artificial Sequence
  Antisense compound
taaagtagaatatgcgtcgg

SEQ ID NO: 20907 - DNA, 20 bp, Artificial Sequence
  Antisense compound
ttaaagtagaatatgcgtcg

SEQ ID NO: 20908 - DNA, 20 bp, Artificial Sequence
  Antisense compound
attaaagtagaatatgcgtc

SEQ ID NO: 20909 - DNA, 20 bp, Artificial Sequence
  Antisense compound
aattaaagtagaatatgcgt

SEQ ID NO: 20910 - DNA, 20 bp, Artificial Sequence
  Antisense compound
caattaaagtagaatatgcg

SEQ ID NO: 20911 - DNA, 20 bp, Artificial Sequence
  Antisense compound
ccaattaaagtagaatatgc

SEQ ID NO: 20912 - DNA, 20 bp, Artificial Sequence
  Antisense compound
tccaattaaagtagaatatg

SEQ ID NO: 20913 - DNA, 20 bp, Artificial Sequence
  Antisense compound
ctccaattaaagtagaatat

SEQ ID NO: 20914 - DNA, 20 bp, Artificial Sequence
  Antisense compound
tctccaattaaagtagaata

SEQ ID NO: 20915 - DNA, 20 bp, Artificial Sequence
  Antisense compound
gtctccaattaaagtagaat

SEQ ID NO: 20916 - DNA, 20 bp, Artificial Sequence
  Antisense compound
agtctccaattaaagtagaa

SEQ ID NO: 20917 - DNA, 20 bp, Artificial Sequence
  Antisense compound
cagtctccaattaaagtaga

SEQ ID NO: 20918 - DNA, 20 bp, Artificial Sequence
  Antisense compound
acagtctccaattaaagtag

SEQ ID NO: 20919 - DNA, 20 bp, Artificial Sequence
  Antisense compound
cacagtctccaattaaagta

SEQ ID NO: 20920 - DNA, 20 bp, Artificial Sequence
  Antisense compound
gcacagtctccaattaaagt

SEQ ID NO: 20921 - DNA, 20 bp, Artificial Sequence
  Antisense compound
tgcacagtctccaattaaag

SEQ ID NO: 20922 - DNA, 20 bp, Artificial Sequence
  Antisense compound
ttgcacagtctccaattaaa

SEQ ID NO: 20923 - DNA, 20 bp, Artificial Sequence
  Antisense compound
gttgcacagtctccaattaa

SEQ ID NO: 20924 - DNA, 20 bp, Artificial Sequence
  Antisense compound
tgttgcacagtctccaatta

SEQ ID NO: 20925 - DNA, 20 bp, Artificial Sequence
  Antisense compound
ctgttgcacagtctccaatt

SEQ ID NO: 20926 - DNA, 20 bp, Artificial Sequence
  Antisense compound
actgttgcacagtctccaat

SEQ ID NO: 20927 - DNA, 20 bp, Artificial Sequence
  Antisense compound
tactgttgcacagtctccaa

SEQ ID NO: 20928 - DNA, 20 bp, Artificial Sequence
  Antisense compound
gtactgttgcacagtctcca

SEQ ID NO: 20929 - DNA, 20 bp, Artificial Sequence
  Antisense compound
tgtactgttgcacagtctcc

SEQ ID NO: 20930 - DNA, 20 bp, Artificial Sequence
  Antisense compound
atgtactgttgcacagtctc

SEQ ID NO: 20931 - DNA, 20 bp, Artificial Sequence
  Antisense compound
tatgtactgttgcacagtct

SEQ ID NO: 20932 - DNA, 20 bp, Artificial Sequence
  Antisense compound
gtatgtactgttgcacagtc

SEQ ID NO: 20933 - DNA, 20 bp, Artificial Sequence
  Antisense compound
cgtatgtactgttgcacagt

SEQ ID NO: 20934 - DNA, 20 bp, Artificial Sequence
  Antisense compound
ccgtatgtactgttgcacag

SEQ ID NO: 20935 - DNA, 20 bp, Artificial Sequence
  Antisense compound
gccgtatgtactgttgcaca

SEQ ID NO: 20936 - DNA, 20 bp, Artificial Sequence
  Antisense compound
agccgtatgtactgttgcac

SEQ ID NO: 20937 - DNA, 20 bp, Artificial Sequence
  Antisense compound
tagccgtatgtactgttgca

SEQ ID NO: 20938 - DNA, 20 bp, Artificial Sequence
  Antisense compound
ttagccgtatgtactgttgc

SEQ ID NO: 20939 - DNA, 20 bp, Artificial Sequence
  Antisense compound
attagccgtatgtactgttg

SEQ ID NO: 20940 - DNA, 20 bp, Artificial Sequence
  Antisense compound
tattagccgtatgtactgtt

SEQ ID NO: 20941 - DNA, 20 bp, Artificial Sequence
  Antisense compound
ttattagccgtatgtactgt

SEQ ID NO: 20942 - DNA, 20 bp, Artificial Sequence
  Antisense compound
tttattagccgtatgtactg

SEQ ID NO: 20943 - DNA, 20 bp, Artificial Sequence
  Antisense compound
atttattagccgtatgtact

SEQ ID NO: 20944 - DNA, 20 bp, Artificial Sequence
  Antisense compound
catttattagccgtatgtac

SEQ ID NO: 20945 - DNA, 20 bp, Artificial Sequence
  Antisense compound
ccatttattagccgtatgta

SEQ ID NO: 20946 - DNA, 20 bp, Artificial Sequence
  Antisense compound
cccatttattagccgtatgt

SEQ ID NO: 20947 - DNA, 20 bp, Artificial Sequence
  Antisense compound
tcccatttattagccgtatg

SEQ ID NO: 20948 - DNA, 20 bp, Artificial Sequence
  Antisense compound
gtcccatttattagccgtat

SEQ ID NO: 20949 - DNA, 20 bp, Artificial Sequence
  Antisense compound
ggtcccatttattagccgta

SEQ ID NO: 20950 - DNA, 20 bp, Artificial Sequence
  Antisense compound
aggtcccatttattagccgt

SEQ ID NO: 20951 - DNA, 20 bp, Artificial Sequence
  Antisense compound
aaggtcccatttattagccg

SEQ ID NO: 20952 - DNA, 20 bp, Artificial Sequence
  Antisense compound
taaggtcccatttattagcc

SEQ ID NO: 20953 - DNA, 20 bp, Artificial Sequence
  Antisense compound
ataaggtcccatttattagc

SEQ ID NO: 20954 - DNA, 20 bp, Artificial Sequence
  Antisense compound
aataaggtcccatttattag

SEQ ID NO: 20955 - DNA, 20 bp, Artificial Sequence
  Antisense compound
taataaggtcccatttatta

SEQ ID NO: 20956 - DNA, 20 bp, Artificial Sequence
  Antisense compound
ataataaggtcccatttatt

SEQ ID NO: 20957 - DNA, 20 bp, Artificial Sequence
  Antisense compound
aataataaggtcccatttat

SEQ ID NO: 20958 - DNA, 20 bp, Artificial Sequence
  Antisense compound
taataataaggtcccattta

SEQ ID NO: 20959 - DNA, 20 bp, Artificial Sequence
  Antisense compound
ctaataataaggtcccattt

SEQ ID NO: 20960 - DNA, 20 bp, Artificial Sequence
  Antisense compound
gctaataataaggtcccatt

SEQ ID NO: 20961 - DNA, 20 bp, Artificial Sequence
  Antisense compound
cgctaataataaggtcccat

SEQ ID NO: 20962 - DNA, 20 bp, Artificial Sequence
  Antisense compound
tcgctaataataaggtccca

SEQ ID NO: 20963 - DNA, 20 bp, Artificial Sequence
  Antisense compound
atcgctaataataaggtccc

SEQ ID NO: 20964 - DNA, 20 bp, Artificial Sequence
  Antisense compound
tatcgctaataataaggtcc

SEQ ID NO: 20965 - DNA, 20 bp, Artificial Sequence
  Antisense compound
atatcgctaataataaggtc

SEQ ID NO: 20966 - DNA, 20 bp, Artificial Sequence
  Antisense compound
catatcgctaataataaggt

SEQ ID NO: 20967 - DNA, 20 bp, Artificial Sequence
  Antisense compound
acatatcgctaataataagg

SEQ ID NO: 20968 - DNA, 20 bp, Artificial Sequence
  Antisense compound
tacatatcgctaataataag

SEQ ID NO: 20969 - DNA, 20 bp, Artificial Sequence
  Antisense compound
atacatatcgctaataataa

SEQ ID NO: 20970 - DNA, 20 bp, Artificial Sequence
  Antisense compound
catacatatcgctaataata

SEQ ID NO: 20971 - DNA, 20 bp, Artificial Sequence
  Antisense compound
tcatacatatcgctaataat

SEQ ID NO: 20972 - DNA, 20 bp, Artificial Sequence
  Antisense compound
gtcatacatatcgctaataa

SEQ ID NO: 20973 - DNA, 20 bp, Artificial Sequence
  Antisense compound
ggtcatacatatcgctaata

SEQ ID NO: 20974 - DNA, 20 bp, Artificial Sequence
  Antisense compound
gggtcatacatatcgctaat

SEQ ID NO: 20975 - DNA, 20 bp, Artificial Sequence
  Antisense compound
agggtcatacatatcgctaa

SEQ ID NO: 20976 - DNA, 20 bp, Artificial Sequence
  Antisense compound
tagggtcatacatatcgcta

SEQ ID NO: 20977 - DNA, 20 bp, Artificial Sequence
  Antisense compound
ctagggtcatacatatcgct

SEQ ID NO: 20978 - DNA, 20 bp, Artificial Sequence
  Antisense compound
cctagggtcatacatatcgc

SEQ ID NO: 20979 - DNA, 20 bp, Artificial Sequence
  Antisense compound
tcctagggtcatacatatcg

SEQ ID NO: 20980 - DNA, 20 bp, Artificial Sequence
  Antisense compound
gtcctagggtcatacatatc

SEQ ID NO: 20981 - DNA, 20 bp, Artificial Sequence
  Antisense compound
ggtcctagggtcatacatat

SEQ ID NO: 20982 - DNA, 20 bp, Artificial Sequence
  Antisense compound
tggtcctagggtcatacata

SEQ ID NO: 20983 - DNA, 20 bp, Artificial Sequence
  Antisense compound
ttggtcctagggtcatacat

SEQ ID NO: 20984 - DNA, 20 bp, Artificial Sequence
  Antisense compound
tttggtcctagggtcataca

SEQ ID NO: 20985 - DNA, 20 bp, Artificial Sequence
  Antisense compound
gtttggtcctagggtcatac

SEQ ID NO: 20986 - DNA, 20 bp, Artificial Sequence
  Antisense compound
tgtttggtcctagggtcata

SEQ ID NO: 20987 - DNA, 20 bp, Artificial Sequence
  Antisense compound
atgtttggtcctagggtcat

SEQ ID NO: 20988 - DNA, 20 bp, Artificial Sequence
  Antisense compound
catgtttggtcctagggtca

SEQ ID NO: 20989 - DNA, 20 bp, Artificial Sequence
  Antisense compound
acatgtttggtcctagggtc

SEQ ID NO: 20990 - DNA, 20 bp, Artificial Sequence
  Antisense compound
cacatgtttggtcctagggt

SEQ ID NO: 20991 - DNA, 20 bp, Artificial Sequence
  Antisense compound
tcacatgtttggtcctaggg

SEQ ID NO: 20992 - DNA, 20 bp, Artificial Sequence
  Antisense compound
gtcacatgtttggtcctagg

SEQ ID NO: 20993 - DNA, 20 bp, Artificial Sequence
  Antisense compound
tgtcacatgtttggtcctag

SEQ ID NO: 20994 - DNA, 20 bp, Artificial Sequence
  Antisense compound
ttgtcacatgtttggtccta

SEQ ID NO: 20995 - DNA, 20 bp, Artificial Sequence
  Antisense compound
tttgtcacatgtttggtcct

SEQ ID NO: 20996 - DNA, 20 bp, Artificial Sequence
  Antisense compound
ttttgtcacatgtttggtcc

SEQ ID NO: 20997 - DNA, 20 bp, Artificial Sequence
  Antisense compound
cttttgtcacatgtttggtc

SEQ ID NO: 20998 - DNA, 20 bp, Artificial Sequence
  Antisense compound
tcttttgtcacatgtttggt

SEQ ID NO: 20999 - DNA, 20 bp, Artificial Sequence
  Antisense compound
ctcttttgtcacatgtttgg

SEQ ID NO: 21000 - DNA, 20 bp, Artificial Sequence
  Antisense compound
tctcttttgtcacatgtttg

SEQ ID NO: 21001 - DNA, 20 bp, Artificial Sequence
  Antisense compound
ttctcttttgtcacatgttt

SEQ ID NO: 21002 - DNA, 20 bp, Artificial Sequence
  Antisense compound
attctcttttgtcacatgtt

SEQ ID NO: 21003 - DNA, 20 bp, Artificial Sequence
  Antisense compound
cattctcttttgtcacatgt

SEQ ID NO: 21004 - DNA, 20 bp, Artificial Sequence
  Antisense compound
tcattctcttttgtcacatg

SEQ ID NO: 21005 - DNA, 20 bp, Artificial Sequence
  Antisense compound
gtcattctcttttgtcacat

SEQ ID NO: 21006 - DNA, 20 bp, Artificial Sequence
  Antisense compound
agtcattctcttttgtcaca

SEQ ID NO: 21007 - DNA, 20 bp, Artificial Sequence
  Antisense compound
gagtcattctcttttgtcac

SEQ ID NO: 21008 - DNA, 20 bp, Artificial Sequence
  Antisense compound
agagtcattctcttttgtca

SEQ ID NO: 21009 - DNA, 20 bp, Artificial Sequence
  Antisense compound
tagagtcattctcttttgtc

SEQ ID NO: 21010 - DNA, 20 bp, Artificial Sequence
  Antisense compound
ttagagtcattctcttttgt

SEQ ID NO: 21011 - DNA, 20 bp, Artificial Sequence
  Antisense compound
tttagagtcattctcttttg

SEQ ID NO: 21012 - DNA, 20 bp, Artificial Sequence
  Antisense compound
ctttagagtcattctctttt

SEQ ID NO: 21013 - DNA, 20 bp, Artificial Sequence
  Antisense compound
tctttagagtcattctcttt

SEQ ID NO: 21014 - DNA, 20 bp, Artificial Sequence
  Antisense compound
ttctttagagtcattctctt

SEQ ID NO: 21015 - DNA, 20 bp, Artificial Sequence
  Antisense compound
cttctttagagtcattctct

SEQ ID NO: 21016 - DNA, 20 bp, Artificial Sequence
  Antisense compound
ccttctttagagtcattctc

SEQ ID NO: 21017 - DNA, 20 bp, Artificial Sequence
  Antisense compound
cccttctttagagtcattct

SEQ ID NO: 21018 - DNA, 20 bp, Artificial Sequence
  Antisense compound
acccttctttagagtcattc

SEQ ID NO: 21019 - DNA, 20 bp, Artificial Sequence
  Antisense compound
aacccttctttagagtcatt

SEQ ID NO: 21020 - DNA, 20 bp, Artificial Sequence
  Antisense compound
aaacccttctttagagtcat

SEQ ID NO: 21021 - DNA, 20 bp, Artificial Sequence
  Antisense compound
aaaacccttctttagagtca

SEQ ID NO: 21022 - DNA, 20 bp, Artificial Sequence
  Antisense compound
aaaaacccttctttagagtc

SEQ ID NO: 21023 - DNA, 20 bp, Artificial Sequence
  Antisense compound
gaaaaacccttctttagagt

SEQ ID NO: 21024 - DNA, 20 bp, Artificial Sequence
  Antisense compound
tgaaaaacccttctttagag

SEQ ID NO: 21025 - DNA, 20 bp, Artificial Sequence
  Antisense compound
gtgaaaaacccttctttaga

SEQ ID NO: 21026 - DNA, 20 bp, Artificial Sequence
  Antisense compound
agtgaaaaacccttctttag

SEQ ID NO: 21027 - DNA, 20 bp, Artificial Sequence
  Antisense compound
aagtgaaaaacccttcttta

SEQ ID NO: 21028 - DNA, 20 bp, Artificial Sequence
  Antisense compound
taagtgaaaaacccttcttt

SEQ ID NO: 21029 - DNA, 20 bp, Artificial Sequence
  Antisense compound
ataagtgaaaaacccttctt

SEQ ID NO: 21030 - DNA, 20 bp, Artificial Sequence
  Antisense compound
gataagtgaaaaacccttct

SEQ ID NO: 21031 - DNA, 20 bp, Artificial Sequence
  Antisense compound
agataagtgaaaaacccttc

SEQ ID NO: 21032 - DNA, 20 bp, Artificial Sequence
  Antisense compound
cagataagtgaaaaaccctt

SEQ ID NO: 21033 - DNA, 20 bp, Artificial Sequence
  Antisense compound
acagataagtgaaaaaccct

SEQ ID NO: 21034 - DNA, 20 bp, Artificial Sequence
  Antisense compound
cacagataagtgaaaaaccc

SEQ ID NO: 21035 - DNA, 20 bp, Artificial Sequence
  Antisense compound
acacagataagtgaaaaacc

SEQ ID NO: 21036 - DNA, 20 bp, Artificial Sequence
  Antisense compound
cacacagataagtgaaaaac

SEQ ID NO: 21037 - DNA, 20 bp, Artificial Sequence
  Antisense compound
ccacacagataagtgaaaaa

SEQ ID NO: 21038 - DNA, 20 bp, Artificial Sequence
  Antisense compound
tccacacagataagtgaaaa

SEQ ID NO: 21039 - DNA, 20 bp, Artificial Sequence
  Antisense compound
atccacacagataagtgaaa

SEQ ID NO: 21040 - DNA, 20 bp, Artificial Sequence
  Antisense compound
aatccacacagataagtgaa

SEQ ID NO: 21041 - DNA, 20 bp, Artificial Sequence
  Antisense compound
aaatccacacagataagtga

SEQ ID NO: 21042 - DNA, 20 bp, Artificial Sequence
  Antisense compound
taaatccacacagataagtg

SEQ ID NO: 21043 - DNA, 20 bp, Artificial Sequence
  Antisense compound
ataaatccacacagataagt

SEQ ID NO: 21044 - DNA, 20 bp, Artificial Sequence
  Antisense compound
tataaatccacacagataag

SEQ ID NO: 21045 - DNA, 20 bp, Artificial Sequence
  Antisense compound
ttataaatccacacagataa

SEQ ID NO: 21046 - DNA, 20 bp, Artificial Sequence
  Antisense compound
tttataaatccacacagata

SEQ ID NO: 21047 - DNA, 20 bp, Artificial Sequence
  Antisense compound
ctttataaatccacacagat

SEQ ID NO: 21048 - DNA, 20 bp, Artificial Sequence
  Antisense compound
gctttataaatccacacaga

SEQ ID NO: 21049 - DNA, 20 bp, Artificial Sequence
  Antisense compound
tgctttataaatccacacag

SEQ ID NO: 21050 - DNA, 20 bp, Artificial Sequence
  Antisense compound
ttgctttataaatccacaca

SEQ ID NO: 21051 - DNA, 20 bp, Artificial Sequence
  Antisense compound
tttgctttataaatccacac

SEQ ID NO: 21052 - DNA, 20 bp, Artificial Sequence
  Antisense compound
ttttgctttataaatccaca

SEQ ID NO: 21053 - DNA, 20 bp, Artificial Sequence
  Antisense compound
tttttgctttataaatccac

SEQ ID NO: 21054 - DNA, 20 bp, Artificial Sequence
  Antisense compound
gtttttgctttataaatcca

SEQ ID NO: 21055 - DNA, 20 bp, Artificial Sequence
  Antisense compound
agtttttgctttataaatcc

SEQ ID NO: 21056 - DNA, 20 bp, Artificial Sequence
  Antisense compound
tagtttttgctttataaatc

SEQ ID NO: 21057 - DNA, 20 bp, Artificial Sequence
  Antisense compound
ctagtttttgctttataaat

SEQ ID NO: 21058 - DNA, 20 bp, Artificial Sequence
  Antisense compound
gctagtttttgctttataaa

SEQ ID NO: 21059 - DNA, 20 bp, Artificial Sequence
  Antisense compound
ggctagtttttgctttataa

SEQ ID NO: 21060 - DNA, 20 bp, Artificial Sequence
  Antisense compound
gggctagtttttgctttata

SEQ ID NO: 21061 - DNA, 20 bp, Artificial Sequence
  Antisense compound
agggctagtttttgctttat

SEQ ID NO: 21062 - DNA, 20 bp, Artificial Sequence
  Antisense compound
cagggctagtttttgcttta

SEQ ID NO: 21063 - DNA, 20 bp, Artificial Sequence
  Antisense compound
ccagggctagtttttgcttt

SEQ ID NO: 21064 - DNA, 20 bp, Artificial Sequence
  Antisense compound
cccagggctagtttttgctt

SEQ ID NO: 21065 - DNA, 20 bp, Artificial Sequence
  Antisense compound
acccagggctagtttttgct

SEQ ID NO: 21066 - DNA, 20 bp, Artificial Sequence
  Antisense compound
cacccagggctagtttttgc

SEQ ID NO: 21067 - DNA, 20 bp, Artificial Sequence
  Antisense compound
ccacccagggctagtttttg

SEQ ID NO: 21068 - DNA, 20 bp, Artificial Sequence
  Antisense compound
accacccagggctagttttt

SEQ ID NO: 21069 - DNA, 20 bp, Artificial Sequence
  Antisense compound
aaccacccagggctagtttt

SEQ ID NO: 21070 - DNA, 20 bp, Artificial Sequence
  Antisense compound
gaaccacccagggctagttt

SEQ ID NO: 21071 - DNA, 20 bp, Artificial Sequence
  Antisense compound
agaaccacccagggctagtt

SEQ ID NO: 21072 - DNA, 20 bp, Artificial Sequence
  Antisense compound
tagaaccacccagggctagt

SEQ ID NO: 21073 - DNA, 20 bp, Artificial Sequence
  Antisense compound
atagaaccacccagggctag

SEQ ID NO: 21074 - DNA, 20 bp, Artificial Sequence
  Antisense compound
tatagaaccacccagggcta

SEQ ID NO: 21075 - DNA, 20 bp, Artificial Sequence
  Antisense compound
ctatagaaccacccagggct

SEQ ID NO: 21076 - DNA, 20 bp, Artificial Sequence
  Antisense compound
gctatagaaccacccagggc

SEQ ID NO: 21077 - DNA, 20 bp, Artificial Sequence
  Antisense compound
agctatagaaccacccaggg

SEQ ID NO: 21078 - DNA, 20 bp, Artificial Sequence
  Antisense compound
cagctatagaaccacccagg

SEQ ID NO: 21079 - DNA, 20 bp, Artificial Sequence
  Antisense compound
acagctatagaaccacccag

SEQ ID NO: 21080 - DNA, 20 bp, Artificial Sequence
  Antisense compound
tacagctatagaaccaccca

SEQ ID NO: 21081 - DNA, 20 bp, Artificial Sequence
  Antisense compound
ttacagctatagaaccaccc

SEQ ID NO: 21082 - DNA, 20 bp, Artificial Sequence
  Antisense compound
tttacagctatagaaccacc

SEQ ID NO: 21083 - DNA, 20 bp, Artificial Sequence
  Antisense compound
ctttacagctatagaaccac

SEQ ID NO: 21084 - DNA, 20 bp, Artificial Sequence
  Antisense compound
tctttacagctatagaacca

SEQ ID NO: 21085 - DNA, 20 bp, Artificial Sequence
  Antisense compound
atctttacagctatagaacc

SEQ ID NO: 21086 - DNA, 20 bp, Artificial Sequence
  Antisense compound
tatctttacagctatagaac

SEQ ID NO: 21087 - DNA, 20 bp, Artificial Sequence
  Antisense compound
ttatctttacagctatagaa

SEQ ID NO: 21088 - DNA, 20 bp, Artificial Sequence
  Antisense compound
gttatctttacagctataga

SEQ ID NO: 21089 - DNA, 20 bp, Artificial Sequence
  Antisense compound
tgttatctttacagctatag

SEQ ID NO: 21090 - DNA, 20 bp, Artificial Sequence
  Antisense compound
ctgttatctttacagctata

SEQ ID NO: 21091 - DNA, 20 bp, Artificial Sequence
  Antisense compound
tctgttatctttacagctat

SEQ ID NO: 21092 - DNA, 20 bp, Artificial Sequence
  Antisense compound
ctctgttatctttacagcta

SEQ ID NO: 21093 - DNA, 20 bp, Artificial Sequence
  Antisense compound
gctctgttatctttacagct

SEQ ID NO: 21094 - DNA, 20 bp, Artificial Sequence
  Antisense compound
tgctctgttatctttacagc

SEQ ID NO: 21095 - DNA, 20 bp, Artificial Sequence
  Antisense compound
atgctctgttatctttacag

SEQ ID NO: 21096 - DNA, 20 bp, Artificial Sequence
  Antisense compound
aatgctctgttatctttaca

SEQ ID NO: 21097 - DNA, 20 bp, Artificial Sequence
  Antisense compound
gaatgctctgttatctttac

SEQ ID NO: 21098 - DNA, 20 bp, Artificial Sequence
  Antisense compound
agaatgctctgttatcttta

SEQ ID NO: 21099 - DNA, 20 bp, Artificial Sequence
  Antisense compound
aagaatgctctgttatcttt

SEQ ID NO: 21100 - DNA, 20 bp, Artificial Sequence
  Antisense compound
caagaatgctctgttatctt

SEQ ID NO: 21101 - DNA, 20 bp, Artificial Sequence
  Antisense compound
ccaagaatgctctgttatct

SEQ ID NO: 21102 - DNA, 20 bp, Artificial Sequence
  Antisense compound
tccaagaatgctctgttatc

SEQ ID NO: 21103 - DNA, 20 bp, Artificial Sequence
  Antisense compound
ttccaagaatgctctgttat

SEQ ID NO: 21104 - DNA, 20 bp, Artificial Sequence
  Antisense compound
attccaagaatgctctgtta

SEQ ID NO: 21105 - DNA, 20 bp, Artificial Sequence
  Antisense compound
cattccaagaatgctctgtt

SEQ ID NO: 21106 - DNA, 20 bp, Artificial Sequence
  Antisense compound
gcattccaagaatgctctgt

SEQ ID NO: 21107 - DNA, 20 bp, Artificial Sequence
  Antisense compound
agcattccaagaatgctctg

SEQ ID NO: 21108 - DNA, 20 bp, Artificial Sequence
  Antisense compound
cagcattccaagaatgctct

SEQ ID NO: 21109 - DNA, 20 bp, Artificial Sequence
  Antisense compound
tcagcattccaagaatgctc

SEQ ID NO: 21110 - DNA, 20 bp, Artificial Sequence
  Antisense compound
gtcagcattccaagaatgct

SEQ ID NO: 21111 - DNA, 20 bp, Artificial Sequence
  Antisense compound
ggtcagcattccaagaatgc

SEQ ID NO: 21112 - DNA, 20 bp, Artificial Sequence
  Antisense compound
aggtcagcattccaagaatg

SEQ ID NO: 21113 - DNA, 20 bp, Artificial Sequence
  Antisense compound
aaggtcagcattccaagaat

SEQ ID NO: 21114 - DNA, 20 bp, Artificial Sequence
  Antisense compound
aaaggtcagcattccaagaa

SEQ ID NO: 21115 - DNA, 20 bp, Artificial Sequence
  Antisense compound
taaaggtcagcattccaaga

SEQ ID NO: 21116 - DNA, 20 bp, Artificial Sequence
  Antisense compound
gtaaaggtcagcattccaag

SEQ ID NO: 21117 - DNA, 20 bp, Artificial Sequence
  Antisense compound
tgtaaaggtcagcattccaa

SEQ ID NO: 21118 - DNA, 20 bp, Artificial Sequence
  Antisense compound
ttgtaaaggtcagcattcca

SEQ ID NO: 21119 - DNA, 20 bp, Artificial Sequence
  Antisense compound
cttgtaaaggtcagcattcc

SEQ ID NO: 21120 - DNA, 20 bp, Artificial Sequence
  Antisense compound
gcttgtaaaggtcagcattc

SEQ ID NO: 21121 - DNA, 20 bp, Artificial Sequence
  Antisense compound
agcttgtaaaggtcagcatt

SEQ ID NO: 21122 - DNA, 20 bp, Artificial Sequence
  Antisense compound
aagcttgtaaaggtcagcat

SEQ ID NO: 21123 - DNA, 20 bp, Artificial Sequence
  Antisense compound
taagcttgtaaaggtcagca

SEQ ID NO: 21124 - DNA, 20 bp, Artificial Sequence
  Antisense compound
ataagcttgtaaaggtcagc

SEQ ID NO: 21125 - DNA, 20 bp, Artificial Sequence
  Antisense compound
cataagcttgtaaaggtcag

SEQ ID NO: 21126 - DNA, 20 bp, Artificial Sequence
  Antisense compound
ccataagcttgtaaaggtca

SEQ ID NO: 21127 - DNA, 20 bp, Artificial Sequence
  Antisense compound
cccataagcttgtaaaggtc

SEQ ID NO: 21128 - DNA, 20 bp, Artificial Sequence
  Antisense compound
gcccataagcttgtaaaggt

SEQ ID NO: 21129 - DNA, 20 bp, Artificial Sequence
  Antisense compound
ggcccataagcttgtaaagg

SEQ ID NO: 21130 - DNA, 20 bp, Artificial Sequence
  Antisense compound
tggcccataagcttgtaaag

SEQ ID NO: 21131 - DNA, 20 bp, Artificial Sequence
  Antisense compound
atggcccataagcttgtaaa

SEQ ID NO: 21132 - DNA, 20 bp, Artificial Sequence
  Antisense compound
aatggcccataagcttgtaa

SEQ ID NO: 21133 - DNA, 20 bp, Artificial Sequence
  Antisense compound
aaatggcccataagcttgta

SEQ ID NO: 21134 - DNA, 20 bp, Artificial Sequence
  Antisense compound
gaaatggcccataagcttgt

SEQ ID NO: 21135 - DNA, 20 bp, Artificial Sequence
  Antisense compound
agaaatggcccataagcttg

SEQ ID NO: 21136 - DNA, 20 bp, Artificial Sequence
  Antisense compound
gagaaatggcccataagctt

SEQ ID NO: 21137 - DNA, 20 bp, Artificial Sequence
  Antisense compound
tgagaaatggcccataagct

SEQ ID NO: 21138 - DNA, 20 bp, Artificial Sequence
  Antisense compound
atgagaaatggcccataagc

SEQ ID NO: 21139 - DNA, 20 bp, Artificial Sequence
  Antisense compound
catgagaaatggcccataag

SEQ ID NO: 21140 - DNA, 20 bp, Artificial Sequence
  Antisense compound
ccatgagaaatggcccataa

SEQ ID NO: 21141 - DNA, 20 bp, Artificial Sequence
  Antisense compound
accatgagaaatggcccata

SEQ ID NO: 21142 - DNA, 20 bp, Artificial Sequence
  Antisense compound
caccatgagaaatggcccat

SEQ ID NO: 21143 - DNA, 20 bp, Artificial Sequence
  Antisense compound
ccaccatgagaaatggccca

SEQ ID NO: 21144 - DNA, 20 bp, Artificial Sequence
  Antisense compound
tccaccatgagaaatggccc

SEQ ID NO: 21145 - DNA, 20 bp, Artificial Sequence
  Antisense compound
gtccaccatgagaaatggcc

SEQ ID NO: 21146 - DNA, 20 bp, Artificial Sequence
  Antisense compound
tgtccaccatgagaaatggc

SEQ ID NO: 21147 - DNA, 20 bp, Artificial Sequence
  Antisense compound
ctgtccaccatgagaaatgg

SEQ ID NO: 21148 - DNA, 20 bp, Artificial Sequence
  Antisense compound
gctgtccaccatgagaaatg

SEQ ID NO: 21149 - DNA, 20 bp, Artificial Sequence
  Antisense compound
agctgtccaccatgagaaat

SEQ ID NO: 21150 - DNA, 20 bp, Artificial Sequence
  Antisense compound
aagctgtccaccatgagaaa

SEQ ID NO: 21151 - DNA, 20 bp, Artificial Sequence
  Antisense compound
aaagctgtccaccatgagaa

SEQ ID NO: 21152 - DNA, 20 bp, Artificial Sequence
  Antisense compound
aaaagctgtccaccatgaga

SEQ ID NO: 21153 - DNA, 20 bp, Artificial Sequence
  Antisense compound
caaaagctgtccaccatgag

SEQ ID NO: 21154 - DNA, 20 bp, Artificial Sequence
  Antisense compound
acaaaagctgtccaccatga

SEQ ID NO: 21155 - DNA, 20 bp, Artificial Sequence
  Antisense compound
aacaaaagctgtccaccatg

SEQ ID NO: 21156 - DNA, 20 bp, Artificial Sequence
  Antisense compound
taacaaaagctgtccaccat

SEQ ID NO: 21157 - DNA, 20 bp, Artificial Sequence
  Antisense compound
gtaacaaaagctgtccacca

SEQ ID NO: 21158 - DNA, 20 bp, Artificial Sequence
  Antisense compound
tgtaacaaaagctgtccacc

SEQ ID NO: 21159 - DNA, 20 bp, Artificial Sequence
  Antisense compound
ttgtaacaaaagctgtccac

SEQ ID NO: 21160 - DNA, 20 bp, Artificial Sequence
  Antisense compound
tttgtaacaaaagctgtcca

SEQ ID NO: 21161 - DNA, 20 bp, Artificial Sequence
  Antisense compound
atttgtaacaaaagctgtcc

SEQ ID NO: 21162 - DNA, 20 bp, Artificial Sequence
  Antisense compound
catttgtaacaaaagctgtc

SEQ ID NO: 21163 - DNA, 20 bp, Artificial Sequence
  Antisense compound
acatttgtaacaaaagctgt

SEQ ID NO: 21164 - DNA, 20 bp, Artificial Sequence
  Antisense compound
tacatttgtaacaaaagctg

SEQ ID NO: 21165 - DNA, 20 bp, Artificial Sequence
  Antisense compound
ttacatttgtaacaaaagct

SEQ ID NO: 21166 - DNA, 20 bp, Artificial Sequence
  Antisense compound
tttacatttgtaacaaaagc

SEQ ID NO: 21167 - DNA, 20 bp, Artificial Sequence
  Antisense compound
atttacatttgtaacaaaag

SEQ ID NO: 21168 - DNA, 20 bp, Artificial Sequence
  Antisense compound
catttacatttgtaacaaaa

SEQ ID NO: 21169 - DNA, 20 bp, Artificial Sequence
  Antisense compound
gcatttacatttgtaacaaa

SEQ ID NO: 21170 - DNA, 20 bp, Artificial Sequence
  Antisense compound
tgcatttacatttgtaacaa

SEQ ID NO: 21171 - DNA, 20 bp, Artificial Sequence
  Antisense compound
atgcatttacatttgtaaca

SEQ ID NO: 21172 - DNA, 20 bp, Artificial Sequence
  Antisense compound
gatgcatttacatttgtaac

SEQ ID NO: 21173 - DNA, 20 bp, Artificial Sequence
  Antisense compound
tgatgcatttacatttgtaa

SEQ ID NO: 21174 - DNA, 20 bp, Artificial Sequence
  Antisense compound
atgatgcatttacatttgta

SEQ ID NO: 21175 - DNA, 20 bp, Artificial Sequence
  Antisense compound
gatgatgcatttacatttgt

SEQ ID NO: 21176 - DNA, 20 bp, Artificial Sequence
  Antisense compound
tgatgatgcatttacatttg

SEQ ID NO: 21177 - DNA, 20 bp, Artificial Sequence
  Antisense compound
atgatgatgcatttacattt

SEQ ID NO: 21178 - DNA, 20 bp, Artificial Sequence
  Antisense compound
gatgatgatgcatttacatt

SEQ ID NO: 21179 - DNA, 20 bp, Artificial Sequence
  Antisense compound
cgatgatgatgcatttacat

SEQ ID NO: 21180 - DNA, 20 bp, Artificial Sequence
  Antisense compound
ccgatgatgatgcatttaca

SEQ ID NO: 21181 - DNA, 20 bp, Artificial Sequence
  Antisense compound
tccgatgatgatgcatttac

SEQ ID NO: 21182 - DNA, 20 bp, Artificial Sequence
  Antisense compound
ttccgatgatgatgcattta

SEQ ID NO: 21183 - DNA, 20 bp, Artificial Sequence
  Antisense compound
cttccgatgatgatgcattt

SEQ ID NO: 21184 - DNA, 20 bp, Artificial Sequence
  Antisense compound
gcttccgatgatgatgcatt

SEQ ID NO: 21185 - DNA, 20 bp, Artificial Sequence
  Antisense compound
tgcttccgatgatgatgcat

SEQ ID NO: 21186 - DNA, 20 bp, Artificial Sequence
  Antisense compound
atgcttccgatgatgatgca

SEQ ID NO: 21187 - DNA, 20 bp, Artificial Sequence
  Antisense compound
aatgcttccgatgatgatgc

SEQ ID NO: 21188 - DNA, 20 bp, Artificial Sequence
  Antisense compound
aaatgcttccgatgatgatg

SEQ ID NO: 21189 - DNA, 20 bp, Artificial Sequence
  Antisense compound
aaaatgcttccgatgatgat

SEQ ID NO: 21190 - DNA, 20 bp, Artificial Sequence
  Antisense compound
aaaaatgcttccgatgatga

SEQ ID NO: 21191 - DNA, 20 bp, Artificial Sequence
  Antisense compound
taaaaatgcttccgatgatg

SEQ ID NO: 21192 - DNA, 20 bp, Artificial Sequence
  Antisense compound
ttaaaaatgcttccgatgat

SEQ ID NO: 21193 - DNA, 20 bp, Artificial Sequence
  Antisense compound
attaaaaatgcttccgatga

SEQ ID NO: 21194 - DNA, 20 bp, Artificial Sequence
  Antisense compound
aattaaaaatgcttccgatg

SEQ ID NO: 21195 - DNA, 20 bp, Artificial Sequence
  Antisense compound
caattaaaaatgcttccgat

SEQ ID NO: 21196 - DNA, 20 bp, Artificial Sequence
  Antisense compound
ccaattaaaaatgcttccga

SEQ ID NO: 21197 - DNA, 20 bp, Artificial Sequence
  Antisense compound
cccaattaaaaatgcttccg

SEQ ID NO: 21198 - DNA, 20 bp, Artificial Sequence
  Antisense compound
ccccaattaaaaatgcttcc

SEQ ID NO: 21199 - DNA, 20 bp, Artificial Sequence
  Antisense compound
gccccaattaaaaatgcttc

SEQ ID NO: 21200 - DNA, 20 bp, Artificial Sequence
  Antisense compound
agccccaattaaaaatgctt

SEQ ID NO: 21201 - DNA, 20 bp, Artificial Sequence
  Antisense compound
tagccccaattaaaaatgct

SEQ ID NO: 21202 - DNA, 20 bp, Artificial Sequence
  Antisense compound
ttagccccaattaaaaatgc

SEQ ID NO: 21203 - DNA, 20 bp, Artificial Sequence
  Antisense compound
gttagccccaattaaaaatg

SEQ ID NO: 21204 - DNA, 20 bp, Artificial Sequence
  Antisense compound
agttagccccaattaaaaat

SEQ ID NO: 21205 - DNA, 20 bp, Artificial Sequence
  Antisense compound
tagttagccccaattaaaaa

SEQ ID NO: 21206 - DNA, 20 bp, Artificial Sequence
  Antisense compound
atagttagccccaattaaaa

SEQ ID NO: 21207 - DNA, 20 bp, Artificial Sequence
  Antisense compound
gatagttagccccaattaaa

SEQ ID NO: 21208 - DNA, 20 bp, Artificial Sequence
  Antisense compound
agatagttagccccaattaa

SEQ ID NO: 21209 - DNA, 20 bp, Artificial Sequence
  Antisense compound
aagatagttagccccaatta

SEQ ID NO: 21210 - DNA, 20 bp, Artificial Sequence
  Antisense compound
caagatagttagccccaatt

SEQ ID NO: 21211 - DNA, 20 bp, Artificial Sequence
  Antisense compound
ccaagatagttagccccaat

SEQ ID NO: 21212 - DNA, 20 bp, Artificial Sequence
  Antisense compound
gccaagatagttagccccaa

SEQ ID NO: 21213 - DNA, 20 bp, Artificial Sequence
  Antisense compound
tgccaagatagttagcccca

SEQ ID NO: 21214 - DNA, 20 bp, Artificial Sequence
  Antisense compound
ttgccaagatagttagcccc

SEQ ID NO: 21215 - DNA, 20 bp, Artificial Sequence
  Antisense compound
cttgccaagatagttagccc

SEQ ID NO: 21216 - DNA, 20 bp, Artificial Sequence
  Antisense compound
gcttgccaagatagttagcc

SEQ ID NO: 21217 - DNA, 20 bp, Artificial Sequence
  Antisense compound
ggcttgccaagatagttagc

SEQ ID NO: 21218 - DNA, 20 bp, Artificial Sequence
  Antisense compound
cggcttgccaagatagttag

SEQ ID NO: 21219 - DNA, 20 bp, Artificial Sequence
  Antisense compound
tcggcttgccaagatagtta

SEQ ID NO: 21220 - DNA, 20 bp, Artificial Sequence
  Antisense compound
ttcggcttgccaagatagtt

SEQ ID NO: 21221 - DNA, 20 bp, Artificial Sequence
  Antisense compound
cttcggcttgccaagatagt

SEQ ID NO: 21222 - DNA, 20 bp, Artificial Sequence
  Antisense compound
ccttcggcttgccaagatag

SEQ ID NO: 21223 - DNA, 20 bp, Artificial Sequence
  Antisense compound
tccttcggcttgccaagata

SEQ ID NO: 21224 - DNA, 20 bp, Artificial Sequence
  Antisense compound
ttccttcggcttgccaagat

SEQ ID NO: 21225 - DNA, 20 bp, Artificial Sequence
  Antisense compound
gttccttcggcttgccaaga

SEQ ID NO: 21226 - DNA, 20 bp, Artificial Sequence
  Antisense compound
tgttccttcggcttgccaag

SEQ ID NO: 21227 - DNA, 20 bp, Artificial Sequence
  Antisense compound
ttgttccttcggcttgccaa

SEQ ID NO: 21228 - DNA, 20 bp, Artificial Sequence
  Antisense compound
tttgttccttcggcttgcca

SEQ ID NO: 21229 - DNA, 20 bp, Artificial Sequence
  Antisense compound
atttgttccttcggcttgcc

SEQ ID NO: 21230 - DNA, 20 bp, Artificial Sequence
  Antisense compound
aatttgttccttcggcttgc

SEQ ID NO: 21231 - DNA, 20 bp, Artificial Sequence
  Antisense compound
caatttgttccttcggcttg

SEQ ID NO: 21232 - DNA, 20 bp, Artificial Sequence
  Antisense compound
tcaatttgttccttcggctt

SEQ ID NO: 21233 - DNA, 20 bp, Artificial Sequence
  Antisense compound
atcaatttgttccttcggct

SEQ ID NO: 21234 - DNA, 20 bp, Artificial Sequence
  Antisense compound
catcaatttgttccttcggc

SEQ ID NO: 21235 - DNA, 20 bp, Artificial Sequence
  Antisense compound
ccatcaatttgttccttcgg

SEQ ID NO: 21236 - DNA, 20 bp, Artificial Sequence
  Antisense compound
gccatcaatttgttccttcg

SEQ ID NO: 21237 - DNA, 20 bp, Artificial Sequence
  Antisense compound
agccatcaatttgttccttc

SEQ ID NO: 21238 - DNA, 20 bp, Artificial Sequence
  Antisense compound
tagccatcaatttgttcctt

SEQ ID NO: 21239 - DNA, 20 bp, Artificial Sequence
  Antisense compound
atagccatcaatttgttcct

SEQ ID NO: 21240 - DNA, 20 bp, Artificial Sequence
  Antisense compound
tatagccatcaatttgttcc

SEQ ID NO: 21241 - DNA, 20 bp, Artificial Sequence
  Antisense compound
gtatagccatcaatttgttc

SEQ ID NO: 21242 - DNA, 20 bp, Artificial Sequence
  Antisense compound
ggtatagccatcaatttgtt

SEQ ID NO: 21243 - DNA, 20 bp, Artificial Sequence
  Antisense compound
tggtatagccatcaatttgt

SEQ ID NO: 21244 - DNA, 20 bp, Artificial Sequence
  Antisense compound
atggtatagccatcaatttg

SEQ ID NO: 21245 - DNA, 20 bp, Artificial Sequence
  Antisense compound
catggtatagccatcaattt

SEQ ID NO: 21246 - DNA, 20 bp, Artificial Sequence
  Antisense compound
gcatggtatagccatcaatt

SEQ ID NO: 21247 - DNA, 20 bp, Artificial Sequence
  Antisense compound
tgcatggtatagccatcaat

SEQ ID NO: 21248 - DNA, 20 bp, Artificial Sequence
  Antisense compound
atgcatggtatagccatcaa

SEQ ID NO: 21249 - DNA, 20 bp, Artificial Sequence
  Antisense compound
catgcatggtatagccatca

SEQ ID NO: 21250 - DNA, 20 bp, Artificial Sequence
  Antisense compound
gcatgcatggtatagccatc

SEQ ID NO: 21251 - DNA, 20 bp, Artificial Sequence
  Antisense compound
agcatgcatggtatagccat

SEQ ID NO: 21252 - DNA, 20 bp, Artificial Sequence
  Antisense compound
tagcatgcatggtatagcca

SEQ ID NO: 21253 - DNA, 20 bp, Artificial Sequence
  Antisense compound
ttagcatgcatggtatagcc

SEQ ID NO: 21254 - DNA, 20 bp, Artificial Sequence
  Antisense compound
gttagcatgcatggtatagc

SEQ ID NO: 21255 - DNA, 20 bp, Artificial Sequence
  Antisense compound
agttagcatgcatggtatag

SEQ ID NO: 21256 - DNA, 20 bp, Artificial Sequence
  Antisense compound
tagttagcatgcatggtata

SEQ ID NO: 21257 - DNA, 20 bp, Artificial Sequence
  Antisense compound
gtagttagcatgcatggtat

SEQ ID NO: 21258 - DNA, 20 bp, Artificial Sequence
  Antisense compound
tgtagttagcatgcatggta

SEQ ID NO: 21259 - DNA, 20 bp, Artificial Sequence
  Antisense compound
atgtagttagcatgcatggt

SEQ ID NO: 21260 - DNA, 20 bp, Artificial Sequence
  Antisense compound
aatgtagttagcatgcatgg

SEQ ID NO: 21261 - DNA, 20 bp, Artificial Sequence
  Antisense compound
aaatgtagttagcatgcatg

SEQ ID NO: 21262 - DNA, 20 bp, Artificial Sequence
  Antisense compound
aaaatgtagttagcatgcat

SEQ ID NO: 21263 - DNA, 20 bp, Artificial Sequence
  Antisense compound
gaaaatgtagttagcatgca

SEQ ID NO: 21264 - DNA, 20 bp, Artificial Sequence
  Antisense compound
agaaaatgtagttagcatgc

SEQ ID NO: 21265 - DNA, 20 bp, Artificial Sequence
  Antisense compound
cagaaaatgtagttagcatg

SEQ ID NO: 21266 - DNA, 20 bp, Artificial Sequence
  Antisense compound
ccagaaaatgtagttagcat

SEQ ID NO: 21267 - DNA, 20 bp, Artificial Sequence
  Antisense compound
tccagaaaatgtagttagca

SEQ ID NO: 21268 - DNA, 20 bp, Artificial Sequence
  Antisense compound
ctccagaaaatgtagttagc

SEQ ID NO: 21269 - DNA, 20 bp, Artificial Sequence
  Antisense compound
cctccagaaaatgtagttag

SEQ ID NO: 21270 - DNA, 20 bp, Artificial Sequence
  Antisense compound
tcctccagaaaatgtagtta

SEQ ID NO: 21271 - DNA, 20 bp, Artificial Sequence
  Antisense compound
ttcctccagaaaatgtagtt

SEQ ID NO: 21272 - DNA, 20 bp, Artificial Sequence
  Antisense compound
gttcctccagaaaatgtagt

SEQ ID NO: 21273 - DNA, 20 bp, Artificial Sequence
  Antisense compound
tgttcctccagaaaatgtag

SEQ ID NO: 21274 - DNA, 20 bp, Artificial Sequence
  Antisense compound
gtgttcctccagaaaatgta

SEQ ID NO: 21275 - DNA, 20 bp, Artificial Sequence
  Antisense compound
tgtgttcctccagaaaatgt

SEQ ID NO: 21276 - DNA, 20 bp, Artificial Sequence
  Antisense compound
ttgtgttcctccagaaaatg

SEQ ID NO: 21277 - DNA, 20 bp, Artificial Sequence
  Antisense compound
tttgtgttcctccagaaaat

SEQ ID NO: 21278 - DNA, 20 bp, Artificial Sequence
  Antisense compound
atttgtgttcctccagaaaa

SEQ ID NO: 21279 - DNA, 20 bp, Artificial Sequence
  Antisense compound
gatttgtgttcctccagaaa

SEQ ID NO: 21280 - DNA, 20 bp, Artificial Sequence
  Antisense compound
ggatttgtgttcctccagaa

SEQ ID NO: 21281 - DNA, 20 bp, Artificial Sequence
  Antisense compound
aggatttgtgttcctccaga

SEQ ID NO: 21282 - DNA, 20 bp, Artificial Sequence
  Antisense compound
taggatttgtgttcctccag

SEQ ID NO: 21283 - DNA, 20 bp, Artificial Sequence
  Antisense compound
ataggatttgtgttcctcca

SEQ ID NO: 21284 - DNA, 20 bp, Artificial Sequence
  Antisense compound
gataggatttgtgttcctcc

SEQ ID NO: 21285 - DNA, 20 bp, Artificial Sequence
  Antisense compound
ggataggatttgtgttcctc

SEQ ID NO: 21286 - DNA, 20 bp, Artificial Sequence
  Antisense compound
tggataggatttgtgttcct

SEQ ID NO: 21287 - DNA, 20 bp, Artificial Sequence
  Antisense compound
ctggataggatttgtgttcc

SEQ ID NO: 21288 - DNA, 20 bp, Artificial Sequence
  Antisense compound
actggataggatttgtgttc

SEQ ID NO: 21289 - DNA, 20 bp, Artificial Sequence
  Antisense compound
aactggataggatttgtgtt

SEQ ID NO: 21290 - DNA, 20 bp, Artificial Sequence
  Antisense compound
caactggataggatttgtgt

SEQ ID NO: 21291 - DNA, 20 bp, Artificial Sequence
  Antisense compound
acaactggataggatttgtg

SEQ ID NO: 21292 - DNA, 20 bp, Artificial Sequence
  Antisense compound
gacaactggataggatttgt

SEQ ID NO: 21293 - DNA, 20 bp, Artificial Sequence
  Antisense compound
agacaactggataggatttg

SEQ ID NO: 21294 - DNA, 20 bp, Artificial Sequence
  Antisense compound
aagacaactggataggattt

SEQ ID NO: 21295 - DNA, 20 bp, Artificial Sequence
  Antisense compound
gaagacaactggataggatt

SEQ ID NO: 21296 - DNA, 20 bp, Artificial Sequence
  Antisense compound
ggaagacaactggataggat

SEQ ID NO: 21297 - DNA, 20 bp, Artificial Sequence
  Antisense compound
aggaagacaactggatagga

SEQ ID NO: 21298 - DNA, 20 bp, Artificial Sequence
  Antisense compound
taggaagacaactggatagg

SEQ ID NO: 21299 - DNA, 20 bp, Artificial Sequence
  Antisense compound
ataggaagacaactggatag

SEQ ID NO: 21300 - DNA, 20 bp, Artificial Sequence
  Antisense compound
aataggaagacaactggata

SEQ ID NO: 21301 - DNA, 20 bp, Artificial Sequence
  Antisense compound
gaataggaagacaactggat

SEQ ID NO: 21302 - DNA, 20 bp, Artificial Sequence
  Antisense compound
tgaataggaagacaactgga

SEQ ID NO: 21303 - DNA, 20 bp, Artificial Sequence
  Antisense compound
gtgaataggaagacaactgg

SEQ ID NO: 21304 - DNA, 20 bp, Artificial Sequence
  Antisense compound
agtgaataggaagacaactg

SEQ ID NO: 21305 - DNA, 20 bp, Artificial Sequence
  Antisense compound
gagtgaataggaagacaact

SEQ ID NO: 21306 - DNA, 20 bp, Artificial Sequence
  Antisense compound
agagtgaataggaagacaac

SEQ ID NO: 21307 - DNA, 20 bp, Artificial Sequence
  Antisense compound
aagagtgaataggaagacaa

SEQ ID NO: 21308 - DNA, 20 bp, Artificial Sequence
  Antisense compound
aaagagtgaataggaagaca

SEQ ID NO: 21309 - DNA, 20 bp, Artificial Sequence
  Antisense compound
caaagagtgaataggaagac

SEQ ID NO: 21310 - DNA, 20 bp, Artificial Sequence
  Antisense compound
tcaaagagtgaataggaaga

SEQ ID NO: 21311 - DNA, 20 bp, Artificial Sequence
  Antisense compound
gtcaaagagtgaataggaag

SEQ ID NO: 21312 - DNA, 20 bp, Artificial Sequence
  Antisense compound
tgtcaaagagtgaataggaa

SEQ ID NO: 21313 - DNA, 20 bp, Artificial Sequence
  Antisense compound
atgtcaaagagtgaatagga

SEQ ID NO: 21314 - DNA, 20 bp, Artificial Sequence
  Antisense compound
catgtcaaagagtgaatagg

SEQ ID NO: 21315 - DNA, 20 bp, Artificial Sequence
  Antisense compound
tcatgtcaaagagtgaatag

SEQ ID NO: 21316 - DNA, 20 bp, Artificial Sequence
  Antisense compound
ctcatgtcaaagagtgaata

SEQ ID NO: 21317 - DNA, 20 bp, Artificial Sequence
  Antisense compound
gctcatgtcaaagagtgaat

SEQ ID NO: 21318 - DNA, 20 bp, Artificial Sequence
  Antisense compound
tgctcatgtcaaagagtgaa

SEQ ID NO: 21319 - DNA, 20 bp, Artificial Sequence
  Antisense compound
ttgctcatgtcaaagagtga

SEQ ID NO: 21320 - DNA, 20 bp, Artificial Sequence
  Antisense compound
tttgctcatgtcaaagagtg

SEQ ID NO: 21321 - DNA, 20 bp, Artificial Sequence
  Antisense compound
atttgctcatgtcaaagagt

SEQ ID NO: 21322 - DNA, 20 bp, Artificial Sequence
  Antisense compound
aatttgctcatgtcaaagag

SEQ ID NO: 21323 - DNA, 20 bp, Artificial Sequence
  Antisense compound
aaatttgctcatgtcaaaga

SEQ ID NO: 21324 - DNA, 20 bp, Artificial Sequence
  Antisense compound
gaaatttgctcatgtcaaag

SEQ ID NO: 21325 - DNA, 20 bp, Artificial Sequence
  Antisense compound
ggaaatttgctcatgtcaaa

SEQ ID NO: 21326 - DNA, 20 bp, Artificial Sequence
  Antisense compound
aggaaatttgctcatgtcaa

SEQ ID NO: 21327 - DNA, 20 bp, Artificial Sequence
  Antisense compound
gaggaaatttgctcatgtca

SEQ ID NO: 21328 - DNA, 20 bp, Artificial Sequence
  Antisense compound
agaggaaatttgctcatgtc

SEQ ID NO: 21329 - DNA, 20 bp, Artificial Sequence
  Antisense compound
aagaggaaatttgctcatgt

SEQ ID NO: 21330 - DNA, 20 bp, Artificial Sequence
  Antisense compound
taagaggaaatttgctcatg

SEQ ID NO: 21331 - DNA, 20 bp, Artificial Sequence
  Antisense compound
ttaagaggaaatttgctcat

SEQ ID NO: 21332 - DNA, 20 bp, Artificial Sequence
  Antisense compound
tttaagaggaaatttgctca

SEQ ID NO: 21333 - DNA, 20 bp, Artificial Sequence
  Antisense compound
atttaagaggaaatttgctc

SEQ ID NO: 21334 - DNA, 20 bp, Artificial Sequence
  Antisense compound
aatttaagaggaaatttgct

SEQ ID NO: 21335 - DNA, 20 bp, Artificial Sequence
  Antisense compound
taatttaagaggaaatttgc

SEQ ID NO: 21336 - DNA, 20 bp, Artificial Sequence
  Antisense compound
ttaatttaagaggaaatttg

SEQ ID NO: 21337 - DNA, 20 bp, Artificial Sequence
  Antisense compound
cttaatttaagaggaaattt

SEQ ID NO: 21338 - DNA, 20 bp, Artificial Sequence
  Antisense compound
tcttaatttaagaggaaatt

SEQ ID NO: 21339 - DNA, 20 bp, Artificial Sequence
  Antisense compound
ctcttaatttaagaggaaat

SEQ ID NO: 21340 - DNA, 20 bp, Artificial Sequence
  Antisense compound
cctcttaatttaagaggaaa

SEQ ID NO: 21341 - DNA, 20 bp, Artificial Sequence
  Antisense compound
tcctcttaatttaagaggaa

SEQ ID NO: 21342 - DNA, 20 bp, Artificial Sequence
  Antisense compound
ttcctcttaatttaagagga

SEQ ID NO: 21343 - DNA, 20 bp, Artificial Sequence
  Antisense compound
gttcctcttaatttaagagg

SEQ ID NO: 21344 - DNA, 20 bp, Artificial Sequence
  Antisense compound
agttcctcttaatttaagag

SEQ ID NO: 21345 - DNA, 20 bp, Artificial Sequence
  Antisense compound
cagttcctcttaatttaaga

SEQ ID NO: 21346 - DNA, 20 bp, Artificial Sequence
  Antisense compound
gcagttcctcttaatttaag

SEQ ID NO: 21347 - DNA, 20 bp, Artificial Sequence
  Antisense compound
agcagttcctcttaatttaa

SEQ ID NO: 21348 - DNA, 20 bp, Artificial Sequence
  Antisense compound
cagcagttcctcttaattta

SEQ ID NO: 21349 - DNA, 20 bp, Artificial Sequence
  Antisense compound
acagcagttcctcttaattt

SEQ ID NO: 21350 - DNA, 20 bp, Artificial Sequence
  Antisense compound
tacagcagttcctcttaatt

SEQ ID NO: 21351 - DNA, 20 bp, Artificial Sequence
  Antisense compound
ttacagcagttcctcttaat

SEQ ID NO: 21352 - DNA, 20 bp, Artificial Sequence
  Antisense compound
attacagcagttcctcttaa

SEQ ID NO: 21353 - DNA, 20 bp, Artificial Sequence
  Antisense compound
cattacagcagttcctctta

SEQ ID NO: 21354 - DNA, 20 bp, Artificial Sequence
  Antisense compound
acattacagcagttcctctt

SEQ ID NO: 21355 - DNA, 20 bp, Artificial Sequence
  Antisense compound
gacattacagcagttcctct

SEQ ID NO: 21356 - DNA, 20 bp, Artificial Sequence
  Antisense compound
agacattacagcagttcctc

SEQ ID NO: 21357 - DNA, 20 bp, Artificial Sequence
  Antisense compound
gagacattacagcagttcct

SEQ ID NO: 21358 - DNA, 20 bp, Artificial Sequence
  Antisense compound
agagacattacagcagttcc

SEQ ID NO: 21359 - DNA, 20 bp, Artificial Sequence
  Antisense compound
aagagacattacagcagttc

SEQ ID NO: 21360 - DNA, 20 bp, Artificial Sequence
  Antisense compound
taagagacattacagcagtt

SEQ ID NO: 21361 - DNA, 20 bp, Artificial Sequence
  Antisense compound
ttaagagacattacagcagt

SEQ ID NO: 21362 - DNA, 20 bp, Artificial Sequence
  Antisense compound
cttaagagacattacagcag

SEQ ID NO: 21363 - DNA, 20 bp, Artificial Sequence
  Antisense compound
ccttaagagacattacagca

SEQ ID NO: 21364 - DNA, 20 bp, Artificial Sequence
  Antisense compound
tccttaagagacattacagc

SEQ ID NO: 21365 - DNA, 20 bp, Artificial Sequence
  Antisense compound
ctccttaagagacattacag

SEQ ID NO: 21366 - DNA, 20 bp, Artificial Sequence
  Antisense compound
tctccttaagagacattaca

SEQ ID NO: 21367 - DNA, 20 bp, Artificial Sequence
  Antisense compound
ttctccttaagagacattac

SEQ ID NO: 21368 - DNA, 20 bp, Artificial Sequence
  Antisense compound
attctccttaagagacatta

SEQ ID NO: 21369 - DNA, 20 bp, Artificial Sequence
  Antisense compound
gattctccttaagagacatt

SEQ ID NO: 21370 - DNA, 20 bp, Artificial Sequence
  Antisense compound
tgattctccttaagagacat

SEQ ID NO: 21371 - DNA, 20 bp, Artificial Sequence
  Antisense compound
ttgattctccttaagagaca

SEQ ID NO: 21372 - DNA, 20 bp, Artificial Sequence
  Antisense compound
tttgattctccttaagagac

SEQ ID NO: 21373 - DNA, 20 bp, Artificial Sequence
  Antisense compound
atttgattctccttaagaga

SEQ ID NO: 21374 - DNA, 20 bp, Artificial Sequence
  Antisense compound
gatttgattctccttaagag

SEQ ID NO: 21375 - DNA, 20 bp, Artificial Sequence
  Antisense compound
tgatttgattctccttaaga

SEQ ID NO: 21376 - DNA, 20 bp, Artificial Sequence
  Antisense compound
ttgatttgattctccttaag

SEQ ID NO: 21377 - DNA, 20 bp, Artificial Sequence
  Antisense compound
attgatttgattctccttaa

SEQ ID NO: 21378 - DNA, 20 bp, Artificial Sequence
  Antisense compound
cattgatttgattctcctta

SEQ ID NO: 21379 - DNA, 20 bp, Artificial Sequence
  Antisense compound
tcattgatttgattctcctt

SEQ ID NO: 21380 - DNA, 20 bp, Artificial Sequence
  Antisense compound
atcattgatttgattctcct

SEQ ID NO: 21381 - DNA, 20 bp, Artificial Sequence
  Antisense compound
tatcattgatttgattctcc

SEQ ID NO: 21382 - DNA, 20 bp, Artificial Sequence
  Antisense compound
atatcattgatttgattctc

SEQ ID NO: 21383 - DNA, 20 bp, Artificial Sequence
  Antisense compound
catatcattgatttgattct

SEQ ID NO: 21384 - DNA, 20 bp, Artificial Sequence
  Antisense compound
tcatatcattgatttgattc

SEQ ID NO: 21385 - DNA, 20 bp, Artificial Sequence
  Antisense compound
atcatatcattgatttgatt

SEQ ID NO: 21386 - DNA, 20 bp, Artificial Sequence
  Antisense compound
aatcatatcattgatttgat

SEQ ID NO: 21387 - DNA, 20 bp, Artificial Sequence
  Antisense compound
aaatcatatcattgatttga

SEQ ID NO: 21388 - DNA, 20 bp, Artificial Sequence
  Antisense compound
taaatcatatcattgatttg

SEQ ID NO: 21389 - DNA, 20 bp, Artificial Sequence
  Antisense compound
ataaatcatatcattgattt

SEQ ID NO: 21390 - DNA, 20 bp, Artificial Sequence
  Antisense compound
aataaatcatatcattgatt

SEQ ID NO: 21391 - DNA, 20 bp, Artificial Sequence
  Antisense compound
gaataaatcatatcattgat

SEQ ID NO: 21392 - DNA, 20 bp, Artificial Sequence
  Antisense compound
agaataaatcatatcattga

SEQ ID NO: 21393 - DNA, 20 bp, Artificial Sequence
  Antisense compound
gagaataaatcatatcattg

SEQ ID NO: 21394 - DNA, 20 bp, Artificial Sequence
  Antisense compound
agagaataaatcatatcatt

SEQ ID NO: 21395 - DNA, 20 bp, Artificial Sequence
  Antisense compound
aagagaataaatcatatcat

SEQ ID NO: 21396 - DNA, 20 bp, Artificial Sequence
  Antisense compound
gaagagaataaatcatatca

SEQ ID NO: 21397 - DNA, 20 bp, Artificial Sequence
  Antisense compound
agaagagaataaatcatatc

SEQ ID NO: 21398 - DNA, 20 bp, Artificial Sequence
  Antisense compound
cagaagagaataaatcatat

SEQ ID NO: 21399 - DNA, 20 bp, Artificial Sequence
  Antisense compound
ccagaagagaataaatcata

SEQ ID NO: 21400 - DNA, 20 bp, Artificial Sequence
  Antisense compound
tccagaagagaataaatcat

SEQ ID NO: 21401 - DNA, 20 bp, Artificial Sequence
  Antisense compound
ttccagaagagaataaatca

SEQ ID NO: 21402 - DNA, 20 bp, Artificial Sequence
  Antisense compound
tttccagaagagaataaatc

SEQ ID NO: 21403 - DNA, 20 bp, Artificial Sequence
  Antisense compound
ttttccagaagagaataaat

SEQ ID NO: 21404 - DNA, 20 bp, Artificial Sequence
  Antisense compound
tttttccagaagagaataaa

SEQ ID NO: 21405 - DNA, 20 bp, Artificial Sequence
  Antisense compound
ctttttccagaagagaataa

SEQ ID NO: 21406 - DNA, 20 bp, Artificial Sequence
  Antisense compound
cctttttccagaagagaata

SEQ ID NO: 21407 - DNA, 20 bp, Artificial Sequence
  Antisense compound
acctttttccagaagagaat

SEQ ID NO: 21408 - DNA, 20 bp, Artificial Sequence
  Antisense compound
tacctttttccagaagagaa

SEQ ID NO: 21409 - DNA, 20 bp, Artificial Sequence
  Antisense compound
ctacctttttccagaagaga

SEQ ID NO: 21410 - DNA, 20 bp, Artificial Sequence
  Antisense compound
cctacctttttccagaagag

SEQ ID NO: 21411 - DNA, 20 bp, Artificial Sequence
  Antisense compound
gcctacctttttccagaaga

SEQ ID NO: 21412 - DNA, 20 bp, Artificial Sequence
  Antisense compound
agcctacctttttccagaag

SEQ ID NO: 21413 - DNA, 20 bp, Artificial Sequence
  Antisense compound
aagcctacctttttccagaa

SEQ ID NO: 21414 - DNA, 20 bp, Artificial Sequence
  Antisense compound
taagcctacctttttccaga

SEQ ID NO: 21415 - DNA, 20 bp, Artificial Sequence
  Antisense compound
ataagcctacctttttccag

SEQ ID NO: 21416 - DNA, 20 bp, Artificial Sequence
  Antisense compound
gataagcctacctttttcca

SEQ ID NO: 21417 - DNA, 20 bp, Artificial Sequence
  Antisense compound
tgataagcctacctttttcc

SEQ ID NO: 21418 - DNA, 20 bp, Artificial Sequence
  Antisense compound
atgataagcctacctttttc

SEQ ID NO: 21419 - DNA, 20 bp, Artificial Sequence
  Antisense compound
aatgataagcctaccttttt

SEQ ID NO: 21420 - DNA, 20 bp, Artificial Sequence
  Antisense compound
taatgataagcctacctttt

SEQ ID NO: 21421 - DNA, 20 bp, Artificial Sequence
  Antisense compound
ctaatgataagcctaccttt

SEQ ID NO: 21422 - DNA, 20 bp, Artificial Sequence
  Antisense compound
tctaatgataagcctacctt

SEQ ID NO: 21423 - DNA, 20 bp, Artificial Sequence
  Antisense compound
ctctaatgataagcctacct

SEQ ID NO: 21424 - DNA, 20 bp, Artificial Sequence
  Antisense compound
tctctaatgataagcctacc

SEQ ID NO: 21425 - DNA, 20 bp, Artificial Sequence
  Antisense compound
ttctctaatgataagcctac

SEQ ID NO: 21426 - DNA, 20 bp, Artificial Sequence
  Antisense compound
tttctctaatgataagccta

SEQ ID NO: 21427 - DNA, 20 bp, Artificial Sequence
  Antisense compound
ttttctctaatgataagcct

SEQ ID NO: 21428 - DNA, 20 bp, Artificial Sequence
  Antisense compound
gttttctctaatgataagcc

SEQ ID NO: 21429 - DNA, 20 bp, Artificial Sequence
  Antisense compound
tgttttctctaatgataagc

SEQ ID NO: 21430 - DNA, 20 bp, Artificial Sequence
  Antisense compound
ttgttttctctaatgataag

SEQ ID NO: 21431 - DNA, 20 bp, Artificial Sequence
  Antisense compound
gttgttttctctaatgataa

SEQ ID NO: 21432 - DNA, 20 bp, Artificial Sequence
  Antisense compound
tgttgttttctctaatgata

SEQ ID NO: 21433 - DNA, 20 bp, Artificial Sequence
  Antisense compound
ctgttgttttctctaatgat

SEQ ID NO: 21434 - DNA, 20 bp, Artificial Sequence
  Antisense compound
tctgttgttttctctaatga

SEQ ID NO: 21435 - DNA, 20 bp, Artificial Sequence
  Antisense compound
ctctgttgttttctctaatg

SEQ ID NO: 21436 - DNA, 20 bp, Artificial Sequence
  Antisense compound
actctgttgttttctctaat

SEQ ID NO: 21437 - DNA, 20 bp, Artificial Sequence
  Antisense compound
aactctgttgttttctctaa

SEQ ID NO: 21438 - DNA, 20 bp, Artificial Sequence
  Antisense compound
caactctgttgttttctcta

SEQ ID NO: 21439 - DNA, 20 bp, Artificial Sequence
  Antisense compound
acaactctgttgttttctct

SEQ ID NO: 21440 - DNA, 20 bp, Artificial Sequence
  Antisense compound
cacaactctgttgttttctc

SEQ ID NO: 21441 - DNA, 20 bp, Artificial Sequence
  Antisense compound
ccacaactctgttgttttct

SEQ ID NO: 21442 - DNA, 20 bp, Artificial Sequence
  Antisense compound
accacaactctgttgttttc

SEQ ID NO: 21443 - DNA, 20 bp, Artificial Sequence
  Antisense compound
aaccacaactctgttgtttt

SEQ ID NO: 21444 - DNA, 20 bp, Artificial Sequence
  Antisense compound
aaaccacaactctgttgttt

SEQ ID NO: 21445 - DNA, 20 bp, Artificial Sequence
  Antisense compound
gaaaccacaactctgttgtt

SEQ ID NO: 21446 - DNA, 20 bp, Artificial Sequence
  Antisense compound
tgaaaccacaactctgttgt

SEQ ID NO: 21447 - DNA, 20 bp, Artificial Sequence
  Antisense compound
ttgaaaccacaactctgttg

SEQ ID NO: 21448 - DNA, 20 bp, Artificial Sequence
  Antisense compound
cttgaaaccacaactctgtt

SEQ ID NO: 21449 - DNA, 20 bp, Artificial Sequence
  Antisense compound
acttgaaaccacaactctgt

SEQ ID NO: 21450 - DNA, 20 bp, Artificial Sequence
  Antisense compound
cacttgaaaccacaactctg

SEQ ID NO: 21451 - DNA, 20 bp, Artificial Sequence
  Antisense compound
tcacttgaaaccacaactct

SEQ ID NO: 21452 - DNA, 20 bp, Artificial Sequence
  Antisense compound
atcacttgaaaccacaactc

SEQ ID NO: 21453 - DNA, 20 bp, Artificial Sequence
  Antisense compound
tatcacttgaaaccacaact

SEQ ID NO: 21454 - DNA, 20 bp, Artificial Sequence
  Antisense compound
atatcacttgaaaccacaac

SEQ ID NO: 21455 - DNA, 20 bp, Artificial Sequence
  Antisense compound
aatatcacttgaaaccacaa

SEQ ID NO: 21456 - DNA, 20 bp, Artificial Sequence
  Antisense compound
gaatatcacttgaaaccaca

SEQ ID NO: 21457 - DNA, 20 bp, Artificial Sequence
  Antisense compound
agaatatcacttgaaaccac

SEQ ID NO: 21458 - DNA, 20 bp, Artificial Sequence
  Antisense compound
aagaatatcacttgaaacca

SEQ ID NO: 21459 - DNA, 20 bp, Artificial Sequence
  Antisense compound
caagaatatcacttgaaacc

SEQ ID NO: 21460 - DNA, 20 bp, Artificial Sequence
  Antisense compound
acaagaatatcacttgaaac

SEQ ID NO: 21461 - DNA, 20 bp, Artificial Sequence
  Antisense compound
aacaagaatatcacttgaaa

SEQ ID NO: 21462 - DNA, 20 bp, Artificial Sequence
  Antisense compound
taacaagaatatcacttgaa

SEQ ID NO: 21463 - DNA, 20 bp, Artificial Sequence
  Antisense compound
ttaacaagaatatcacttga

SEQ ID NO: 21464 - DNA, 20 bp, Artificial Sequence
  Antisense compound
gttaacaagaatatcacttg

SEQ ID NO: 21465 - DNA, 20 bp, Artificial Sequence
  Antisense compound
tgttaacaagaatatcactt

SEQ ID NO: 21466 - DNA, 20 bp, Artificial Sequence
  Antisense compound
ttgttaacaagaatatcact

SEQ ID NO: 21467 - DNA, 20 bp, Artificial Sequence
  Antisense compound
gttgttaacaagaatatcac

SEQ ID NO: 21468 - DNA, 20 bp, Artificial Sequence
  Antisense compound
agttgttaacaagaatatca

SEQ ID NO: 21469 - DNA, 20 bp, Artificial Sequence
  Antisense compound
tagttgttaacaagaatatc

SEQ ID NO: 21470 - DNA, 20 bp, Artificial Sequence
  Antisense compound
ttagttgttaacaagaatat

SEQ ID NO: 21471 - DNA, 20 bp, Artificial Sequence
  Antisense compound
tttagttgttaacaagaata

SEQ ID NO: 21472 - DNA, 20 bp, Artificial Sequence
  Antisense compound
gtttagttgttaacaagaat

SEQ ID NO: 21473 - DNA, 20 bp, Artificial Sequence
  Antisense compound
cgtttagttgttaacaagaa

SEQ ID NO: 21474 - DNA, 20 bp, Artificial Sequence
  Antisense compound
tcgtttagttgttaacaaga

SEQ ID NO: 21475 - DNA, 20 bp, Artificial Sequence
  Antisense compound
ttcgtttagttgttaacaag

SEQ ID NO: 21476 - DNA, 20 bp, Artificial Sequence
  Antisense compound
gttcgtttagttgttaacaa

SEQ ID NO: 21477 - DNA, 20 bp, Artificial Sequence
  Antisense compound
tgttcgtttagttgttaaca

SEQ ID NO: 21478 - DNA, 20 bp, Artificial Sequence
  Antisense compound
atgttcgtttagttgttaac

SEQ ID NO: 21479 - DNA, 20 bp, Artificial Sequence
  Antisense compound
catgttcgtttagttgttaa

SEQ ID NO: 21480 - DNA, 20 bp, Artificial Sequence
  Antisense compound
acatgttcgtttagttgtta

SEQ ID NO: 21481 - DNA, 20 bp, Artificial Sequence
  Antisense compound
aacatgttcgtttagttgtt

SEQ ID NO: 21482 - DNA, 20 bp, Artificial Sequence
  Antisense compound
aaacatgttcgtttagttgt

SEQ ID NO: 21483 - DNA, 20 bp, Artificial Sequence
  Antisense compound
taaacatgttcgtttagttg

SEQ ID NO: 21484 - DNA, 20 bp, Artificial Sequence
  Antisense compound
ataaacatgttcgtttagtt

SEQ ID NO: 21485 - DNA, 20 bp, Artificial Sequence
  Antisense compound
aataaacatgttcgtttagt

SEQ ID NO: 21486 - DNA, 20 bp, Artificial Sequence
  Antisense compound
aaataaacatgttcgtttag

SEQ ID NO: 21487 - DNA, 20 bp, Artificial Sequence
  Antisense compound
aaaataaacatgttcgttta

SEQ ID NO: 21488 - DNA, 20 bp, Artificial Sequence
  Antisense compound
gaaaataaacatgttcgttt

SEQ ID NO: 21489 - DNA, 20 bp, Artificial Sequence
  Antisense compound
agaaaataaacatgttcgtt

SEQ ID NO: 21490 - DNA, 20 bp, Artificial Sequence
  Antisense compound
aagaaaataaacatgttcgt

SEQ ID NO: 21491 - DNA, 20 bp, Artificial Sequence
  Antisense compound
taagaaaataaacatgttcg

SEQ ID NO: 21492 - DNA, 20 bp, Artificial Sequence
  Antisense compound
ataagaaaataaacatgttc

SEQ ID NO: 21493 - DNA, 20 bp, Artificial Sequence
  Antisense compound
aataagaaaataaacatgtt

SEQ ID NO: 21494 - DNA, 20 bp, Artificial Sequence
  Antisense compound
taataagaaaataaacatgt

SEQ ID NO: 21495 - DNA, 20 bp, Artificial Sequence
  Antisense compound
ataataagaaaataaacatg

SEQ ID NO: 21496 - DNA, 20 bp, Artificial Sequence
  Antisense compound
aataataagaaaataaacat

SEQ ID NO: 21497 - DNA, 20 bp, Artificial Sequence
  Antisense compound
aaataataagaaaataaaca

SEQ ID NO: 21498 - DNA, 20 bp, Artificial Sequence
  Antisense compound
gaaataataagaaaataaac

SEQ ID NO: 21499 - DNA, 20 bp, Artificial Sequence
  Antisense compound
agaaataataagaaaataaa

SEQ ID NO: 21500 - DNA, 20 bp, Artificial Sequence
  Antisense compound
aagaaataataagaaaataa

SEQ ID NO: 21501 - DNA, 20 bp, Artificial Sequence
  Antisense compound
taagaaataataagaaaata

SEQ ID NO: 21502 - DNA, 20 bp, Artificial Sequence
  Antisense compound
gtaagaaataataagaaaat

SEQ ID NO: 21503 - DNA, 20 bp, Artificial Sequence
  Antisense compound
agtaagaaataataagaaaa

SEQ ID NO: 21504 - DNA, 20 bp, Artificial Sequence
  Antisense compound
gagtaagaaataataagaaa

SEQ ID NO: 21505 - DNA, 20 bp, Artificial Sequence
  Antisense compound
agagtaagaaataataagaa

SEQ ID NO: 21506 - DNA, 20 bp, Artificial Sequence
  Antisense compound
gagagtaagaaataataaga

SEQ ID NO: 21507 - DNA, 20 bp, Artificial Sequence
  Antisense compound
tgagagtaagaaataataag

SEQ ID NO: 21508 - DNA, 20 bp, Artificial Sequence
  Antisense compound
gtgagagtaagaaataataa

SEQ ID NO: 21509 - DNA, 20 bp, Artificial Sequence
  Antisense compound
agtgagagtaagaaataata

SEQ ID NO: 21510 - DNA, 20 bp, Artificial Sequence
  Antisense compound
tagtgagagtaagaaataat

SEQ ID NO: 21511 - DNA, 20 bp, Artificial Sequence
  Antisense compound
ctagtgagagtaagaaataa

SEQ ID NO: 21512 - DNA, 20 bp, Artificial Sequence
  Antisense compound
actagtgagagtaagaaata

SEQ ID NO: 21513 - DNA, 20 bp, Artificial Sequence
  Antisense compound
cactagtgagagtaagaaat

SEQ ID NO: 21514 - DNA, 20 bp, Artificial Sequence
  Antisense compound
ccactagtgagagtaagaaa

SEQ ID NO: 21515 - DNA, 20 bp, Artificial Sequence
  Antisense compound
accactagtgagagtaagaa

SEQ ID NO: 21516 - DNA, 20 bp, Artificial Sequence
  Antisense compound
taccactagtgagagtaaga

SEQ ID NO: 21517 - DNA, 20 bp, Artificial Sequence
  Antisense compound
ctaccactagtgagagtaag

SEQ ID NO: 21518 - DNA, 20 bp, Artificial Sequence
  Antisense compound
actaccactagtgagagtaa

SEQ ID NO: 21519 - DNA, 20 bp, Artificial Sequence
  Antisense compound
cactaccactagtgagagta

SEQ ID NO: 21520 - DNA, 20 bp, Artificial Sequence
  Antisense compound
tcactaccactagtgagagt

SEQ ID NO: 21521 - DNA, 20 bp, Artificial Sequence
  Antisense compound
gtcactaccactagtgagag

SEQ ID NO: 21522 - DNA, 20 bp, Artificial Sequence
  Antisense compound
ggtcactaccactagtgaga

SEQ ID NO: 21523 - DNA, 20 bp, Artificial Sequence
  Antisense compound
aggtcactaccactagtgag

SEQ ID NO: 21524 - DNA, 20 bp, Artificial Sequence
  Antisense compound
aaggtcactaccactagtga

SEQ ID NO: 21525 - DNA, 20 bp, Artificial Sequence
  Antisense compound
caaggtcactaccactagtg

SEQ ID NO: 21526 - DNA, 20 bp, Artificial Sequence
  Antisense compound
tcaaggtcactaccactagt

SEQ ID NO: 21527 - DNA, 20 bp, Artificial Sequence
  Antisense compound
gtcaaggtcactaccactag

SEQ ID NO: 21528 - DNA, 20 bp, Artificial Sequence
  Antisense compound
ggtcaaggtcactaccacta

SEQ ID NO: 21529 - DNA, 20 bp, Artificial Sequence
  Antisense compound
cggtcaaggtcactaccact

SEQ ID NO: 21530 - DNA, 20 bp, Artificial Sequence
  Antisense compound
ccggtcaaggtcactaccac

SEQ ID NO: 21531 - DNA, 20 bp, Artificial Sequence
  Antisense compound
accggtcaaggtcactacca

SEQ ID NO: 21532 - DNA, 20 bp, Artificial Sequence
  Antisense compound
caccggtcaaggtcactacc

SEQ ID NO: 21533 - DNA, 20 bp, Artificial Sequence
  Antisense compound
gcaccggtcaaggtcactac

SEQ ID NO: 21534 - DNA, 20 bp, Artificial Sequence
  Antisense compound
tgcaccggtcaaggtcacta

SEQ ID NO: 21535 - DNA, 20 bp, Artificial Sequence
  Antisense compound
gtgcaccggtcaaggtcact

SEQ ID NO: 21536 - DNA, 20 bp, Artificial Sequence
  Antisense compound
ggtgcaccggtcaaggtcac

SEQ ID NO: 21537 - DNA, 20 bp, Artificial Sequence
  Antisense compound
tggtgcaccggtcaaggtca

SEQ ID NO: 21538 - DNA, 20 bp, Artificial Sequence
  Antisense compound
gtggtgcaccggtcaaggtc

SEQ ID NO: 21539 - DNA, 20 bp, Artificial Sequence
  Antisense compound
agtggtgcaccggtcaaggt

SEQ ID NO: 21540 - DNA, 20 bp, Artificial Sequence
  Antisense compound
aagtggtgcaccggtcaagg

SEQ ID NO: 21541 - DNA, 20 bp, Artificial Sequence
  Antisense compound
aaagtggtgcaccggtcaag

SEQ ID NO: 21542 - DNA, 20 bp, Artificial Sequence
  Antisense compound
aaaagtggtgcaccggtcaa

SEQ ID NO: 21543 - DNA, 20 bp, Artificial Sequence
  Antisense compound
caaaagtggtgcaccggtca

SEQ ID NO: 21544 - DNA, 20 bp, Artificial Sequence
  Antisense compound
tcaaaagtggtgcaccggtc

SEQ ID NO: 21545 - DNA, 20 bp, Artificial Sequence
  Antisense compound
atcaaaagtggtgcaccggt

SEQ ID NO: 21546 - DNA, 20 bp, Artificial Sequence
  Antisense compound
catcaaaagtggtgcaccgg

SEQ ID NO: 21547 - DNA, 20 bp, Artificial Sequence
  Antisense compound
tcatcaaaagtggtgcaccg

SEQ ID NO: 21548 - DNA, 20 bp, Artificial Sequence
  Antisense compound
atcatcaaaagtggtgcacc

SEQ ID NO: 21549 - DNA, 20 bp, Artificial Sequence
  Antisense compound
catcatcaaaagtggtgcac

SEQ ID NO: 21550 - DNA, 20 bp, Artificial Sequence
  Antisense compound
acatcatcaaaagtggtgca

SEQ ID NO: 21551 - DNA, 20 bp, Artificial Sequence
  Antisense compound
aacatcatcaaaagtggtgc

SEQ ID NO: 21552 - DNA, 20 bp, Artificial Sequence
  Antisense compound
gaacatcatcaaaagtggtg

SEQ ID NO: 21553 - DNA, 20 bp, Artificial Sequence
  Antisense compound
tgaacatcatcaaaagtggt

SEQ ID NO: 21554 - DNA, 20 bp, Artificial Sequence
  Antisense compound
ttgaacatcatcaaaagtgg

SEQ ID NO: 21555 - DNA, 20 bp, Artificial Sequence
  Antisense compound
cttgaacatcatcaaaagtg

SEQ ID NO: 21556 - DNA, 20 bp, Artificial Sequence
  Antisense compound
gcttgaacatcatcaaaagt

SEQ ID NO: 21557 - DNA, 20 bp, Artificial Sequence
  Antisense compound
agcttgaacatcatcaaaag

SEQ ID NO: 21558 - DNA, 20 bp, Artificial Sequence
  Antisense compound
gagcttgaacatcatcaaaa

SEQ ID NO: 21559 - DNA, 20 bp, Artificial Sequence
  Antisense compound
ggagcttgaacatcatcaaa

SEQ ID NO: 21560 - DNA, 20 bp, Artificial Sequence
  Antisense compound
aggagcttgaacatcatcaa

SEQ ID NO: 21561 - DNA, 20 bp, Artificial Sequence
  Antisense compound
taggagcttgaacatcatca

SEQ ID NO: 21562 - DNA, 20 bp, Artificial Sequence
  Antisense compound
ttaggagcttgaacatcatc

SEQ ID NO: 21563 - DNA, 20 bp, Artificial Sequence
  Antisense compound
attaggagcttgaacatcat

SEQ ID NO: 21564 - DNA, 20 bp, Artificial Sequence
  Antisense compound
aattaggagcttgaacatca

SEQ ID NO: 21565 - DNA, 20 bp, Artificial Sequence
  Antisense compound
taattaggagcttgaacatc

SEQ ID NO: 21566 - DNA, 20 bp, Artificial Sequence
  Antisense compound
gtaattaggagcttgaacat

SEQ ID NO: 21567 - DNA, 20 bp, Artificial Sequence
  Antisense compound
tgtaattaggagcttgaaca

SEQ ID NO: 21568 - DNA, 20 bp, Artificial Sequence
  Antisense compound
gtgtaattaggagcttgaac

SEQ ID NO: 21569 - DNA, 20 bp, Artificial Sequence
  Antisense compound
agtgtaattaggagcttgaa

SEQ ID NO: 21570 - DNA, 20 bp, Artificial Sequence
  Antisense compound
gagtgtaattaggagcttga

SEQ ID NO: 21571 - DNA, 20 bp, Artificial Sequence
  Antisense compound
tgagtgtaattaggagcttg

SEQ ID NO: 21572 - DNA, 20 bp, Artificial Sequence
  Antisense compound
ttgagtgtaattaggagctt

SEQ ID NO: 21573 - DNA, 20 bp, Artificial Sequence
  Antisense compound
gttgagtgtaattaggagct

SEQ ID NO: 21574 - DNA, 20 bp, Artificial Sequence
  Antisense compound
tgttgagtgtaattaggagc

SEQ ID NO: 21575 - DNA, 20 bp, Artificial Sequence
  Antisense compound
atgttgagtgtaattaggag

SEQ ID NO: 21576 - DNA, 20 bp, Artificial Sequence
  Antisense compound
tatgttgagtgtaattagga

SEQ ID NO: 21577 - DNA, 20 bp, Artificial Sequence
  Antisense compound
gtatgttgagtgtaattagg

SEQ ID NO: 21578 - DNA, 20 bp, Artificial Sequence
  Antisense compound
agtatgttgagtgtaattag

SEQ ID NO: 21579 - DNA, 20 bp, Artificial Sequence
  Antisense compound
aagtatgttgagtgtaatta

SEQ ID NO: 21580 - DNA, 20 bp, Artificial Sequence
  Antisense compound
gaagtatgttgagtgtaatt

SEQ ID NO: 21581 - DNA, 20 bp, Artificial Sequence
  Antisense compound
tgaagtatgttgagtgtaat

SEQ ID NO: 21582 - DNA, 20 bp, Artificial Sequence
  Antisense compound
atgaagtatgttgagtgtaa

SEQ ID NO: 21583 - DNA, 20 bp, Artificial Sequence
  Antisense compound
gatgaagtatgttgagtgta

SEQ ID NO: 21584 - DNA, 20 bp, Artificial Sequence
  Antisense compound
agatgaagtatgttgagtgt

SEQ ID NO: 21585 - DNA, 20 bp, Artificial Sequence
  Antisense compound
tagatgaagtatgttgagtg

SEQ ID NO: 21586 - DNA, 20 bp, Artificial Sequence
  Antisense compound
atagatgaagtatgttgagt

SEQ ID NO: 21587 - DNA, 20 bp, Artificial Sequence
  Antisense compound
catagatgaagtatgttgag

SEQ ID NO: 21588 - DNA, 20 bp, Artificial Sequence
  Antisense compound
tcatagatgaagtatgttga

SEQ ID NO: 21589 - DNA, 20 bp, Artificial Sequence
  Antisense compound
ctcatagatgaagtatgttg

SEQ ID NO: 21590 - DNA, 20 bp, Artificial Sequence
  Antisense compound
cctcatagatgaagtatgtt

SEQ ID NO: 21591 - DNA, 20 bp, Artificial Sequence
  Antisense compound
ccctcatagatgaagtatgt

SEQ ID NO: 21592 - DNA, 20 bp, Artificial Sequence
  Antisense compound
cccctcatagatgaagtatg

SEQ ID NO: 21593 - DNA, 20 bp, Artificial Sequence
  Antisense compound
ccccctcatagatgaagtat

SEQ ID NO: 21594 - DNA, 20 bp, Artificial Sequence
  Antisense compound
cccccctcatagatgaagta

SEQ ID NO: 21595 - DNA, 20 bp, Artificial Sequence
  Antisense compound
acccccctcatagatgaagt

SEQ ID NO: 21596 - DNA, 20 bp, Artificial Sequence
  Antisense compound
aacccccctcatagatgaag

SEQ ID NO: 21597 - DNA, 20 bp, Artificial Sequence
  Antisense compound
aaacccccctcatagatgaa

SEQ ID NO: 21598 - DNA, 20 bp, Artificial Sequence
  Antisense compound
taaacccccctcatagatga

SEQ ID NO: 21599 - DNA, 20 bp, Artificial Sequence
  Antisense compound
gtaaacccccctcatagatg

SEQ ID NO: 21600 - DNA, 20 bp, Artificial Sequence
  Antisense compound
agtaaacccccctcatagat

SEQ ID NO: 21601 - DNA, 20 bp, Artificial Sequence
  Antisense compound
tagtaaacccccctcataga

SEQ ID NO: 21602 - DNA, 20 bp, Artificial Sequence
  Antisense compound
atagtaaacccccctcatag

SEQ ID NO: 21603 - DNA, 20 bp, Artificial Sequence
  Antisense compound
gatagtaaacccccctcata

SEQ ID NO: 21604 - DNA, 20 bp, Artificial Sequence
  Antisense compound
ggatagtaaacccccctcat

SEQ ID NO: 21605 - DNA, 20 bp, Artificial Sequence
  Antisense compound
aggatagtaaacccccctca

SEQ ID NO: 21606 - DNA, 20 bp, Artificial Sequence
  Antisense compound
caggatagtaaacccccctc

SEQ ID NO: 21607 - DNA, 20 bp, Artificial Sequence
  Antisense compound
tcaggatagtaaacccccct

SEQ ID NO: 21608 - DNA, 20 bp, Artificial Sequence
  Antisense compound
atcaggatagtaaacccccc

SEQ ID NO: 21609 - DNA, 20 bp, Artificial Sequence
  Antisense compound
catcaggatagtaaaccccc

SEQ ID NO: 21610 - DNA, 20 bp, Artificial Sequence
  Antisense compound
tcatcaggatagtaaacccc

SEQ ID NO: 21611 - DNA, 20 bp, Artificial Sequence
  Antisense compound
ttcatcaggatagtaaaccc

SEQ ID NO: 21612 - DNA, 20 bp, Artificial Sequence
  Antisense compound
tttcatcaggatagtaaacc

SEQ ID NO: 21613 - DNA, 20 bp, Artificial Sequence
  Antisense compound
atttcatcaggatagtaaac

SEQ ID NO: 21614 - DNA, 20 bp, Artificial Sequence
  Antisense compound
aatttcatcaggatagtaaa

SEQ ID NO: 21615 - DNA, 20 bp, Artificial Sequence
  Antisense compound
aaatttcatcaggatagtaa

SEQ ID NO: 21616 - DNA, 20 bp, Artificial Sequence
  Antisense compound
aaaatttcatcaggatagta

SEQ ID NO: 21617 - DNA, 20 bp, Artificial Sequence
  Antisense compound
aaaaatttcatcaggatagt

SEQ ID NO: 21618 - DNA, 20 bp, Artificial Sequence
  Antisense compound
taaaaatttcatcaggatag

SEQ ID NO: 21619 - DNA, 20 bp, Artificial Sequence
  Antisense compound
ctaaaaatttcatcaggata

SEQ ID NO: 21620 - DNA, 20 bp, Artificial Sequence
  Antisense compound
tctaaaaatttcatcaggat

SEQ ID NO: 21621 - DNA, 20 bp, Artificial Sequence
  Antisense compound
atctaaaaatttcatcagga

SEQ ID NO: 21622 - DNA, 20 bp, Artificial Sequence
  Antisense compound
gatctaaaaatttcatcagg

SEQ ID NO: 21623 - DNA, 20 bp, Artificial Sequence
  Antisense compound
tgatctaaaaatttcatcag

SEQ ID NO: 21624 - DNA, 20 bp, Artificial Sequence
  Antisense compound
ctgatctaaaaatttcatca

SEQ ID NO: 21625 - DNA, 20 bp, Artificial Sequence
  Antisense compound
tctgatctaaaaatttcatc

SEQ ID NO: 21626 - DNA, 20 bp, Artificial Sequence
  Antisense compound
gtctgatctaaaaatttcat

SEQ ID NO: 21627 - DNA, 20 bp, Artificial Sequence
  Antisense compound
tgtctgatctaaaaatttca

SEQ ID NO: 21628 - DNA, 20 bp, Artificial Sequence
  Antisense compound
gtgtctgatctaaaaatttc

SEQ ID NO: 21629 - DNA, 20 bp, Artificial Sequence
  Antisense compound
agtgtctgatctaaaaattt

SEQ ID NO: 21630 - DNA, 20 bp, Artificial Sequence
  Antisense compound
gagtgtctgatctaaaaatt

SEQ ID NO: 21631 - DNA, 20 bp, Artificial Sequence
  Antisense compound
agagtgtctgatctaaaaat

SEQ ID NO: 21632 - DNA, 20 bp, Artificial Sequence
  Antisense compound
aagagtgtctgatctaaaaa

SEQ ID NO: 21633 - DNA, 20 bp, Artificial Sequence
  Antisense compound
aaagagtgtctgatctaaaa

SEQ ID NO: 21634 - DNA, 20 bp, Artificial Sequence
  Antisense compound
taaagagtgtctgatctaaa

SEQ ID NO: 21635 - DNA, 20 bp, Artificial Sequence
  Antisense compound
ataaagagtgtctgatctaa

SEQ ID NO: 21636 - DNA, 20 bp, Artificial Sequence
  Antisense compound
aataaagagtgtctgatcta

SEQ ID NO: 21637 - DNA, 20 bp, Artificial Sequence
  Antisense compound
aaataaagagtgtctgatct

SEQ ID NO: 21638 - DNA, 20 bp, Artificial Sequence
  Antisense compound
taaataaagagtgtctgatc

SEQ ID NO: 21639 - DNA, 20 bp, Artificial Sequence
  Antisense compound
ttaaataaagagtgtctgat

SEQ ID NO: 21640 - DNA, 20 bp, Artificial Sequence
  Antisense compound
gttaaataaagagtgtctga

SEQ ID NO: 21641 - DNA, 20 bp, Artificial Sequence
  Antisense compound
agttaaataaagagtgtctg

SEQ ID NO: 21642 - DNA, 20 bp, Artificial Sequence
  Antisense compound
gagttaaataaagagtgtct

SEQ ID NO: 21643 - DNA, 20 bp, Artificial Sequence
  Antisense compound
tgagttaaataaagagtgtc

SEQ ID NO: 21644 - DNA, 20 bp, Artificial Sequence
  Antisense compound
ctgagttaaataaagagtgt

SEQ ID NO: 21645 - DNA, 20 bp, Artificial Sequence
  Antisense compound
cctgagttaaataaagagtg

SEQ ID NO: 21646 - DNA, 20 bp, Artificial Sequence
  Antisense compound
tcctgagttaaataaagagt

SEQ ID NO: 21647 - DNA, 20 bp, Artificial Sequence
  Antisense compound
atcctgagttaaataaagag

SEQ ID NO: 21648 - DNA, 20 bp, Artificial Sequence
  Antisense compound
aatcctgagttaaataaaga

SEQ ID NO: 21649 - DNA, 20 bp, Artificial Sequence
  Antisense compound
aaatcctgagttaaataaag

SEQ ID NO: 21650 - DNA, 20 bp, Artificial Sequence
  Antisense compound
taaatcctgagttaaataaa

SEQ ID NO: 21651 - DNA, 20 bp, Artificial Sequence
  Antisense compound
ataaatcctgagttaaataa

SEQ ID NO: 21652 - DNA, 20 bp, Artificial Sequence
  Antisense compound
aataaatcctgagttaaata

SEQ ID NO: 21653 - DNA, 20 bp, Artificial Sequence
  Antisense compound
aaataaatcctgagttaaat

SEQ ID NO: 21654 - DNA, 20 bp, Artificial Sequence
  Antisense compound
gaaataaatcctgagttaaa

SEQ ID NO: 21655 - DNA, 20 bp, Artificial Sequence
  Antisense compound
agaaataaatcctgagttaa

SEQ ID NO: 21656 - DNA, 20 bp, Artificial Sequence
  Antisense compound
aagaaataaatcctgagtta

SEQ ID NO: 21657 - DNA, 20 bp, Artificial Sequence
  Antisense compound
gaagaaataaatcctgagtt

SEQ ID NO: 21658 - DNA, 20 bp, Artificial Sequence
  Antisense compound
ggaagaaataaatcctgagt

SEQ ID NO: 21659 - DNA, 20 bp, Artificial Sequence
  Antisense compound
tggaagaaataaatcctgag

SEQ ID NO: 21660 - DNA, 20 bp, Artificial Sequence
  Antisense compound
atggaagaaataaatcctga

SEQ ID NO: 21661 - DNA, 20 bp, Artificial Sequence
  Antisense compound
aatggaagaaataaatcctg

SEQ ID NO: 21662 - DNA, 20 bp, Artificial Sequence
  Antisense compound
aaatggaagaaataaatcct

SEQ ID NO: 21663 - DNA, 20 bp, Artificial Sequence
  Antisense compound
aaaatggaagaaataaatcc

SEQ ID NO: 21664 - DNA, 20 bp, Artificial Sequence
  Antisense compound
taaaatggaagaaataaatc

SEQ ID NO: 21665 - DNA, 20 bp, Artificial Sequence
  Antisense compound
ataaaatggaagaaataaat

SEQ ID NO: 21666 - DNA, 20 bp, Artificial Sequence
  Antisense compound
aataaaatggaagaaataaa

SEQ ID NO: 21667 - DNA, 20 bp, Artificial Sequence
  Antisense compound
gaataaaatggaagaaataa

SEQ ID NO: 21668 - DNA, 20 bp, Artificial Sequence
  Antisense compound
agaataaaatggaagaaata

SEQ ID NO: 21669 - DNA, 20 bp, Artificial Sequence
  Antisense compound
tagaataaaatggaagaaat

SEQ ID NO: 21670 - DNA, 20 bp, Artificial Sequence
  Antisense compound
ttagaataaaatggaagaaa

SEQ ID NO: 21671 - DNA, 20 bp, Artificial Sequence
  Antisense compound
attagaataaaatggaagaa

SEQ ID NO: 21672 - DNA, 20 bp, Artificial Sequence
  Antisense compound
cattagaataaaatggaaga

SEQ ID NO: 21673 - DNA, 20 bp, Artificial Sequence
  Antisense compound
acattagaataaaatggaag

SEQ ID NO: 21674 - DNA, 20 bp, Artificial Sequence
  Antisense compound
aacattagaataaaatggaa

SEQ ID NO: 21675 - DNA, 20 bp, Artificial Sequence
  Antisense compound
taacattagaataaaatgga

SEQ ID NO: 21676 - DNA, 20 bp, Artificial Sequence
  Antisense compound
gtaacattagaataaaatgg

SEQ ID NO: 21677 - DNA, 20 bp, Artificial Sequence
  Antisense compound
tgtaacattagaataaaatg

SEQ ID NO: 21678 - DNA, 20 bp, Artificial Sequence
  Antisense compound
ctgtaacattagaataaaat

SEQ ID NO: 21679 - DNA, 20 bp, Artificial Sequence
  Antisense compound
cctgtaacattagaataaaa

SEQ ID NO: 21680 - DNA, 20 bp, Artificial Sequence
  Antisense compound
ccctgtaacattagaataaa

SEQ ID NO: 21681 - DNA, 20 bp, Artificial Sequence
  Antisense compound
accctgtaacattagaataa

SEQ ID NO: 21682 - DNA, 20 bp, Artificial Sequence
  Antisense compound
aaccctgtaacattagaata

SEQ ID NO: 21683 - DNA, 20 bp, Artificial Sequence
  Antisense compound
aaaccctgtaacattagaat

SEQ ID NO: 21684 - DNA, 20 bp, Artificial Sequence
  Antisense compound
gaaaccctgtaacattagaa

SEQ ID NO: 21685 - DNA, 20 bp, Artificial Sequence
  Antisense compound
tgaaaccctgtaacattaga

SEQ ID NO: 21686 - DNA, 20 bp, Artificial Sequence
  Antisense compound
atgaaaccctgtaacattag

SEQ ID NO: 21687 - DNA, 20 bp, Artificial Sequence
  Antisense compound
tatgaaaccctgtaacatta

SEQ ID NO: 21688 - DNA, 20 bp, Artificial Sequence
  Antisense compound
gtatgaaaccctgtaacatt

SEQ ID NO: 21689 - DNA, 20 bp, Artificial Sequence
  Antisense compound
agtatgaaaccctgtaacat

SEQ ID NO: 21690 - DNA, 20 bp, Artificial Sequence
  Antisense compound
tagtatgaaaccctgtaaca

SEQ ID NO: 21691 - DNA, 20 bp, Artificial Sequence
  Antisense compound
atagtatgaaaccctgtaac

SEQ ID NO: 21692 - DNA, 20 bp, Artificial Sequence
  Antisense compound
aatagtatgaaaccctgtaa

SEQ ID NO: 21693 - DNA, 20 bp, Artificial Sequence
  Antisense compound
taatagtatgaaaccctgta

SEQ ID NO: 21694 - DNA, 20 bp, Artificial Sequence
  Antisense compound
ttaatagtatgaaaccctgt

SEQ ID NO: 21695 - DNA, 20 bp, Artificial Sequence
  Antisense compound
attaatagtatgaaaccctg

SEQ ID NO: 21696 - DNA, 20 bp, Artificial Sequence
  Antisense compound
gattaatagtatgaaaccct

SEQ ID NO: 21697 - DNA, 20 bp, Artificial Sequence
  Antisense compound
tgattaatagtatgaaaccc

SEQ ID NO: 21698 - DNA, 20 bp, Artificial Sequence
  Antisense compound
atgattaatagtatgaaacc

SEQ ID NO: 21699 - DNA, 20 bp, Artificial Sequence
  Antisense compound
tatgattaatagtatgaaac

SEQ ID NO: 21700 - DNA, 20 bp, Artificial Sequence
  Antisense compound
gtatgattaatagtatgaaa

SEQ ID NO: 21701 - DNA, 20 bp, Artificial Sequence
  Antisense compound
cgtatgattaatagtatgaa

SEQ ID NO: 21702 - DNA, 20 bp, Artificial Sequence
  Antisense compound
acgtatgattaatagtatga

SEQ ID NO: 21703 - DNA, 20 bp, Artificial Sequence
  Antisense compound
aacgtatgattaatagtatg

SEQ ID NO: 21704 - DNA, 20 bp, Artificial Sequence
  Antisense compound
aaacgtatgattaatagtat

SEQ ID NO: 21705 - DNA, 20 bp, Artificial Sequence
  Antisense compound
caaacgtatgattaatagta

SEQ ID NO: 21706 - DNA, 20 bp, Artificial Sequence
  Antisense compound
ccaaacgtatgattaatagt

SEQ ID NO: 21707 - DNA, 20 bp, Artificial Sequence
  Antisense compound
gccaaacgtatgattaatag

SEQ ID NO: 21708 - DNA, 20 bp, Artificial Sequence
  Antisense compound
tgccaaacgtatgattaata

SEQ ID NO: 21709 - DNA, 20 bp, Artificial Sequence
  Antisense compound
ttgccaaacgtatgattaat

SEQ ID NO: 21710 - DNA, 20 bp, Artificial Sequence
  Antisense compound
gttgccaaacgtatgattaa

SEQ ID NO: 21711 - DNA, 20 bp, Artificial Sequence
  Antisense compound
ggttgccaaacgtatgatta

SEQ ID NO: 21712 - DNA, 20 bp, Artificial Sequence
  Antisense compound
gggttgccaaacgtatgatt

SEQ ID NO: 21713 - DNA, 20 bp, Artificial Sequence
  Antisense compound
agggttgccaaacgtatgat

SEQ ID NO: 21714 - DNA, 20 bp, Artificial Sequence
  Antisense compound
cagggttgccaaacgtatga

SEQ ID NO: 21715 - DNA, 20 bp, Artificial Sequence
  Antisense compound
acagggttgccaaacgtatg

SEQ ID NO: 21716 - DNA, 20 bp, Artificial Sequence
  Antisense compound
gacagggttgccaaacgtat

SEQ ID NO: 21717 - DNA, 20 bp, Artificial Sequence
  Antisense compound
tgacagggttgccaaacgta

SEQ ID NO: 21718 - DNA, 20 bp, Artificial Sequence
  Antisense compound
atgacagggttgccaaacgt

SEQ ID NO: 21719 - DNA, 20 bp, Artificial Sequence
  Antisense compound
tatgacagggttgccaaacg

SEQ ID NO: 21720 - DNA, 20 bp, Artificial Sequence
  Antisense compound
gtatgacagggttgccaaac

SEQ ID NO: 21721 - DNA, 20 bp, Artificial Sequence
  Antisense compound
ggtatgacagggttgccaaa

SEQ ID NO: 21722 - DNA, 20 bp, Artificial Sequence
  Antisense compound
aggtatgacagggttgccaa

SEQ ID NO: 21723 - DNA, 20 bp, Artificial Sequence
  Antisense compound
aaggtatgacagggttgcca

SEQ ID NO: 21724 - DNA, 20 bp, Artificial Sequence
  Antisense compound
aaaggtatgacagggttgcc

SEQ ID NO: 21725 - DNA, 20 bp, Artificial Sequence
  Antisense compound
aaaaggtatgacagggttgc

SEQ ID NO: 21726 - DNA, 20 bp, Artificial Sequence
  Antisense compound
taaaaggtatgacagggttg

SEQ ID NO: 21727 - DNA, 20 bp, Artificial Sequence
  Antisense compound
ttaaaaggtatgacagggtt

SEQ ID NO: 21728 - DNA, 20 bp, Artificial Sequence
  Antisense compound
cttaaaaggtatgacagggt

SEQ ID NO: 21729 - DNA, 20 bp, Artificial Sequence
  Antisense compound
ccttaaaaggtatgacaggg

SEQ ID NO: 21730 - DNA, 20 bp, Artificial Sequence
  Antisense compound
tccttaaaaggtatgacagg

SEQ ID NO: 21731 - DNA, 20 bp, Artificial Sequence
  Antisense compound
atccttaaaaggtatgacag

SEQ ID NO: 21732 - DNA, 20 bp, Artificial Sequence
  Antisense compound
catccttaaaaggtatgaca

SEQ ID NO: 21733 - DNA, 20 bp, Artificial Sequence
  Antisense compound
ccatccttaaaaggtatgac

SEQ ID NO: 21734 - DNA, 20 bp, Artificial Sequence
  Antisense compound
accatccttaaaaggtatga

SEQ ID NO: 21735 - DNA, 20 bp, Artificial Sequence
  Antisense compound
taccatccttaaaaggtatg

SEQ ID NO: 21736 - DNA, 20 bp, Artificial Sequence
  Antisense compound
ataccatccttaaaaggtat

SEQ ID NO: 21737 - DNA, 20 bp, Artificial Sequence
  Antisense compound
aataccatccttaaaaggta

SEQ ID NO: 21738 - DNA, 20 bp, Artificial Sequence
  Antisense compound
aaataccatccttaaaaggt

SEQ ID NO: 21739 - DNA, 20 bp, Artificial Sequence
  Antisense compound
taaataccatccttaaaagg

SEQ ID NO: 21740 - DNA, 20 bp, Artificial Sequence
  Antisense compound
ataaataccatccttaaaag

SEQ ID NO: 21741 - DNA, 20 bp, Artificial Sequence
  Antisense compound
aataaataccatccttaaaa

SEQ ID NO: 21742 - DNA, 20 bp, Artificial Sequence
  Antisense compound
aaataaataccatccttaaa

SEQ ID NO: 21743 - DNA, 20 bp, Artificial Sequence
  Antisense compound
aaaataaataccatccttaa

SEQ ID NO: 21744 - DNA, 20 bp, Artificial Sequence
  Antisense compound
caaaataaataccatcctta

SEQ ID NO: 21745 - DNA, 20 bp, Artificial Sequence
  Antisense compound
gcaaaataaataccatcctt

SEQ ID NO: 21746 - DNA, 20 bp, Artificial Sequence
  Antisense compound
agcaaaataaataccatcct

SEQ ID NO: 21747 - DNA, 20 bp, Artificial Sequence
  Antisense compound
cagcaaaataaataccatcc

SEQ ID NO: 21748 - DNA, 20 bp, Artificial Sequence
  Antisense compound
gcagcaaaataaataccatc

SEQ ID NO: 21749 - DNA, 20 bp, Artificial Sequence
  Antisense compound
ggcagcaaaataaataccat

SEQ ID NO: 21750 - DNA, 20 bp, Artificial Sequence
  Antisense compound
tggcagcaaaataaatacca

SEQ ID NO: 21751 - DNA, 20 bp, Artificial Sequence
  Antisense compound
gtggcagcaaaataaatacc

SEQ ID NO: 21752 - DNA, 20 bp, Artificial Sequence
  Antisense compound
tgtggcagcaaaataaatac

SEQ ID NO: 21753 - DNA, 20 bp, Artificial Sequence
  Antisense compound
ctgtggcagcaaaataaata

SEQ ID NO: 21754 - DNA, 20 bp, Artificial Sequence
  Antisense compound
tctgtggcagcaaaataaat

SEQ ID NO: 21755 - DNA, 20 bp, Artificial Sequence
  Antisense compound
ctctgtggcagcaaaataaa

SEQ ID NO: 21756 - DNA, 20 bp, Artificial Sequence
  Antisense compound
tctctgtggcagcaaaataa

SEQ ID NO: 21757 - DNA, 20 bp, Artificial Sequence
  Antisense compound
ttctctgtggcagcaaaata

SEQ ID NO: 21758 - DNA, 20 bp, Artificial Sequence
  Antisense compound
tttctctgtggcagcaaaat

SEQ ID NO: 21759 - DNA, 20 bp, Artificial Sequence
  Antisense compound
atttctctgtggcagcaaaa

SEQ ID NO: 21760 - DNA, 20 bp, Artificial Sequence
  Antisense compound
gatttctctgtggcagcaaa

SEQ ID NO: 21761 - DNA, 20 bp, Artificial Sequence
  Antisense compound
tgatttctctgtggcagcaa

SEQ ID NO: 21762 - DNA, 20 bp, Artificial Sequence
  Antisense compound
ttgatttctctgtggcagca

SEQ ID NO: 21763 - DNA, 20 bp, Artificial Sequence
  Antisense compound
tttgatttctctgtggcagc

SEQ ID NO: 21764 - DNA, 20 bp, Artificial Sequence
  Antisense compound
atttgatttctctgtggcag

SEQ ID NO: 21765 - DNA, 20 bp, Artificial Sequence
  Antisense compound
catttgatttctctgtggca

SEQ ID NO: 21766 - DNA, 20 bp, Artificial Sequence
  Antisense compound
acatttgatttctctgtggc

SEQ ID NO: 21767 - DNA, 20 bp, Artificial Sequence
  Antisense compound
aacatttgatttctctgtgg

SEQ ID NO: 21768 - DNA, 20 bp, Artificial Sequence
  Antisense compound
caacatttgatttctctgtg

SEQ ID NO: 21769 - DNA, 20 bp, Artificial Sequence
  Antisense compound
acaacatttgatttctctgt

SEQ ID NO: 21770 - DNA, 20 bp, Artificial Sequence
  Antisense compound
gacaacatttgatttctctg

SEQ ID NO: 21771 - DNA, 20 bp, Artificial Sequence
  Antisense compound
ggacaacatttgatttctct

SEQ ID NO: 21772 - DNA, 20 bp, Artificial Sequence
  Antisense compound
cggacaacatttgatttctc

SEQ ID NO: 21773 - DNA, 20 bp, Artificial Sequence
  Antisense compound
acggacaacatttgatttct

SEQ ID NO: 21774 - DNA, 20 bp, Artificial Sequence
  Antisense compound
cacggacaacatttgatttc

SEQ ID NO: 21775 - DNA, 20 bp, Artificial Sequence
  Antisense compound
ccacggacaacatttgattt

SEQ ID NO: 21776 - DNA, 20 bp, Artificial Sequence
  Antisense compound
accacggacaacatttgatt

SEQ ID NO: 21777 - DNA, 20 bp, Artificial Sequence
  Antisense compound
aaccacggacaacatttgat

SEQ ID NO: 21778 - DNA, 20 bp, Artificial Sequence
  Antisense compound
caaccacggacaacatttga

SEQ ID NO: 21779 - DNA, 20 bp, Artificial Sequence
  Antisense compound
ccaaccacggacaacatttg

SEQ ID NO: 21780 - DNA, 20 bp, Artificial Sequence
  Antisense compound
cccaaccacggacaacattt

SEQ ID NO: 21781 - DNA, 20 bp, Artificial Sequence
  Antisense compound
acccaaccacggacaacatt

SEQ ID NO: 21782 - DNA, 20 bp, Artificial Sequence
  Antisense compound
aacccaaccacggacaacat

SEQ ID NO: 21783 - DNA, 20 bp, Artificial Sequence
  Antisense compound
aaacccaaccacggacaaca

SEQ ID NO: 21784 - DNA, 20 bp, Artificial Sequence
  Antisense compound
aaaacccaaccacggacaac

SEQ ID NO: 21785 - DNA, 20 bp, Artificial Sequence
  Antisense compound
aaaaacccaaccacggacaa

SEQ ID NO: 21786 - DNA, 20 bp, Artificial Sequence
  Antisense compound
caaaaacccaaccacggaca

SEQ ID NO: 21787 - DNA, 20 bp, Artificial Sequence
  Antisense compound
ccaaaaacccaaccacggac

SEQ ID NO: 21788 - DNA, 20 bp, Artificial Sequence
  Antisense compound
accaaaaacccaaccacgga

SEQ ID NO: 21789 - DNA, 20 bp, Artificial Sequence
  Antisense compound
aaccaaaaacccaaccacgg

SEQ ID NO: 21790 - DNA, 20 bp, Artificial Sequence
  Antisense compound
gaaccaaaaacccaaccacg

SEQ ID NO: 21791 - DNA, 20 bp, Artificial Sequence
  Antisense compound
agaaccaaaaacccaaccac

SEQ ID NO: 21792 - DNA, 20 bp, Artificial Sequence
  Antisense compound
tagaaccaaaaacccaacca

SEQ ID NO: 21793 - DNA, 20 bp, Artificial Sequence
  Antisense compound
gtagaaccaaaaacccaacc

SEQ ID NO: 21794 - DNA, 20 bp, Artificial Sequence
  Antisense compound
ggtagaaccaaaaacccaac

SEQ ID NO: 21795 - DNA, 20 bp, Artificial Sequence
  Antisense compound
tggtagaaccaaaaacccaa

SEQ ID NO: 21796 - DNA, 20 bp, Artificial Sequence
  Antisense compound
atggtagaaccaaaaaccca

SEQ ID NO: 21797 - DNA, 20 bp, Artificial Sequence
  Antisense compound
catggtagaaccaaaaaccc

SEQ ID NO: 21798 - DNA, 20 bp, Artificial Sequence
  Antisense compound
tcatggtagaaccaaaaacc

SEQ ID NO: 21799 - DNA, 20 bp, Artificial Sequence
  Antisense compound
ttcatggtagaaccaaaaac

SEQ ID NO: 21800 - DNA, 20 bp, Artificial Sequence
  Antisense compound
gttcatggtagaaccaaaaa

SEQ ID NO: 21801 - DNA, 20 bp, Artificial Sequence
  Antisense compound
tgttcatggtagaaccaaaa

SEQ ID NO: 21802 - DNA, 20 bp, Artificial Sequence
  Antisense compound
ttgttcatggtagaaccaaa

SEQ ID NO: 21803 - DNA, 20 bp, Artificial Sequence
  Antisense compound
gttgttcatggtagaaccaa

SEQ ID NO: 21804 - DNA, 20 bp, Artificial Sequence
  Antisense compound
tgttgttcatggtagaacca

SEQ ID NO: 21805 - DNA, 20 bp, Artificial Sequence
  Antisense compound
ttgttgttcatggtagaacc

SEQ ID NO: 21806 - DNA, 20 bp, Artificial Sequence
  Antisense compound
cttgttgttcatggtagaac

SEQ ID NO: 21807 - DNA, 20 bp, Artificial Sequence
  Antisense compound
acttgttgttcatggtagaa

SEQ ID NO: 21808 - DNA, 20 bp, Artificial Sequence
  Antisense compound
gacttgttgttcatggtaga

SEQ ID NO: 21809 - DNA, 20 bp, Artificial Sequence
  Antisense compound
tgacttgttgttcatggtag

SEQ ID NO: 21810 - DNA, 20 bp, Artificial Sequence
  Antisense compound
gtgacttgttgttcatggta

SEQ ID NO: 21811 - DNA, 20 bp, Artificial Sequence
  Antisense compound
tgtgacttgttgttcatggt

SEQ ID NO: 21812 - DNA, 20 bp, Artificial Sequence
  Antisense compound
ctgtgacttgttgttcatgg

SEQ ID NO: 21813 - DNA, 20 bp, Artificial Sequence
  Antisense compound
actgtgacttgttgttcatg

SEQ ID NO: 21814 - DNA, 20 bp, Artificial Sequence
  Antisense compound
gactgtgacttgttgttcat

SEQ ID NO: 21815 - DNA, 20 bp, Artificial Sequence
  Antisense compound
cgactgtgacttgttgttca

SEQ ID NO: 21816 - DNA, 20 bp, Artificial Sequence
  Antisense compound
ccgactgtgacttgttgttc

SEQ ID NO: 21817 - DNA, 20 bp, Artificial Sequence
  Antisense compound
accgactgtgacttgttgtt

SEQ ID NO: 21818 - DNA, 20 bp, Artificial Sequence
  Antisense compound
caccgactgtgacttgttgt

SEQ ID NO: 21819 - DNA, 20 bp, Artificial Sequence
  Antisense compound
tcaccgactgtgacttgttg

SEQ ID NO: 21820 - DNA, 20 bp, Artificial Sequence
  Antisense compound
atcaccgactgtgacttgtt

SEQ ID NO: 21821 - DNA, 20 bp, Artificial Sequence
  Antisense compound
aatcaccgactgtgacttgt

SEQ ID NO: 21822 - DNA, 20 bp, Artificial Sequence
  Antisense compound
taatcaccgactgtgacttg

SEQ ID NO: 21823 - DNA, 20 bp, Artificial Sequence
  Antisense compound
ataatcaccgactgtgactt

SEQ ID NO: 21824 - DNA, 20 bp, Artificial Sequence
  Antisense compound
aataatcaccgactgtgact

SEQ ID NO: 21825 - DNA, 20 bp, Artificial Sequence
  Antisense compound
taataatcaccgactgtgac

SEQ ID NO: 21826 - DNA, 20 bp, Artificial Sequence
  Antisense compound
ataataatcaccgactgtga

SEQ ID NO: 21827 - DNA, 20 bp, Artificial Sequence
  Antisense compound
aataataatcaccgactgtg

SEQ ID NO: 21828 - DNA, 20 bp, Artificial Sequence
  Antisense compound
taataataatcaccgactgt

SEQ ID NO: 21829 - DNA, 20 bp, Artificial Sequence
  Antisense compound
ttaataataatcaccgactg

SEQ ID NO: 21830 - DNA, 20 bp, Artificial Sequence
  Antisense compound
gttaataataatcaccgact

SEQ ID NO: 21831 - DNA, 20 bp, Artificial Sequence
  Antisense compound
tgttaataataatcaccgac

SEQ ID NO: 21832 - DNA, 20 bp, Artificial Sequence
  Antisense compound
ttgttaataataatcaccga

SEQ ID NO: 21833 - DNA, 20 bp, Artificial Sequence
  Antisense compound
attgttaataataatcaccg

SEQ ID NO: 21834 - DNA, 20 bp, Artificial Sequence
  Antisense compound
aattgttaataataatcacc

SEQ ID NO: 21835 - DNA, 20 bp, Artificial Sequence
  Antisense compound
gaattgttaataataatcac

SEQ ID NO: 21836 - DNA, 20 bp, Artificial Sequence
  Antisense compound
agaattgttaataataatca

SEQ ID NO: 21837 - DNA, 20 bp, Artificial Sequence
  Antisense compound
tagaattgttaataataatc

SEQ ID NO: 21838 - DNA, 20 bp, Artificial Sequence
  Antisense compound
gtagaattgttaataataat

SEQ ID NO: 21839 - DNA, 20 bp, Artificial Sequence
  Antisense compound
agtagaattgttaataataa

SEQ ID NO: 21840 - DNA, 20 bp, Artificial Sequence
  Antisense compound
tagtagaattgttaataata

SEQ ID NO: 21841 - DNA, 20 bp, Artificial Sequence
  Antisense compound
ttagtagaattgttaataat

SEQ ID NO: 21842 - DNA, 20 bp, Artificial Sequence
  Antisense compound
attagtagaattgttaataa

SEQ ID NO: 21843 - DNA, 20 bp, Artificial Sequence
  Antisense compound
cattagtagaattgttaata

SEQ ID NO: 21844 - DNA, 20 bp, Artificial Sequence
  Antisense compound
acattagtagaattgttaat

SEQ ID NO: 21845 - DNA, 20 bp, Artificial Sequence
  Antisense compound
aacattagtagaattgttaa

SEQ ID NO: 21846 - DNA, 20 bp, Artificial Sequence
  Antisense compound
caacattagtagaattgtta

SEQ ID NO: 21847 - DNA, 20 bp, Artificial Sequence
  Antisense compound
acaacattagtagaattgtt

SEQ ID NO: 21848 - DNA, 20 bp, Artificial Sequence
  Antisense compound
aacaacattagtagaattgt

SEQ ID NO: 21849 - DNA, 20 bp, Artificial Sequence
  Antisense compound
taacaacattagtagaattg

SEQ ID NO: 21850 - DNA, 20 bp, Artificial Sequence
  Antisense compound
ataacaacattagtagaatt

SEQ ID NO: 21851 - DNA, 20 bp, Artificial Sequence
  Antisense compound
tataacaacattagtagaat

SEQ ID NO: 21852 - DNA, 20 bp, Artificial Sequence
  Antisense compound
gtataacaacattagtagaa

SEQ ID NO: 21853 - DNA, 20 bp, Artificial Sequence
  Antisense compound
cgtataacaacattagtaga

SEQ ID NO: 21854 - DNA, 20 bp, Artificial Sequence
  Antisense compound
tcgtataacaacattagtag

SEQ ID NO: 21855 - DNA, 20 bp, Artificial Sequence
  Antisense compound
ctcgtataacaacattagta

SEQ ID NO: 21856 - DNA, 20 bp, Artificial Sequence
  Antisense compound
gctcgtataacaacattagt

SEQ ID NO: 21857 - DNA, 20 bp, Artificial Sequence
  Antisense compound
tgctcgtataacaacattag

SEQ ID NO: 21858 - DNA, 20 bp, Artificial Sequence
  Antisense compound
atgctcgtataacaacatta

SEQ ID NO: 21859 - DNA, 20 bp, Artificial Sequence
  Antisense compound
catgctcgtataacaacatt

SEQ ID NO: 21860 - DNA, 20 bp, Artificial Sequence
  Antisense compound
acatgctcgtataacaacat

SEQ ID NO: 21861 - DNA, 20 bp, Artificial Sequence
  Antisense compound
tacatgctcgtataacaaca

SEQ ID NO: 21862 - DNA, 20 bp, Artificial Sequence
  Antisense compound
ttacatgctcgtataacaac

SEQ ID NO: 21863 - DNA, 20 bp, Artificial Sequence
  Antisense compound
gttacatgctcgtataacaa

SEQ ID NO: 21864 - DNA, 20 bp, Artificial Sequence
  Antisense compound
agttacatgctcgtataaca

SEQ ID NO: 21865 - DNA, 20 bp, Artificial Sequence
  Antisense compound
aagttacatgctcgtataac

SEQ ID NO: 21866 - DNA, 20 bp, Artificial Sequence
  Antisense compound
aaagttacatgctcgtataa

SEQ ID NO: 21867 - DNA, 20 bp, Artificial Sequence
  Antisense compound
caaagttacatgctcgtata

SEQ ID NO: 21868 - DNA, 20 bp, Artificial Sequence
  Antisense compound
tcaaagttacatgctcgtat

SEQ ID NO: 21869 - DNA, 20 bp, Artificial Sequence
  Antisense compound
ttcaaagttacatgctcgta

SEQ ID NO: 21870 - DNA, 20 bp, Artificial Sequence
  Antisense compound
attcaaagttacatgctcgt

SEQ ID NO: 21871 - DNA, 20 bp, Artificial Sequence
  Antisense compound
aattcaaagttacatgctcg

SEQ ID NO: 21872 - DNA, 20 bp, Artificial Sequence
  Antisense compound
caattcaaagttacatgctc

SEQ ID NO: 21873 - DNA, 20 bp, Artificial Sequence
  Antisense compound
acaattcaaagttacatgct

SEQ ID NO: 21874 - DNA, 20 bp, Artificial Sequence
  Antisense compound
cacaattcaaagttacatgc

SEQ ID NO: 21875 - DNA, 20 bp, Artificial Sequence
  Antisense compound
acacaattcaaagttacatg

SEQ ID NO: 21876 - DNA, 20 bp, Artificial Sequence
  Antisense compound
cacacaattcaaagttacat

SEQ ID NO: 21877 - DNA, 20 bp, Artificial Sequence
  Antisense compound
tcacacaattcaaagttaca

SEQ ID NO: 21878 - DNA, 20 bp, Artificial Sequence
  Antisense compound
gtcacacaattcaaagttac

SEQ ID NO: 21879 - DNA, 20 bp, Artificial Sequence
  Antisense compound
tgtcacacaattcaaagtta

SEQ ID NO: 21880 - DNA, 20 bp, Artificial Sequence
  Antisense compound
ttgtcacacaattcaaagtt

SEQ ID NO: 21881 - DNA, 20 bp, Artificial Sequence
  Antisense compound
gttgtcacacaattcaaagt

SEQ ID NO: 21882 - DNA, 20 bp, Artificial Sequence
  Antisense compound
ggttgtcacacaattcaaag

SEQ ID NO: 21883 - DNA, 20 bp, Artificial Sequence
  Antisense compound
gggttgtcacacaattcaaa

SEQ ID NO: 21884 - DNA, 20 bp, Artificial Sequence
  Antisense compound
agggttgtcacacaattcaa

SEQ ID NO: 21885 - DNA, 20 bp, Artificial Sequence
  Antisense compound
aagggttgtcacacaattca

SEQ ID NO: 21886 - DNA, 20 bp, Artificial Sequence
  Antisense compound
aaagggttgtcacacaattc

SEQ ID NO: 21887 - DNA, 20 bp, Artificial Sequence
  Antisense compound
gaaagggttgtcacacaatt

SEQ ID NO: 21888 - DNA, 20 bp, Artificial Sequence
  Antisense compound
agaaagggttgtcacacaat

SEQ ID NO: 21889 - DNA, 20 bp, Artificial Sequence
  Antisense compound
aagaaagggttgtcacacaa

SEQ ID NO: 21890 - DNA, 20 bp, Artificial Sequence
  Antisense compound
aaagaaagggttgtcacaca

SEQ ID NO: 21891 - DNA, 20 bp, Artificial Sequence
  Antisense compound
caaagaaagggttgtcacac

SEQ ID NO: 21892 - DNA, 20 bp, Artificial Sequence
  Antisense compound
gcaaagaaagggttgtcaca

SEQ ID NO: 21893 - DNA, 20 bp, Artificial Sequence
  Antisense compound
agcaaagaaagggttgtcac

SEQ ID NO: 21894 - DNA, 20 bp, Artificial Sequence
  Antisense compound
cagcaaagaaagggttgtca

SEQ ID NO: 21895 - DNA, 20 bp, Artificial Sequence
  Antisense compound
acagcaaagaaagggttgtc

SEQ ID NO: 21896 - DNA, 20 bp, Artificial Sequence
  Antisense compound
aacagcaaagaaagggttgt

SEQ ID NO: 21897 - DNA, 20 bp, Artificial Sequence
  Antisense compound
aaacagcaaagaaagggttg

SEQ ID NO: 21898 - DNA, 20 bp, Artificial Sequence
  Antisense compound
gaaacagcaaagaaagggtt

SEQ ID NO: 21899 - DNA, 20 bp, Artificial Sequence
  Antisense compound
agaaacagcaaagaaagggt

SEQ ID NO: 21900 - DNA, 20 bp, Artificial Sequence
  Antisense compound
tagaaacagcaaagaaaggg

SEQ ID NO: 21901 - DNA, 20 bp, Artificial Sequence
  Antisense compound
ttagaaacagcaaagaaagg

SEQ ID NO: 21902 - DNA, 20 bp, Artificial Sequence
  Antisense compound
tttagaaacagcaaagaaag

SEQ ID NO: 21903 - DNA, 20 bp, Artificial Sequence
  Antisense compound
gtttagaaacagcaaagaaa

SEQ ID NO: 21904 - DNA, 20 bp, Artificial Sequence
  Antisense compound
ggtttagaaacagcaaagaa

SEQ ID NO: 21905 - DNA, 20 bp, Artificial Sequence
  Antisense compound
gggtttagaaacagcaaaga

SEQ ID NO: 21906 - DNA, 20 bp, Artificial Sequence
  Antisense compound
tgggtttagaaacagcaaag

SEQ ID NO: 21907 - DNA, 20 bp, Artificial Sequence
  Antisense compound
atgggtttagaaacagcaaa

SEQ ID NO: 21908 - DNA, 20 bp, Artificial Sequence
  Antisense compound
catgggtttagaaacagcaa

SEQ ID NO: 21909 - DNA, 20 bp, Artificial Sequence
  Antisense compound
ccatgggtttagaaacagca

SEQ ID NO: 21910 - DNA, 20 bp, Artificial Sequence
  Antisense compound
cccatgggtttagaaacagc

SEQ ID NO: 21911 - DNA, 20 bp, Artificial Sequence
  Antisense compound
acccatgggtttagaaacag

SEQ ID NO: 21912 - DNA, 20 bp, Artificial Sequence
  Antisense compound
tacccatgggtttagaaaca

SEQ ID NO: 21913 - DNA, 20 bp, Artificial Sequence
  Antisense compound
gtacccatgggtttagaaac

SEQ ID NO: 21914 - DNA, 20 bp, Artificial Sequence
  Antisense compound
tgtacccatgggtttagaaa

SEQ ID NO: 21915 - DNA, 20 bp, Artificial Sequence
  Antisense compound
gtgtacccatgggtttagaa

SEQ ID NO: 21916 - DNA, 20 bp, Artificial Sequence
  Antisense compound
tgtgtacccatgggtttaga

SEQ ID NO: 21917 - DNA, 20 bp, Artificial Sequence
  Antisense compound
ctgtgtacccatgggtttag

SEQ ID NO: 21918 - DNA, 20 bp, Artificial Sequence
  Antisense compound
tctgtgtacccatgggttta

SEQ ID NO: 21919 - DNA, 20 bp, Artificial Sequence
  Antisense compound
gtctgtgtacccatgggttt

SEQ ID NO: 21920 - DNA, 20 bp, Artificial Sequence
  Antisense compound
tgtctgtgtacccatgggtt

SEQ ID NO: 21921 - DNA, 20 bp, Artificial Sequence
  Antisense compound
gtgtctgtgtacccatgggt

SEQ ID NO: 21922 - DNA, 20 bp, Artificial Sequence
  Antisense compound
tgtgtctgtgtacccatggg

SEQ ID NO: 21923 - DNA, 20 bp, Artificial Sequence
  Antisense compound
atgtgtctgtgtacccatgg

SEQ ID NO: 21924 - DNA, 20 bp, Artificial Sequence
  Antisense compound
tatgtgtctgtgtacccatg

SEQ ID NO: 21925 - DNA, 20 bp, Artificial Sequence
  Antisense compound
gtatgtgtctgtgtacccat

SEQ ID NO: 21926 - DNA, 20 bp, Artificial Sequence
  Antisense compound
agtatgtgtctgtgtaccca

SEQ ID NO: 21927 - DNA, 20 bp, Artificial Sequence
  Antisense compound
tagtatgtgtctgtgtaccc

SEQ ID NO: 21928 - DNA, 20 bp, Artificial Sequence
  Antisense compound
atagtatgtgtctgtgtacc

SEQ ID NO: 21929 - DNA, 20 bp, Artificial Sequence
  Antisense compound
catagtatgtgtctgtgtac

SEQ ID NO: 21930 - DNA, 20 bp, Artificial Sequence
  Antisense compound
tcatagtatgtgtctgtgta

SEQ ID NO: 21931 - DNA, 20 bp, Artificial Sequence
  Antisense compound
atcatagtatgtgtctgtgt

SEQ ID NO: 21932 - DNA, 20 bp, Artificial Sequence
  Antisense compound
tatcatagtatgtgtctgtg

SEQ ID NO: 21933 - DNA, 20 bp, Artificial Sequence
  Antisense compound
atatcatagtatgtgtctgt

SEQ ID NO: 21934 - DNA, 20 bp, Artificial Sequence
  Antisense compound
aatatcatagtatgtgtctg

SEQ ID NO: 21935 - DNA, 20 bp, Artificial Sequence
  Antisense compound
gaatatcatagtatgtgtct

SEQ ID NO: 21936 - DNA, 20 bp, Artificial Sequence
  Antisense compound
cgaatatcatagtatgtgtc

SEQ ID NO: 21937 - DNA, 20 bp, Artificial Sequence
  Antisense compound
tcgaatatcatagtatgtgt

SEQ ID NO: 21938 - DNA, 20 bp, Artificial Sequence
  Antisense compound
atcgaatatcatagtatgtg

SEQ ID NO: 21939 - DNA, 20 bp, Artificial Sequence
  Antisense compound
tatcgaatatcatagtatgt

SEQ ID NO: 21940 - DNA, 20 bp, Artificial Sequence
  Antisense compound
ttatcgaatatcatagtatg

SEQ ID NO: 21941 - DNA, 20 bp, Artificial Sequence
  Antisense compound
attatcgaatatcatagtat

SEQ ID NO: 21942 - DNA, 20 bp, Artificial Sequence
  Antisense compound
cattatcgaatatcatagta

SEQ ID NO: 21943 - DNA, 20 bp, Artificial Sequence
  Antisense compound
gcattatcgaatatcatagt

SEQ ID NO: 21944 - DNA, 20 bp, Artificial Sequence
  Antisense compound
tgcattatcgaatatcatag

SEQ ID NO: 21945 - DNA, 20 bp, Artificial Sequence
  Antisense compound
atgcattatcgaatatcata

SEQ ID NO: 21946 - DNA, 20 bp, Artificial Sequence
  Antisense compound
aatgcattatcgaatatcat

SEQ ID NO: 21947 - DNA, 20 bp, Artificial Sequence
  Antisense compound
aaatgcattatcgaatatca

SEQ ID NO: 21948 - DNA, 20 bp, Artificial Sequence
  Antisense compound
taaatgcattatcgaatatc

SEQ ID NO: 21949 - DNA, 20 bp, Artificial Sequence
  Antisense compound
ttaaatgcattatcgaatat

SEQ ID NO: 21950 - DNA, 20 bp, Artificial Sequence
  Antisense compound
attaaatgcattatcgaata

SEQ ID NO: 21951 - DNA, 20 bp, Artificial Sequence
  Antisense compound
aattaaatgcattatcgaat

SEQ ID NO: 21952 - DNA, 20 bp, Artificial Sequence
  Antisense compound
caattaaatgcattatcgaa

SEQ ID NO: 21953 - DNA, 20 bp, Artificial Sequence
  Antisense compound
gcaattaaatgcattatcga

SEQ ID NO: 21954 - DNA, 20 bp, Artificial Sequence
  Antisense compound
tgcaattaaatgcattatcg

SEQ ID NO: 21955 - DNA, 20 bp, Artificial Sequence
  Antisense compound
gtgcaattaaatgcattatc

SEQ ID NO: 21956 - DNA, 20 bp, Artificial Sequence
  Antisense compound
agtgcaattaaatgcattat

SEQ ID NO: 21957 - DNA, 20 bp, Artificial Sequence
  Antisense compound
aagtgcaattaaatgcatta

SEQ ID NO: 21958 - DNA, 20 bp, Artificial Sequence
  Antisense compound
aaagtgcaattaaatgcatt

SEQ ID NO: 21959 - DNA, 20 bp, Artificial Sequence
  Antisense compound
gaaagtgcaattaaatgcat

SEQ ID NO: 21960 - DNA, 20 bp, Artificial Sequence
  Antisense compound
cgaaagtgcaattaaatgca

SEQ ID NO: 21961 - DNA, 20 bp, Artificial Sequence
  Antisense compound
tcgaaagtgcaattaaatgc

SEQ ID NO: 21962 - DNA, 20 bp, Artificial Sequence
  Antisense compound
ctcgaaagtgcaattaaatg

SEQ ID NO: 21963 - DNA, 20 bp, Artificial Sequence
  Antisense compound
actcgaaagtgcaattaaat

SEQ ID NO: 21964 - DNA, 20 bp, Artificial Sequence
  Antisense compound
tactcgaaagtgcaattaaa

SEQ ID NO: 21965 - DNA, 20 bp, Artificial Sequence
  Antisense compound
gtactcgaaagtgcaattaa

SEQ ID NO: 21966 - DNA, 20 bp, Artificial Sequence
  Antisense compound
tgtactcgaaagtgcaatta

SEQ ID NO: 21967 - DNA, 20 bp, Artificial Sequence
  Antisense compound
atgtactcgaaagtgcaatt

SEQ ID NO: 21968 - DNA, 20 bp, Artificial Sequence
  Antisense compound
tatgtactcgaaagtgcaat

SEQ ID NO: 21969 - DNA, 20 bp, Artificial Sequence
  Antisense compound
atatgtactcgaaagtgcaa

SEQ ID NO: 21970 - DNA, 20 bp, Artificial Sequence
  Antisense compound
gatatgtactcgaaagtgca

SEQ ID NO: 21971 - DNA, 20 bp, Artificial Sequence
  Antisense compound
agatatgtactcgaaagtgc

SEQ ID NO: 21972 - DNA, 20 bp, Artificial Sequence
  Antisense compound
cagatatgtactcgaaagtg

SEQ ID NO: 21973 - DNA, 20 bp, Artificial Sequence
  Antisense compound
tcagatatgtactcgaaagt

SEQ ID NO: 21974 - DNA, 20 bp, Artificial Sequence
  Antisense compound
atcagatatgtactcgaaag

SEQ ID NO: 21975 - DNA, 20 bp, Artificial Sequence
  Antisense compound
catcagatatgtactcgaaa

SEQ ID NO: 21976 - DNA, 20 bp, Artificial Sequence
  Antisense compound
gcatcagatatgtactcgaa

SEQ ID NO: 21977 - DNA, 20 bp, Artificial Sequence
  Antisense compound
ggcatcagatatgtactcga

SEQ ID NO: 21978 - DNA, 20 bp, Artificial Sequence
  Antisense compound
aggcatcagatatgtactcg

SEQ ID NO: 21979 - DNA, 20 bp, Artificial Sequence
  Antisense compound
aaggcatcagatatgtactc

SEQ ID NO: 21980 - DNA, 20 bp, Artificial Sequence
  Antisense compound
aaaggcatcagatatgtact

SEQ ID NO: 21981 - DNA, 20 bp, Artificial Sequence
  Antisense compound
aaaaggcatcagatatgtac

SEQ ID NO: 21982 - DNA, 20 bp, Artificial Sequence
  Antisense compound
gaaaaggcatcagatatgta

SEQ ID NO: 21983 - DNA, 20 bp, Artificial Sequence
  Antisense compound
cgaaaaggcatcagatatgt

SEQ ID NO: 21984 - DNA, 20 bp, Artificial Sequence
  Antisense compound
gcgaaaaggcatcagatatg

SEQ ID NO: 21985 - DNA, 20 bp, Artificial Sequence
  Antisense compound
agcgaaaaggcatcagatat

SEQ ID NO: 21986 - DNA, 20 bp, Artificial Sequence
  Antisense compound
aagcgaaaaggcatcagata

SEQ ID NO: 21987 - DNA, 20 bp, Artificial Sequence
  Antisense compound
caagcgaaaaggcatcagat

SEQ ID NO: 21988 - DNA, 20 bp, Artificial Sequence
  Antisense compound
tcaagcgaaaaggcatcaga

SEQ ID NO: 21989 - DNA, 20 bp, Artificial Sequence
  Antisense compound
atcaagcgaaaaggcatcag

SEQ ID NO: 21990 - DNA, 20 bp, Artificial Sequence
  Antisense compound
catcaagcgaaaaggcatca

SEQ ID NO: 21991 - DNA, 20 bp, Artificial Sequence
  Antisense compound
acatcaagcgaaaaggcatc

SEQ ID NO: 21992 - DNA, 20 bp, Artificial Sequence
  Antisense compound
aacatcaagcgaaaaggcat

SEQ ID NO: 21993 - DNA, 20 bp, Artificial Sequence
  Antisense compound
aaacatcaagcgaaaaggca

SEQ ID NO: 21994 - DNA, 20 bp, Artificial Sequence
  Antisense compound
gaaacatcaagcgaaaaggc

SEQ ID NO: 21995 - DNA, 20 bp, Artificial Sequence
  Antisense compound
tgaaacatcaagcgaaaagg

SEQ ID NO: 21996 - DNA, 20 bp, Artificial Sequence
  Antisense compound
ctgaaacatcaagcgaaaag

SEQ ID NO: 21997 - DNA, 20 bp, Artificial Sequence
  Antisense compound
tctgaaacatcaagcgaaaa

SEQ ID NO: 21998 - DNA, 20 bp, Artificial Sequence
  Antisense compound
ttctgaaacatcaagcgaaa

SEQ ID NO: 21999 - DNA, 20 bp, Artificial Sequence
  Antisense compound
tttctgaaacatcaagcgaa

SEQ ID NO: 22000 - DNA, 20 bp, Artificial Sequence
  Antisense compound
ttttctgaaacatcaagcga

SEQ ID NO: 22001 - DNA, 20 bp, Artificial Sequence
  Antisense compound
cttttctgaaacatcaagcg

SEQ ID NO: 22002 - DNA, 20 bp, Artificial Sequence
  Antisense compound
acttttctgaaacatcaagc

SEQ ID NO: 22003 - DNA, 20 bp, Artificial Sequence
  Antisense compound
gacttttctgaaacatcaag

SEQ ID NO: 22004 - DNA, 20 bp, Artificial Sequence
  Antisense compound
tgacttttctgaaacatcaa

SEQ ID NO: 22005 - DNA, 20 bp, Artificial Sequence
  Antisense compound
ctgacttttctgaaacatca

SEQ ID NO: 22006 - DNA, 20 bp, Artificial Sequence
  Antisense compound
cctgacttttctgaaacatc

SEQ ID NO: 22007 - DNA, 20 bp, Artificial Sequence
  Antisense compound
acctgacttttctgaaacat

SEQ ID NO: 22008 - DNA, 20 bp, Artificial Sequence
  Antisense compound
tacctgacttttctgaaaca

SEQ ID NO: 22009 - DNA, 20 bp, Artificial Sequence
  Antisense compound
ttacctgacttttctgaaac

SEQ ID NO: 22010 - DNA, 20 bp, Artificial Sequence
  Antisense compound
attacctgacttttctgaaa

SEQ ID NO: 22011 - DNA, 20 bp, Artificial Sequence
  Antisense compound
aattacctgacttttctgaa

SEQ ID NO: 22012 - DNA, 20 bp, Artificial Sequence
  Antisense compound
aaattacctgacttttctga

SEQ ID NO: 22013 - DNA, 20 bp, Artificial Sequence
  Antisense compound
aaaattacctgacttttctg

SEQ ID NO: 22014 - DNA, 20 bp, Artificial Sequence
  Antisense compound
taaaattacctgacttttct

SEQ ID NO: 22015 - DNA, 20 bp, Artificial Sequence
  Antisense compound
ttaaaattacctgacttttc

SEQ ID NO: 22016 - DNA, 20 bp, Artificial Sequence
  Antisense compound
tttaaaattacctgactttt

SEQ ID NO: 22017 - DNA, 20 bp, Artificial Sequence
  Antisense compound
gtttaaaattacctgacttt

SEQ ID NO: 22018 - DNA, 20 bp, Artificial Sequence
  Antisense compound
tgtttaaaattacctgactt

SEQ ID NO: 22019 - DNA, 20 bp, Artificial Sequence
  Antisense compound
gtgtttaaaattacctgact

SEQ ID NO: 22020 - DNA, 20 bp, Artificial Sequence
  Antisense compound
agtgtttaaaattacctgac

SEQ ID NO: 22021 - DNA, 20 bp, Artificial Sequence
  Antisense compound
aagtgtttaaaattacctga

SEQ ID NO: 22022 - DNA, 20 bp, Artificial Sequence
  Antisense compound
taagtgtttaaaattacctg

SEQ ID NO: 22023 - DNA, 20 bp, Artificial Sequence
  Antisense compound
gtaagtgtttaaaattacct

SEQ ID NO: 22024 - DNA, 20 bp, Artificial Sequence
  Antisense compound
cgtaagtgtttaaaattacc

SEQ ID NO: 22025 - DNA, 20 bp, Artificial Sequence
  Antisense compound
tcgtaagtgtttaaaattac

SEQ ID NO: 22026 - DNA, 20 bp, Artificial Sequence
  Antisense compound
ctcgtaagtgtttaaaatta

SEQ ID NO: 22027 - DNA, 20 bp, Artificial Sequence
  Antisense compound
tctcgtaagtgtttaaaatt

SEQ ID NO: 22028 - DNA, 20 bp, Artificial Sequence
  Antisense compound
ctctcgtaagtgtttaaaat

SEQ ID NO: 22029 - DNA, 20 bp, Artificial Sequence
  Antisense compound
actctcgtaagtgtttaaaa

SEQ ID NO: 22030 - DNA, 20 bp, Artificial Sequence
  Antisense compound
aactctcgtaagtgtttaaa

SEQ ID NO: 22031 - DNA, 20 bp, Artificial Sequence
  Antisense compound
aaactctcgtaagtgtttaa

SEQ ID NO: 22032 - DNA, 20 bp, Artificial Sequence
  Antisense compound
caaactctcgtaagtgttta

SEQ ID NO: 22033 - DNA, 20 bp, Artificial Sequence
  Antisense compound
acaaactctcgtaagtgttt

SEQ ID NO: 22034 - DNA, 20 bp, Artificial Sequence
  Antisense compound
cacaaactctcgtaagtgtt

SEQ ID NO: 22035 - DNA, 20 bp, Artificial Sequence
  Antisense compound
acacaaactctcgtaagtgt

SEQ ID NO: 22036 - DNA, 20 bp, Artificial Sequence
  Antisense compound
aacacaaactctcgtaagtg

SEQ ID NO: 22037 - DNA, 20 bp, Artificial Sequence
  Antisense compound
aaacacaaactctcgtaagt

SEQ ID NO: 22038 - DNA, 20 bp, Artificial Sequence
  Antisense compound
taaacacaaactctcgtaag

SEQ ID NO: 22039 - DNA, 20 bp, Artificial Sequence
  Antisense compound
ttaaacacaaactctcgtaa

SEQ ID NO: 22040 - DNA, 20 bp, Artificial Sequence
  Antisense compound
tttaaacacaaactctcgta

SEQ ID NO: 22041 - DNA, 20 bp, Artificial Sequence
  Antisense compound
ttttaaacacaaactctcgt

SEQ ID NO: 22042 - DNA, 20 bp, Artificial Sequence
  Antisense compound
tttttaaacacaaactctcg

SEQ ID NO: 22043 - DNA, 20 bp, Artificial Sequence
  Antisense compound
atttttaaacacaaactctc

SEQ ID NO: 22044 - DNA, 20 bp, Artificial Sequence
  Antisense compound
tatttttaaacacaaactct

SEQ ID NO: 22045 - DNA, 20 bp, Artificial Sequence
  Antisense compound
ttatttttaaacacaaactc

SEQ ID NO: 22046 - DNA, 20 bp, Artificial Sequence
  Antisense compound
tttatttttaaacacaaact

SEQ ID NO: 22047 - DNA, 20 bp, Artificial Sequence
  Antisense compound
ctttatttttaaacacaaac

SEQ ID NO: 22048 - DNA, 20 bp, Artificial Sequence
  Antisense compound
tctttatttttaaacacaaa

SEQ ID NO: 22049 - DNA, 20 bp, Artificial Sequence
  Antisense compound
atctttatttttaaacacaa

SEQ ID NO: 22050 - DNA, 20 bp, Artificial Sequence
  Antisense compound
catctttatttttaaacaca

SEQ ID NO: 22051 - DNA, 20 bp, Artificial Sequence
  Antisense compound
ccatctttatttttaaacac

SEQ ID NO: 22052 - DNA, 20 bp, Artificial Sequence
  Antisense compound
cccatctttatttttaaaca

SEQ ID NO: 22053 - DNA, 20 bp, Artificial Sequence
  Antisense compound
acccatctttatttttaaac

SEQ ID NO: 22054 - DNA, 20 bp, Artificial Sequence
  Antisense compound
aacccatctttatttttaaa

SEQ ID NO: 22055 - DNA, 20 bp, Artificial Sequence
  Antisense compound
aaacccatctttatttttaa

SEQ ID NO: 22056 - DNA, 20 bp, Artificial Sequence
  Antisense compound
gaaacccatctttattttta

SEQ ID NO: 22057 - DNA, 20 bp, Artificial Sequence
  Antisense compound
agaaacccatctttattttt

SEQ ID NO: 22058 - DNA, 20 bp, Artificial Sequence
  Antisense compound
gagaaacccatctttatttt

SEQ ID NO: 22059 - DNA, 20 bp, Artificial Sequence
  Antisense compound
agagaaacccatctttattt

SEQ ID NO: 22060 - DNA, 20 bp, Artificial Sequence
  Antisense compound
tagagaaacccatctttatt

SEQ ID NO: 22061 - DNA, 20 bp, Artificial Sequence
  Antisense compound
atagagaaacccatctttat

SEQ ID NO: 22062 - DNA, 20 bp, Artificial Sequence
  Antisense compound
catagagaaacccatcttta

SEQ ID NO: 22063 - DNA, 20 bp, Artificial Sequence
  Antisense compound
acatagagaaacccatcttt

SEQ ID NO: 22064 - DNA, 20 bp, Artificial Sequence
  Antisense compound
aacatagagaaacccatctt

SEQ ID NO: 22065 - DNA, 20 bp, Artificial Sequence
  Antisense compound
aaacatagagaaacccatct

SEQ ID NO: 22066 - DNA, 20 bp, Artificial Sequence
  Antisense compound
taaacatagagaaacccatc

SEQ ID NO: 22067 - DNA, 20 bp, Artificial Sequence
  Antisense compound
ataaacatagagaaacccat

SEQ ID NO: 22068 - DNA, 20 bp, Artificial Sequence
  Antisense compound
tataaacatagagaaaccca

SEQ ID NO: 22069 - DNA, 20 bp, Artificial Sequence
  Antisense compound
ttataaacatagagaaaccc

SEQ ID NO: 22070 - DNA, 20 bp, Artificial Sequence
  Antisense compound
cttataaacatagagaaacc

SEQ ID NO: 22071 - DNA, 20 bp, Artificial Sequence
  Antisense compound
ccttataaacatagagaaac

SEQ ID NO: 22072 - DNA, 20 bp, Artificial Sequence
  Antisense compound
cccttataaacatagagaaa

SEQ ID NO: 22073 - DNA, 20 bp, Artificial Sequence
  Antisense compound
gcccttataaacatagagaa

SEQ ID NO: 22074 - DNA, 20 bp, Artificial Sequence
  Antisense compound
agcccttataaacatagaga

SEQ ID NO: 22075 - DNA, 20 bp, Artificial Sequence
  Antisense compound
tagcccttataaacatagag

SEQ ID NO: 22076 - DNA, 20 bp, Artificial Sequence
  Antisense compound
atagcccttataaacataga

SEQ ID NO: 22077 - DNA, 20 bp, Artificial Sequence
  Antisense compound
gatagcccttataaacatag

SEQ ID NO: 22078 - DNA, 20 bp, Artificial Sequence
  Antisense compound
tgatagcccttataaacata

SEQ ID NO: 22079 - DNA, 20 bp, Artificial Sequence
  Antisense compound
ttgatagcccttataaacat

SEQ ID NO: 22080 - DNA, 20 bp, Artificial Sequence
  Antisense compound
gttgatagcccttataaaca

SEQ ID NO: 22081 - DNA, 20 bp, Artificial Sequence
  Antisense compound
ggttgatagcccttataaac

SEQ ID NO: 22082 - DNA, 20 bp, Artificial Sequence
  Antisense compound
aggttgatagcccttataaa

SEQ ID NO: 22083 - DNA, 20 bp, Artificial Sequence
  Antisense compound
taggttgatagcccttataa

SEQ ID NO: 22084 - DNA, 20 bp, Artificial Sequence
  Antisense compound
ataggttgatagcccttata

SEQ ID NO: 22085 - DNA, 20 bp, Artificial Sequence
  Antisense compound
tataggttgatagcccttat

SEQ ID NO: 22086 - DNA, 20 bp, Artificial Sequence
  Antisense compound
ctataggttgatagccctta

SEQ ID NO: 22087 - DNA, 20 bp, Artificial Sequence
  Antisense compound
tctataggttgatagccctt

SEQ ID NO: 22088 - DNA, 20 bp, Artificial Sequence
  Antisense compound
atctataggttgatagccct

SEQ ID NO: 22089 - DNA, 20 bp, Artificial Sequence
  Antisense compound
catctataggttgatagccc

SEQ ID NO: 22090 - DNA, 20 bp, Artificial Sequence
  Antisense compound
acatctataggttgatagcc

SEQ ID NO: 22091 - DNA, 20 bp, Artificial Sequence
  Antisense compound
tacatctataggttgatagc

SEQ ID NO: 22092 - DNA, 20 bp, Artificial Sequence
  Antisense compound
ctacatctataggttgatag

SEQ ID NO: 22093 - DNA, 20 bp, Artificial Sequence
  Antisense compound
actacatctataggttgata

SEQ ID NO: 22094 - DNA, 20 bp, Artificial Sequence
  Antisense compound
aactacatctataggttgat

SEQ ID NO: 22095 - DNA, 20 bp, Artificial Sequence
  Antisense compound
gaactacatctataggttga

SEQ ID NO: 22096 - DNA, 20 bp, Artificial Sequence
  Antisense compound
cgaactacatctataggttg

SEQ ID NO: 22097 - DNA, 20 bp, Artificial Sequence
  Antisense compound
acgaactacatctataggtt

SEQ ID NO: 22098 - DNA, 20 bp, Artificial Sequence
  Antisense compound
cacgaactacatctataggt

SEQ ID NO: 22099 - DNA, 20 bp, Artificial Sequence
  Antisense compound
tcacgaactacatctatagg

SEQ ID NO: 22100 - DNA, 20 bp, Artificial Sequence
  Antisense compound
atcacgaactacatctatag

SEQ ID NO: 22101 - DNA, 20 bp, Artificial Sequence
  Antisense compound
gatcacgaactacatctata

SEQ ID NO: 22102 - DNA, 20 bp, Artificial Sequence
  Antisense compound
agatcacgaactacatctat

SEQ ID NO: 22103 - DNA, 20 bp, Artificial Sequence
  Antisense compound
tagatcacgaactacatcta

SEQ ID NO: 22104 - DNA, 20 bp, Artificial Sequence
  Antisense compound
gtagatcacgaactacatct

SEQ ID NO: 22105 - DNA, 20 bp, Artificial Sequence
  Antisense compound
ggtagatcacgaactacatc

SEQ ID NO: 22106 - DNA, 20 bp, Artificial Sequence
  Antisense compound
aggtagatcacgaactacat

SEQ ID NO: 22107 - DNA, 20 bp, Artificial Sequence
  Antisense compound
aaggtagatcacgaactaca

SEQ ID NO: 22108 - DNA, 20 bp, Artificial Sequence
  Antisense compound
gaaggtagatcacgaactac

SEQ ID NO: 22109 - DNA, 20 bp, Artificial Sequence
  Antisense compound
agaaggtagatcacgaacta

SEQ ID NO: 22110 - DNA, 20 bp, Artificial Sequence
  Antisense compound
cagaaggtagatcacgaact

SEQ ID NO: 22111 - DNA, 20 bp, Artificial Sequence
  Antisense compound
ccagaaggtagatcacgaac

SEQ ID NO: 22112 - DNA, 20 bp, Artificial Sequence
  Antisense compound
accagaaggtagatcacgaa

SEQ ID NO: 22113 - DNA, 20 bp, Artificial Sequence
  Antisense compound
aaccagaaggtagatcacga

SEQ ID NO: 22114 - DNA, 20 bp, Artificial Sequence
  Antisense compound
aaaccagaaggtagatcacg

SEQ ID NO: 22115 - DNA, 20 bp, Artificial Sequence
  Antisense compound
aaaaccagaaggtagatcac

SEQ ID NO: 22116 - DNA, 20 bp, Artificial Sequence
  Antisense compound
taaaaccagaaggtagatca

SEQ ID NO: 22117 - DNA, 20 bp, Artificial Sequence
  Antisense compound
ttaaaaccagaaggtagatc

SEQ ID NO: 22118 - DNA, 20 bp, Artificial Sequence
  Antisense compound
gttaaaaccagaaggtagat

SEQ ID NO: 22119 - DNA, 20 bp, Artificial Sequence
  Antisense compound
tgttaaaaccagaaggtaga

SEQ ID NO: 22120 - DNA, 20 bp, Artificial Sequence
  Antisense compound
gtgttaaaaccagaaggtag

SEQ ID NO: 22121 - DNA, 20 bp, Artificial Sequence
  Antisense compound
agtgttaaaaccagaaggta

SEQ ID NO: 22122 - DNA, 20 bp, Artificial Sequence
  Antisense compound
aagtgttaaaaccagaaggt

SEQ ID NO: 22123 - DNA, 20 bp, Artificial Sequence
  Antisense compound
aaagtgttaaaaccagaagg

SEQ ID NO: 22124 - DNA, 20 bp, Artificial Sequence
  Antisense compound
caaagtgttaaaaccagaag

SEQ ID NO: 22125 - DNA, 20 bp, Artificial Sequence
  Antisense compound
tcaaagtgttaaaaccagaa

SEQ ID NO: 22126 - DNA, 20 bp, Artificial Sequence
  Antisense compound
ttcaaagtgttaaaaccaga

SEQ ID NO: 22127 - DNA, 20 bp, Artificial Sequence
  Antisense compound
tttcaaagtgttaaaaccag

SEQ ID NO: 22128 - DNA, 20 bp, Artificial Sequence
  Antisense compound
gtttcaaagtgttaaaacca

SEQ ID NO: 22129 - DNA, 20 bp, Artificial Sequence
  Antisense compound
ggtttcaaagtgttaaaacc

SEQ ID NO: 22130 - DNA, 20 bp, Artificial Sequence
  Antisense compound
aggtttcaaagtgttaaaac

SEQ ID NO: 22131 - DNA, 20 bp, Artificial Sequence
  Antisense compound
taggtttcaaagtgttaaaa

SEQ ID NO: 22132 - DNA, 20 bp, Artificial Sequence
  Antisense compound
ataggtttcaaagtgttaaa

SEQ ID NO: 22133 - DNA, 20 bp, Artificial Sequence
  Antisense compound
aataggtttcaaagtgttaa

SEQ ID NO: 22134 - DNA, 20 bp, Artificial Sequence
  Antisense compound
aaataggtttcaaagtgtta

SEQ ID NO: 22135 - DNA, 20 bp, Artificial Sequence
  Antisense compound
aaaataggtttcaaagtgtt

SEQ ID NO: 22136 - DNA, 20 bp, Artificial Sequence
  Antisense compound
aaaaataggtttcaaagtgt

SEQ ID NO: 22137 - DNA, 20 bp, Artificial Sequence
  Antisense compound
taaaaataggtttcaaagtg

SEQ ID NO: 22138 - DNA, 20 bp, Artificial Sequence
  Antisense compound
ttaaaaataggtttcaaagt

SEQ ID NO: 22139 - DNA, 20 bp, Artificial Sequence
  Antisense compound
cttaaaaataggtttcaaag

SEQ ID NO: 22140 - DNA, 20 bp, Artificial Sequence
  Antisense compound
acttaaaaataggtttcaaa

SEQ ID NO: 22141 - DNA, 20 bp, Artificial Sequence
  Antisense compound
aacttaaaaataggtttcaa

SEQ ID NO: 22142 - DNA, 20 bp, Artificial Sequence
  Antisense compound
caacttaaaaataggtttca

SEQ ID NO: 22143 - DNA, 20 bp, Artificial Sequence
  Antisense compound
gcaacttaaaaataggtttc

SEQ ID NO: 22144 - DNA, 20 bp, Artificial Sequence
  Antisense compound
ggcaacttaaaaataggttt

SEQ ID NO: 22145 - DNA, 20 bp, Artificial Sequence
  Antisense compound
aggcaacttaaaaataggtt

SEQ ID NO: 22146 - DNA, 20 bp, Artificial Sequence
  Antisense compound
gaggcaacttaaaaataggt

SEQ ID NO: 22147 - DNA, 20 bp, Artificial Sequence
  Antisense compound
agaggcaacttaaaaatagg

SEQ ID NO: 22148 - DNA, 20 bp, Artificial Sequence
  Antisense compound
aagaggcaacttaaaaatag

SEQ ID NO: 22149 - DNA, 20 bp, Artificial Sequence
  Antisense compound
caagaggcaacttaaaaata

SEQ ID NO: 22150 - DNA, 20 bp, Artificial Sequence
  Antisense compound
ccaagaggcaacttaaaaat

SEQ ID NO: 22151 - DNA, 20 bp, Artificial Sequence
  Antisense compound
accaagaggcaacttaaaaa

SEQ ID NO: 22152 - DNA, 20 bp, Artificial Sequence
  Antisense compound
taccaagaggcaacttaaaa

SEQ ID NO: 22153 - DNA, 20 bp, Artificial Sequence
  Antisense compound
ataccaagaggcaacttaaa

SEQ ID NO: 22154 - DNA, 20 bp, Artificial Sequence
  Antisense compound
aataccaagaggcaacttaa

SEQ ID NO: 22155 - DNA, 20 bp, Artificial Sequence
  Antisense compound
taataccaagaggcaactta

SEQ ID NO: 22156 - DNA, 20 bp, Artificial Sequence
  Antisense compound
ttaataccaagaggcaactt

SEQ ID NO: 22157 - DNA, 20 bp, Artificial Sequence
  Antisense compound
gttaataccaagaggcaact

SEQ ID NO: 22158 - DNA, 20 bp, Artificial Sequence
  Antisense compound
tgttaataccaagaggcaac

SEQ ID NO: 22159 - DNA, 20 bp, Artificial Sequence
  Antisense compound
atgttaataccaagaggcaa

SEQ ID NO: 22160 - DNA, 20 bp, Artificial Sequence
  Antisense compound
aatgttaataccaagaggca

SEQ ID NO: 22161 - DNA, 20 bp, Artificial Sequence
  Antisense compound
taatgttaataccaagaggc

SEQ ID NO: 22162 - DNA, 20 bp, Artificial Sequence
  Antisense compound
gtaatgttaataccaagagg

SEQ ID NO: 22163 - DNA, 20 bp, Artificial Sequence
  Antisense compound
tgtaatgttaataccaagag

SEQ ID NO: 22164 - DNA, 20 bp, Artificial Sequence
  Antisense compound
ttgtaatgttaataccaaga

SEQ ID NO: 22165 - DNA, 20 bp, Artificial Sequence
  Antisense compound
tttgtaatgttaataccaag

SEQ ID NO: 22166 - DNA, 20 bp, Artificial Sequence
  Antisense compound
atttgtaatgttaataccaa

SEQ ID NO: 22167 - DNA, 20 bp, Artificial Sequence
  Antisense compound
aatttgtaatgttaatacca

SEQ ID NO: 22168 - DNA, 20 bp, Artificial Sequence
  Antisense compound
aaatttgtaatgttaatacc

SEQ ID NO: 22169 - DNA, 20 bp, Artificial Sequence
  Antisense compound
aaaatttgtaatgttaatac

SEQ ID NO: 22170 - DNA, 20 bp, Artificial Sequence
  Antisense compound
taaaatttgtaatgttaata

SEQ ID NO: 22171 - DNA, 20 bp, Artificial Sequence
  Antisense compound
ctaaaatttgtaatgttaat

SEQ ID NO: 22172 - DNA, 20 bp, Artificial Sequence
  Antisense compound
tctaaaatttgtaatgttaa

SEQ ID NO: 22173 - DNA, 20 bp, Artificial Sequence
  Antisense compound
ctctaaaatttgtaatgtta

SEQ ID NO: 22174 - DNA, 20 bp, Artificial Sequence
  Antisense compound
gctctaaaatttgtaatgtt

SEQ ID NO: 22175 - DNA, 20 bp, Artificial Sequence
  Antisense compound
ggctctaaaatttgtaatgt

SEQ ID NO: 22176 - DNA, 20 bp, Artificial Sequence
  Antisense compound
tggctctaaaatttgtaatg

SEQ ID NO: 22177 - DNA, 20 bp, Artificial Sequence
  Antisense compound
atggctctaaaatttgtaat

SEQ ID NO: 22178 - DNA, 20 bp, Artificial Sequence
  Antisense compound
aatggctctaaaatttgtaa

SEQ ID NO: 22179 - DNA, 20 bp, Artificial Sequence
  Antisense compound
gaatggctctaaaatttgta

SEQ ID NO: 22180 - DNA, 20 bp, Artificial Sequence
  Antisense compound
agaatggctctaaaatttgt

SEQ ID NO: 22181 - DNA, 20 bp, Artificial Sequence
  Antisense compound
aagaatggctctaaaatttg

SEQ ID NO: 22182 - DNA, 20 bp, Artificial Sequence
  Antisense compound
taagaatggctctaaaattt

SEQ ID NO: 22183 - DNA, 20 bp, Artificial Sequence
  Antisense compound
gtaagaatggctctaaaatt

SEQ ID NO: 22184 - DNA, 20 bp, Artificial Sequence
  Antisense compound
tgtaagaatggctctaaaat

SEQ ID NO: 22185 - DNA, 20 bp, Artificial Sequence
  Antisense compound
ctgtaagaatggctctaaaa

SEQ ID NO: 22186 - DNA, 20 bp, Artificial Sequence
  Antisense compound
gctgtaagaatggctctaaa

SEQ ID NO: 22187 - DNA, 20 bp, Artificial Sequence
  Antisense compound
ggctgtaagaatggctctaa

SEQ ID NO: 22188 - DNA, 20 bp, Artificial Sequence
  Antisense compound
aggctgtaagaatggctcta

SEQ ID NO: 22189 - DNA, 20 bp, Artificial Sequence
  Antisense compound
aaggctgtaagaatggctct

SEQ ID NO: 22190 - DNA, 20 bp, Artificial Sequence
  Antisense compound
aaaggctgtaagaatggctc

SEQ ID NO: 22191 - DNA, 20 bp, Artificial Sequence
  Antisense compound
aaaaggctgtaagaatggct

SEQ ID NO: 22192 - DNA, 20 bp, Artificial Sequence
  Antisense compound
gaaaaggctgtaagaatggc

SEQ ID NO: 22193 - DNA, 20 bp, Artificial Sequence
  Antisense compound
tgaaaaggctgtaagaatgg

SEQ ID NO: 22194 - DNA, 20 bp, Artificial Sequence
  Antisense compound
gtgaaaaggctgtaagaatg

SEQ ID NO: 22195 - DNA, 20 bp, Artificial Sequence
  Antisense compound
ggtgaaaaggctgtaagaat

SEQ ID NO: 22196 - DNA, 20 bp, Artificial Sequence
  Antisense compound
aggtgaaaaggctgtaagaa

SEQ ID NO: 22197 - DNA, 20 bp, Artificial Sequence
  Antisense compound
caggtgaaaaggctgtaaga

SEQ ID NO: 22198 - DNA, 20 bp, Artificial Sequence
  Antisense compound
gcaggtgaaaaggctgtaag

SEQ ID NO: 22199 - DNA, 20 bp, Artificial Sequence
  Antisense compound
agcaggtgaaaaggctgtaa

SEQ ID NO: 22200 - DNA, 20 bp, Artificial Sequence
  Antisense compound
gagcaggtgaaaaggctgta

SEQ ID NO: 22201 - DNA, 20 bp, Artificial Sequence
  Antisense compound
tgagcaggtgaaaaggctgt

SEQ ID NO: 22202 - DNA, 20 bp, Artificial Sequence
  Antisense compound
ttgagcaggtgaaaaggctg

SEQ ID NO: 22203 - DNA, 20 bp, Artificial Sequence
  Antisense compound
cttgagcaggtgaaaaggct

SEQ ID NO: 22204 - DNA, 20 bp, Artificial Sequence
  Antisense compound
tcttgagcaggtgaaaaggc

SEQ ID NO: 22205 - DNA, 20 bp, Artificial Sequence
  Antisense compound
gtcttgagcaggtgaaaagg

SEQ ID NO: 22206 - DNA, 20 bp, Artificial Sequence
  Antisense compound
tgtcttgagcaggtgaaaag

SEQ ID NO: 22207 - DNA, 20 bp, Artificial Sequence
  Antisense compound
atgtcttgagcaggtgaaaa

SEQ ID NO: 22208 - DNA, 20 bp, Artificial Sequence
  Antisense compound
aatgtcttgagcaggtgaaa

SEQ ID NO: 22209 - DNA, 20 bp, Artificial Sequence
  Antisense compound
aaatgtcttgagcaggtgaa

SEQ ID NO: 22210 - DNA, 20 bp, Artificial Sequence
  Antisense compound
caaatgtcttgagcaggtga

SEQ ID NO: 22211 - DNA, 20 bp, Artificial Sequence
  Antisense compound
ccaaatgtcttgagcaggtg

SEQ ID NO: 22212 - DNA, 20 bp, Artificial Sequence
  Antisense compound
cccaaatgtcttgagcaggt

SEQ ID NO: 22213 - DNA, 20 bp, Artificial Sequence
  Antisense compound
ccccaaatgtcttgagcagg

SEQ ID NO: 22214 - DNA, 20 bp, Artificial Sequence
  Antisense compound
gccccaaatgtcttgagcag

SEQ ID NO: 22215 - DNA, 20 bp, Artificial Sequence
  Antisense compound
tgccccaaatgtcttgagca

SEQ ID NO: 22216 - DNA, 20 bp, Artificial Sequence
  Antisense compound
gtgccccaaatgtcttgagc

SEQ ID NO: 22217 - DNA, 20 bp, Artificial Sequence
  Antisense compound
cgtgccccaaatgtcttgag

SEQ ID NO: 22218 - DNA, 20 bp, Artificial Sequence
  Antisense compound
acgtgccccaaatgtcttga

SEQ ID NO: 22219 - DNA, 20 bp, Artificial Sequence
  Antisense compound
gacgtgccccaaatgtcttg

SEQ ID NO: 22220 - DNA, 20 bp, Artificial Sequence
  Antisense compound
tgacgtgccccaaatgtctt

SEQ ID NO: 22221 - DNA, 20 bp, Artificial Sequence
  Antisense compound
ctgacgtgccccaaatgtct

SEQ ID NO: 22222 - DNA, 20 bp, Artificial Sequence
  Antisense compound
gctgacgtgccccaaatgtc

SEQ ID NO: 22223 - DNA, 20 bp, Artificial Sequence
  Antisense compound
agctgacgtgccccaaatgt

SEQ ID NO: 22224 - DNA, 20 bp, Artificial Sequence
  Antisense compound
cagctgacgtgccccaaatg

SEQ ID NO: 22225 - DNA, 20 bp, Artificial Sequence
  Antisense compound
gcagctgacgtgccccaaat

SEQ ID NO: 22226 - DNA, 20 bp, Artificial Sequence
  Antisense compound
tgcagctgacgtgccccaaa

SEQ ID NO: 22227 - DNA, 20 bp, Artificial Sequence
  Antisense compound
ctgcagctgacgtgccccaa

SEQ ID NO: 22228 - DNA, 20 bp, Artificial Sequence
  Antisense compound
gctgcagctgacgtgcccca

SEQ ID NO: 22229 - DNA, 20 bp, Artificial Sequence
  Antisense compound
ggctgcagctgacgtgcccc

SEQ ID NO: 22230 - DNA, 20 bp, Artificial Sequence
  Antisense compound
aggctgcagctgacgtgccc

SEQ ID NO: 22231 - DNA, 20 bp, Artificial Sequence
  Antisense compound
taggctgcagctgacgtgcc

SEQ ID NO: 22232 - DNA, 20 bp, Artificial Sequence
  Antisense compound
ataggctgcagctgacgtgc

SEQ ID NO: 22233 - DNA, 20 bp, Artificial Sequence
  Antisense compound
aataggctgcagctgacgtg

SEQ ID NO: 22234 - DNA, 20 bp, Artificial Sequence
  Antisense compound
aaataggctgcagctgacgt

SEQ ID NO: 22235 - DNA, 20 bp, Artificial Sequence
  Antisense compound
aaaataggctgcagctgacg

SEQ ID NO: 22236 - DNA, 20 bp, Artificial Sequence
  Antisense compound
caaaataggctgcagctgac

SEQ ID NO: 22237 - DNA, 20 bp, Artificial Sequence
  Antisense compound
acaaaataggctgcagctga

SEQ ID NO: 22238 - DNA, 20 bp, Artificial Sequence
  Antisense compound
aacaaaataggctgcagctg

SEQ ID NO: 22239 - DNA, 20 bp, Artificial Sequence
  Antisense compound
caacaaaataggctgcagct

SEQ ID NO: 22240 - DNA, 20 bp, Artificial Sequence
  Antisense compound
ccaacaaaataggctgcagc

SEQ ID NO: 22241 - DNA, 20 bp, Artificial Sequence
  Antisense compound
gccaacaaaataggctgcag

SEQ ID NO: 22242 - DNA, 20 bp, Artificial Sequence
  Antisense compound
agccaacaaaataggctgca

SEQ ID NO: 22243 - DNA, 20 bp, Artificial Sequence
  Antisense compound
tagccaacaaaataggctgc

SEQ ID NO: 22244 - DNA, 20 bp, Artificial Sequence
  Antisense compound
atagccaacaaaataggctg

SEQ ID NO: 22245 - DNA, 20 bp, Artificial Sequence
  Antisense compound
aatagccaacaaaataggct

SEQ ID NO: 22246 - DNA, 20 bp, Artificial Sequence
  Antisense compound
aaatagccaacaaaataggc

SEQ ID NO: 22247 - DNA, 20 bp, Artificial Sequence
  Antisense compound
taaatagccaacaaaatagg

SEQ ID NO: 22248 - DNA, 20 bp, Artificial Sequence
  Antisense compound
ttaaatagccaacaaaatag

SEQ ID NO: 22249 - DNA, 20 bp, Artificial Sequence
  Antisense compound
tttaaatagccaacaaaata

SEQ ID NO: 22250 - DNA, 20 bp, Artificial Sequence
  Antisense compound
ctttaaatagccaacaaaat

SEQ ID NO: 22251 - DNA, 20 bp, Artificial Sequence
  Antisense compound
gctttaaatagccaacaaaa

SEQ ID NO: 22252 - DNA, 20 bp, Artificial Sequence
  Antisense compound
ggctttaaatagccaacaaa

SEQ ID NO: 22253 - DNA, 20 bp, Artificial Sequence
  Antisense compound
tggctttaaatagccaacaa

SEQ ID NO: 22254 - DNA, 20 bp, Artificial Sequence
  Antisense compound
ttggctttaaatagccaaca

SEQ ID NO: 22255 - DNA, 20 bp, Artificial Sequence
  Antisense compound
gttggctttaaatagccaac

SEQ ID NO: 22256 - DNA, 20 bp, Artificial Sequence
  Antisense compound
agttggctttaaatagccaa

SEQ ID NO: 22257 - DNA, 20 bp, Artificial Sequence
  Antisense compound
tagttggctttaaatagcca

SEQ ID NO: 22258 - DNA, 20 bp, Artificial Sequence
  Antisense compound
gtagttggctttaaatagcc

SEQ ID NO: 22259 - DNA, 20 bp, Artificial Sequence
  Antisense compound
tgtagttggctttaaatagc

SEQ ID NO: 22260 - DNA, 20 bp, Artificial Sequence
  Antisense compound
atgtagttggctttaaatag

SEQ ID NO: 22261 - DNA, 20 bp, Artificial Sequence
  Antisense compound
aatgtagttggctttaaata

SEQ ID NO: 22262 - DNA, 20 bp, Artificial Sequence
  Antisense compound
aaatgtagttggctttaaat

SEQ ID NO: 22263 - DNA, 20 bp, Artificial Sequence
  Antisense compound
taaatgtagttggctttaaa

SEQ ID NO: 22264 - DNA, 20 bp, Artificial Sequence
  Antisense compound
ataaatgtagttggctttaa

SEQ ID NO: 22265 - DNA, 20 bp, Artificial Sequence
  Antisense compound
cataaatgtagttggcttta

SEQ ID NO: 22266 - DNA, 20 bp, Artificial Sequence
  Antisense compound
gcataaatgtagttggcttt

SEQ ID NO: 22267 - DNA, 20 bp, Artificial Sequence
  Antisense compound
agcataaatgtagttggctt

SEQ ID NO: 22268 - DNA, 20 bp, Artificial Sequence
  Antisense compound
gagcataaatgtagttggct

SEQ ID NO: 22269 - DNA, 20 bp, Artificial Sequence
  Antisense compound
tgagcataaatgtagttggc

SEQ ID NO: 22270 - DNA, 20 bp, Artificial Sequence
  Antisense compound
ttgagcataaatgtagttgg

SEQ ID NO: 22271 - DNA, 20 bp, Artificial Sequence
  Antisense compound
cttgagcataaatgtagttg

SEQ ID NO: 22272 - DNA, 20 bp, Artificial Sequence
  Antisense compound
acttgagcataaatgtagtt

SEQ ID NO: 22273 - DNA, 20 bp, Artificial Sequence
  Antisense compound
tacttgagcataaatgtagt

SEQ ID NO: 22274 - DNA, 20 bp, Artificial Sequence
  Antisense compound
atacttgagcataaatgtag

SEQ ID NO: 22275 - DNA, 20 bp, Artificial Sequence
  Antisense compound
catacttgagcataaatgta

SEQ ID NO: 22276 - DNA, 20 bp, Artificial Sequence
  Antisense compound
tcatacttgagcataaatgt

SEQ ID NO: 22277 - DNA, 20 bp, Artificial Sequence
  Antisense compound
atcatacttgagcataaatg

SEQ ID NO: 22278 - DNA, 20 bp, Artificial Sequence
  Antisense compound
catcatacttgagcataaat

SEQ ID NO: 22279 - DNA, 20 bp, Artificial Sequence
  Antisense compound
tcatcatacttgagcataaa

SEQ ID NO: 22280 - DNA, 20 bp, Artificial Sequence
  Antisense compound
ttcatcatacttgagcataa

SEQ ID NO: 22281 - DNA, 20 bp, Artificial Sequence
  Antisense compound
tttcatcatacttgagcata

SEQ ID NO: 22282 - DNA, 20 bp, Artificial Sequence
  Antisense compound
ttttcatcatacttgagcat

SEQ ID NO: 22283 - DNA, 20 bp, Artificial Sequence
  Antisense compound
attttcatcatacttgagca

SEQ ID NO: 22284 - DNA, 20 bp, Artificial Sequence
  Antisense compound
cattttcatcatacttgagc

SEQ ID NO: 22285 - DNA, 20 bp, Artificial Sequence
  Antisense compound
ccattttcatcatacttgag

SEQ ID NO: 22286 - DNA, 20 bp, Artificial Sequence
  Antisense compound
accattttcatcatacttga

SEQ ID NO: 22287 - DNA, 20 bp, Artificial Sequence
  Antisense compound
taccattttcatcatacttg

SEQ ID NO: 22288 - DNA, 20 bp, Artificial Sequence
  Antisense compound
gtaccattttcatcatactt

SEQ ID NO: 22289 - DNA, 20 bp, Artificial Sequence
  Antisense compound
tgtaccattttcatcatact

SEQ ID NO: 22290 - DNA, 20 bp, Artificial Sequence
  Antisense compound
ttgtaccattttcatcatac

SEQ ID NO: 22291 - DNA, 20 bp, Artificial Sequence
  Antisense compound
attgtaccattttcatcata

SEQ ID NO: 22292 - DNA, 20 bp, Artificial Sequence
  Antisense compound
gattgtaccattttcatcat

SEQ ID NO: 22293 - DNA, 20 bp, Artificial Sequence
  Antisense compound
tgattgtaccattttcatca

SEQ ID NO: 22294 - DNA, 20 bp, Artificial Sequence
  Antisense compound
gtgattgtaccattttcatc

SEQ ID NO: 22295 - DNA, 20 bp, Artificial Sequence
  Antisense compound
tgtgattgtaccattttcat

SEQ ID NO: 22296 - DNA, 20 bp, Artificial Sequence
  Antisense compound
ctgtgattgtaccattttca

SEQ ID NO: 22297 - DNA, 20 bp, Artificial Sequence
  Antisense compound
tctgtgattgtaccattttc

SEQ ID NO: 22298 - DNA, 20 bp, Artificial Sequence
  Antisense compound
atctgtgattgtaccatttt

SEQ ID NO: 22299 - DNA, 20 bp, Artificial Sequence
  Antisense compound
catctgtgattgtaccattt

SEQ ID NO: 22300 - DNA, 20 bp, Artificial Sequence
  Antisense compound
gcatctgtgattgtaccatt

SEQ ID NO: 22301 - DNA, 20 bp, Artificial Sequence
  Antisense compound
agcatctgtgattgtaccat

SEQ ID NO: 22302 - DNA, 20 bp, Artificial Sequence
  Antisense compound
cagcatctgtgattgtacca

SEQ ID NO: 22303 - DNA, 20 bp, Artificial Sequence
  Antisense compound
acagcatctgtgattgtacc

SEQ ID NO: 22304 - DNA, 20 bp, Artificial Sequence
  Antisense compound
aacagcatctgtgattgtac

SEQ ID NO: 22305 - DNA, 20 bp, Artificial Sequence
  Antisense compound
caacagcatctgtgattgta

SEQ ID NO: 22306 - DNA, 20 bp, Artificial Sequence
  Antisense compound
tcaacagcatctgtgattgt

SEQ ID NO: 22307 - DNA, 20 bp, Artificial Sequence
  Antisense compound
atcaacagcatctgtgattg

SEQ ID NO: 22308 - DNA, 20 bp, Artificial Sequence
  Antisense compound
aatcaacagcatctgtgatt

SEQ ID NO: 22309 - DNA, 20 bp, Artificial Sequence
  Antisense compound
caatcaacagcatctgtgat

SEQ ID NO: 22310 - DNA, 20 bp, Artificial Sequence
  Antisense compound
acaatcaacagcatctgtga

SEQ ID NO: 22311 - DNA, 20 bp, Artificial Sequence
  Antisense compound
aacaatcaacagcatctgtg

SEQ ID NO: 22312 - DNA, 20 bp, Artificial Sequence
  Antisense compound
gaacaatcaacagcatctgt

SEQ ID NO: 22313 - DNA, 20 bp, Artificial Sequence
  Antisense compound
agaacaatcaacagcatctg

SEQ ID NO: 22314 - DNA, 20 bp, Artificial Sequence
  Antisense compound
gagaacaatcaacagcatct

SEQ ID NO: 22315 - DNA, 20 bp, Artificial Sequence
  Antisense compound
tgagaacaatcaacagcatc

SEQ ID NO: 22316 - DNA, 20 bp, Artificial Sequence
  Antisense compound
ttgagaacaatcaacagcat

SEQ ID NO: 22317 - DNA, 20 bp, Artificial Sequence
  Antisense compound
tttgagaacaatcaacagca

SEQ ID NO: 22318 - DNA, 20 bp, Artificial Sequence
  Antisense compound
ttttgagaacaatcaacagc

SEQ ID NO: 22319 - DNA, 20 bp, Artificial Sequence
  Antisense compound
attttgagaacaatcaacag

SEQ ID NO: 22320 - DNA, 20 bp, Artificial Sequence
  Antisense compound
gattttgagaacaatcaaca

SEQ ID NO: 22321 - DNA, 20 bp, Artificial Sequence
  Antisense compound
ggattttgagaacaatcaac

SEQ ID NO: 22322 - DNA, 20 bp, Artificial Sequence
  Antisense compound
tggattttgagaacaatcaa

SEQ ID NO: 22323 - DNA, 20 bp, Artificial Sequence
  Antisense compound
gtggattttgagaacaatca

SEQ ID NO: 22324 - DNA, 20 bp, Artificial Sequence
  Antisense compound
agtggattttgagaacaatc

SEQ ID NO: 22325 - DNA, 20 bp, Artificial Sequence
  Antisense compound
aagtggattttgagaacaat

SEQ ID NO: 22326 - DNA, 20 bp, Artificial Sequence
  Antisense compound
caagtggattttgagaacaa

SEQ ID NO: 22327 - DNA, 20 bp, Artificial Sequence
  Antisense compound
gcaagtggattttgagaaca

SEQ ID NO: 22328 - DNA, 20 bp, Artificial Sequence
  Antisense compound
agcaagtggattttgagaac

SEQ ID NO: 22329 - DNA, 20 bp, Artificial Sequence
  Antisense compound
cagcaagtggattttgagaa

SEQ ID NO: 22330 - DNA, 20 bp, Artificial Sequence
  Antisense compound
tcagcaagtggattttgaga

SEQ ID NO: 22331 - DNA, 20 bp, Artificial Sequence
  Antisense compound
ttcagcaagtggattttgag

SEQ ID NO: 22332 - DNA, 20 bp, Artificial Sequence
  Antisense compound
gttcagcaagtggattttga

SEQ ID NO: 22333 - DNA, 20 bp, Artificial Sequence
  Antisense compound
agttcagcaagtggattttg

SEQ ID NO: 22334 - DNA, 20 bp, Artificial Sequence
  Antisense compound
gagttcagcaagtggatttt

SEQ ID NO: 22335 - DNA, 20 bp, Artificial Sequence
  Antisense compound
tgagttcagcaagtggattt

SEQ ID NO: 22336 - DNA, 20 bp, Artificial Sequence
  Antisense compound
ttgagttcagcaagtggatt

SEQ ID NO: 22337 - DNA, 20 bp, Artificial Sequence
  Antisense compound
tttgagttcagcaagtggat

SEQ ID NO: 22338 - DNA, 20 bp, Artificial Sequence
  Antisense compound
atttgagttcagcaagtgga

SEQ ID NO: 22339 - DNA, 20 bp, Artificial Sequence
  Antisense compound
catttgagttcagcaagtgg

SEQ ID NO: 22340 - DNA, 20 bp, Artificial Sequence
  Antisense compound
gcatttgagttcagcaagtg

SEQ ID NO: 22341 - DNA, 20 bp, Artificial Sequence
  Antisense compound
agcatttgagttcagcaagt

SEQ ID NO: 22342 - DNA, 20 bp, Artificial Sequence
  Antisense compound
gagcatttgagttcagcaag

SEQ ID NO: 22343 - DNA, 20 bp, Artificial Sequence
  Antisense compound
agagcatttgagttcagcaa

SEQ ID NO: 22344 - DNA, 20 bp, Artificial Sequence
  Antisense compound
cagagcatttgagttcagca

SEQ ID NO: 22345 - DNA, 20 bp, Artificial Sequence
  Antisense compound
acagagcatttgagttcagc

SEQ ID NO: 22346 - DNA, 20 bp, Artificial Sequence
  Antisense compound
aacagagcatttgagttcag

SEQ ID NO: 22347 - DNA, 20 bp, Artificial Sequence
  Antisense compound
taacagagcatttgagttca

SEQ ID NO: 22348 - DNA, 20 bp, Artificial Sequence
  Antisense compound
ttaacagagcatttgagttc

SEQ ID NO: 22349 - DNA, 20 bp, Artificial Sequence
  Antisense compound
cttaacagagcatttgagtt

SEQ ID NO: 22350 - DNA, 20 bp, Artificial Sequence
  Antisense compound
tcttaacagagcatttgagt

SEQ ID NO: 22351 - DNA, 20 bp, Artificial Sequence
  Antisense compound
ctcttaacagagcatttgag

SEQ ID NO: 22352 - DNA, 20 bp, Artificial Sequence
  Antisense compound
gctcttaacagagcatttga

SEQ ID NO: 22353 - DNA, 20 bp, Artificial Sequence
  Antisense compound
agctcttaacagagcatttg

SEQ ID NO: 22354 - DNA, 20 bp, Artificial Sequence
  Antisense compound
aagctcttaacagagcattt

SEQ ID NO: 22355 - DNA, 20 bp, Artificial Sequence
  Antisense compound
aaagctcttaacagagcatt

SEQ ID NO: 22356 - DNA, 20 bp, Artificial Sequence
  Antisense compound
caaagctcttaacagagcat

SEQ ID NO: 22357 - DNA, 20 bp, Artificial Sequence
  Antisense compound
tcaaagctcttaacagagca

SEQ ID NO: 22358 - DNA, 20 bp, Artificial Sequence
  Antisense compound
ctcaaagctcttaacagagc

SEQ ID NO: 22359 - DNA, 20 bp, Artificial Sequence
  Antisense compound
tctcaaagctcttaacagag

SEQ ID NO: 22360 - DNA, 20 bp, Artificial Sequence
  Antisense compound
atctcaaagctcttaacaga

SEQ ID NO: 22361 - DNA, 20 bp, Artificial Sequence
  Antisense compound
aatctcaaagctcttaacag

SEQ ID NO: 22362 - DNA, 20 bp, Artificial Sequence
  Antisense compound
caatctcaaagctcttaaca

SEQ ID NO: 22363 - DNA, 20 bp, Artificial Sequence
  Antisense compound
tcaatctcaaagctcttaac

SEQ ID NO: 22364 - DNA, 20 bp, Artificial Sequence
  Antisense compound
gtcaatctcaaagctcttaa

SEQ ID NO: 22365 - DNA, 20 bp, Artificial Sequence
  Antisense compound
tgtcaatctcaaagctctta

SEQ ID NO: 22366 - DNA, 20 bp, Artificial Sequence
  Antisense compound
ttgtcaatctcaaagctctt

SEQ ID NO: 22367 - DNA, 20 bp, Artificial Sequence
  Antisense compound
tttgtcaatctcaaagctct

SEQ ID NO: 22368 - DNA, 20 bp, Artificial Sequence
  Antisense compound
ctttgtcaatctcaaagctc

SEQ ID NO: 22369 - DNA, 20 bp, Artificial Sequence
  Antisense compound
cctttgtcaatctcaaagct

SEQ ID NO: 22370 - DNA, 20 bp, Artificial Sequence
  Antisense compound
tcctttgtcaatctcaaagc

SEQ ID NO: 22371 - DNA, 20 bp, Artificial Sequence
  Antisense compound
ttcctttgtcaatctcaaag

SEQ ID NO: 22372 - DNA, 20 bp, Artificial Sequence
  Antisense compound
attcctttgtcaatctcaaa

SEQ ID NO: 22373 - DNA, 20 bp, Artificial Sequence
  Antisense compound
aattcctttgtcaatctcaa

SEQ ID NO: 22374 - DNA, 20 bp, Artificial Sequence
  Antisense compound
aaattcctttgtcaatctca

SEQ ID NO: 22375 - DNA, 20 bp, Artificial Sequence
  Antisense compound
taaattcctttgtcaatctc

SEQ ID NO: 22376 - DNA, 20 bp, Artificial Sequence
  Antisense compound
gtaaattcctttgtcaatct

SEQ ID NO: 22377 - DNA, 20 bp, Artificial Sequence
  Antisense compound
ggtaaattcctttgtcaatc

SEQ ID NO: 22378 - DNA, 20 bp, Artificial Sequence
  Antisense compound
tggtaaattcctttgtcaat

SEQ ID NO: 22379 - DNA, 20 bp, Artificial Sequence
  Antisense compound
ctggtaaattcctttgtcaa

SEQ ID NO: 22380 - DNA, 20 bp, Artificial Sequence
  Antisense compound
tctggtaaattcctttgtca

SEQ ID NO: 22381 - DNA, 20 bp, Artificial Sequence
  Antisense compound
gtctggtaaattcctttgtc

SEQ ID NO: 22382 - DNA, 20 bp, Artificial Sequence
  Antisense compound
ggtctggtaaattcctttgt

SEQ ID NO: 22383 - DNA, 20 bp, Artificial Sequence
  Antisense compound
aggtctggtaaattcctttg

SEQ ID NO: 22384 - DNA, 20 bp, Artificial Sequence
  Antisense compound
gaggtctggtaaattccttt

SEQ ID NO: 22385 - DNA, 20 bp, Artificial Sequence
  Antisense compound
agaggtctggtaaattcctt

SEQ ID NO: 22386 - DNA, 20 bp, Artificial Sequence
  Antisense compound
tagaggtctggtaaattcct

SEQ ID NO: 22387 - DNA, 20 bp, Artificial Sequence
  Antisense compound
ttagaggtctggtaaattcc

SEQ ID NO: 22388 - DNA, 20 bp, Artificial Sequence
  Antisense compound
attagaggtctggtaaattc

SEQ ID NO: 22389 - DNA, 20 bp, Artificial Sequence
  Antisense compound
aattagaggtctggtaaatt

SEQ ID NO: 22390 - DNA, 20 bp, Artificial Sequence
  Antisense compound
aaattagaggtctggtaaat

SEQ ID NO: 22391 - DNA, 20 bp, Artificial Sequence
  Antisense compound
gaaattagaggtctggtaaa

SEQ ID NO: 22392 - DNA, 20 bp, Artificial Sequence
  Antisense compound
tgaaattagaggtctggtaa

SEQ ID NO: 22393 - DNA, 20 bp, Artificial Sequence
  Antisense compound
ctgaaattagaggtctggta

SEQ ID NO: 22394 - DNA, 20 bp, Artificial Sequence
  Antisense compound
cctgaaattagaggtctggt

SEQ ID NO: 22395 - DNA, 20 bp, Artificial Sequence
  Antisense compound
ccctgaaattagaggtctgg

SEQ ID NO: 22396 - DNA, 20 bp, Artificial Sequence
  Antisense compound
accctgaaattagaggtctg

SEQ ID NO: 22397 - DNA, 20 bp, Artificial Sequence
  Antisense compound
aaccctgaaattagaggtct

SEQ ID NO: 22398 - DNA, 20 bp, Artificial Sequence
  Antisense compound
caaccctgaaattagaggtc

SEQ ID NO: 22399 - DNA, 20 bp, Artificial Sequence
  Antisense compound
acaaccctgaaattagaggt

SEQ ID NO: 22400 - DNA, 20 bp, Artificial Sequence
  Antisense compound
aacaaccctgaaattagagg

SEQ ID NO: 22401 - DNA, 20 bp, Artificial Sequence
  Antisense compound
gaacaaccctgaaattagag

SEQ ID NO: 22402 - DNA, 20 bp, Artificial Sequence
  Antisense compound
ggaacaaccctgaaattaga

SEQ ID NO: 22403 - DNA, 20 bp, Artificial Sequence
  Antisense compound
gggaacaaccctgaaattag

SEQ ID NO: 22404 - DNA, 20 bp, Artificial Sequence
  Antisense compound
agggaacaaccctgaaatta

SEQ ID NO: 22405 - DNA, 20 bp, Artificial Sequence
  Antisense compound
gagggaacaaccctgaaatt

SEQ ID NO: 22406 - DNA, 20 bp, Artificial Sequence
  Antisense compound
tgagggaacaaccctgaaat

SEQ ID NO: 22407 - DNA, 20 bp, Artificial Sequence
  Antisense compound
ctgagggaacaaccctgaaa

SEQ ID NO: 22408 - DNA, 20 bp, Artificial Sequence
  Antisense compound
cctgagggaacaaccctgaa

SEQ ID NO: 22409 - DNA, 20 bp, Artificial Sequence
  Antisense compound
tcctgagggaacaaccctga

SEQ ID NO: 22410 - DNA, 20 bp, Artificial Sequence
  Antisense compound
ctcctgagggaacaaccctg

SEQ ID NO: 22411 - DNA, 20 bp, Artificial Sequence
  Antisense compound
tctcctgagggaacaaccct

SEQ ID NO: 22412 - DNA, 20 bp, Artificial Sequence
  Antisense compound
atctcctgagggaacaaccc

SEQ ID NO: 22413 - DNA, 20 bp, Artificial Sequence
  Antisense compound
catctcctgagggaacaacc

SEQ ID NO: 22414 - DNA, 20 bp, Artificial Sequence
  Antisense compound
acatctcctgagggaacaac

SEQ ID NO: 22415 - DNA, 20 bp, Artificial Sequence
  Antisense compound
aacatctcctgagggaacaa

SEQ ID NO: 22416 - DNA, 20 bp, Artificial Sequence
  Antisense compound
caacatctcctgagggaaca

SEQ ID NO: 22417 - DNA, 20 bp, Artificial Sequence
  Antisense compound
acaacatctcctgagggaac

SEQ ID NO: 22418 - DNA, 20 bp, Artificial Sequence
  Antisense compound
cacaacatctcctgagggaa

SEQ ID NO: 22419 - DNA, 20 bp, Artificial Sequence
  Antisense compound
tcacaacatctcctgaggga

SEQ ID NO: 22420 - DNA, 20 bp, Artificial Sequence
  Antisense compound
ctcacaacatctcctgaggg

SEQ ID NO: 22421 - DNA, 20 bp, Artificial Sequence
  Antisense compound
tctcacaacatctcctgagg

SEQ ID NO: 22422 - DNA, 20 bp, Artificial Sequence
  Antisense compound
atctcacaacatctcctgag

SEQ ID NO: 22423 - DNA, 20 bp, Artificial Sequence
  Antisense compound
aatctcacaacatctcctga

SEQ ID NO: 22424 - DNA, 20 bp, Artificial Sequence
  Antisense compound
gaatctcacaacatctcctg

SEQ ID NO: 22425 - DNA, 20 bp, Artificial Sequence
  Antisense compound
ggaatctcacaacatctcct

SEQ ID NO: 22426 - DNA, 20 bp, Artificial Sequence
  Antisense compound
gggaatctcacaacatctcc

SEQ ID NO: 22427 - DNA, 20 bp, Artificial Sequence
  Antisense compound
agggaatctcacaacatctc

SEQ ID NO: 22428 - DNA, 20 bp, Artificial Sequence
  Antisense compound
tagggaatctcacaacatct

SEQ ID NO: 22429 - DNA, 20 bp, Artificial Sequence
  Antisense compound
ttagggaatctcacaacatc

SEQ ID NO: 22430 - DNA, 20 bp, Artificial Sequence
  Antisense compound
attagggaatctcacaacat

SEQ ID NO: 22431 - DNA, 20 bp, Artificial Sequence
  Antisense compound
tattagggaatctcacaaca

SEQ ID NO: 22432 - DNA, 20 bp, Artificial Sequence
  Antisense compound
atattagggaatctcacaac

SEQ ID NO: 22433 - DNA, 20 bp, Artificial Sequence
  Antisense compound
aatattagggaatctcacaa

SEQ ID NO: 22434 - DNA, 20 bp, Artificial Sequence
  Antisense compound
taatattagggaatctcaca

SEQ ID NO: 22435 - DNA, 20 bp, Artificial Sequence
  Antisense compound
gtaatattagggaatctcac

SEQ ID NO: 22436 - DNA, 20 bp, Artificial Sequence
  Antisense compound
tgtaatattagggaatctca

SEQ ID NO: 22437 - DNA, 20 bp, Artificial Sequence
  Antisense compound
ttgtaatattagggaatctc

SEQ ID NO: 22438 - DNA, 20 bp, Artificial Sequence
  Antisense compound
tttgtaatattagggaatct

SEQ ID NO: 22439 - DNA, 20 bp, Artificial Sequence
  Antisense compound
gtttgtaatattagggaatc

SEQ ID NO: 22440 - DNA, 20 bp, Artificial Sequence
  Antisense compound
agtttgtaatattagggaat

SEQ ID NO: 22441 - DNA, 20 bp, Artificial Sequence
  Antisense compound
aagtttgtaatattagggaa

SEQ ID NO: 22442 - DNA, 20 bp, Artificial Sequence
  Antisense compound
caagtttgtaatattaggga

SEQ ID NO: 22443 - DNA, 20 bp, Artificial Sequence
  Antisense compound
acaagtttgtaatattaggg

SEQ ID NO: 22444 - DNA, 20 bp, Artificial Sequence
  Antisense compound
cacaagtttgtaatattagg

SEQ ID NO: 22445 - DNA, 20 bp, Artificial Sequence
  Antisense compound
acacaagtttgtaatattag

SEQ ID NO: 22446 - DNA, 20 bp, Artificial Sequence
  Antisense compound
gacacaagtttgtaatatta

SEQ ID NO: 22447 - DNA, 20 bp, Artificial Sequence
  Antisense compound
ggacacaagtttgtaatatt

SEQ ID NO: 22448 - DNA, 20 bp, Artificial Sequence
  Antisense compound
aggacacaagtttgtaatat

SEQ ID NO: 22449 - DNA, 20 bp, Artificial Sequence
  Antisense compound
aaggacacaagtttgtaata

SEQ ID NO: 22450 - DNA, 20 bp, Artificial Sequence
  Antisense compound
aaaggacacaagtttgtaat

SEQ ID NO: 22451 - DNA, 20 bp, Artificial Sequence
  Antisense compound
aaaaggacacaagtttgtaa

SEQ ID NO: 22452 - DNA, 20 bp, Artificial Sequence
  Antisense compound
caaaaggacacaagtttgta

SEQ ID NO: 22453 - DNA, 20 bp, Artificial Sequence
  Antisense compound
ccaaaaggacacaagtttgt

SEQ ID NO: 22454 - DNA, 20 bp, Artificial Sequence
  Antisense compound
tccaaaaggacacaagtttg

SEQ ID NO: 22455 - DNA, 20 bp, Artificial Sequence
  Antisense compound
ctccaaaaggacacaagttt

SEQ ID NO: 22456 - DNA, 20 bp, Artificial Sequence
  Antisense compound
tctccaaaaggacacaagtt

SEQ ID NO: 22457 - DNA, 20 bp, Artificial Sequence
  Antisense compound
ctctccaaaaggacacaagt

SEQ ID NO: 22458 - DNA, 20 bp, Artificial Sequence
  Antisense compound
cctctccaaaaggacacaag

SEQ ID NO: 22459 - DNA, 20 bp, Artificial Sequence
  Antisense compound
acctctccaaaaggacacaa

SEQ ID NO: 22460 - DNA, 20 bp, Artificial Sequence
  Antisense compound
aacctctccaaaaggacaca

SEQ ID NO: 22461 - DNA, 20 bp, Artificial Sequence
  Antisense compound
aaacctctccaaaaggacac

SEQ ID NO: 22462 - DNA, 20 bp, Artificial Sequence
  Antisense compound
aaaacctctccaaaaggaca

SEQ ID NO: 22463 - DNA, 20 bp, Artificial Sequence
  Antisense compound
aaaaacctctccaaaaggac

SEQ ID NO: 22464 - DNA, 20 bp, Artificial Sequence
  Antisense compound
taaaaacctctccaaaagga

SEQ ID NO: 22465 - DNA, 20 bp, Artificial Sequence
  Antisense compound
ttaaaaacctctccaaaagg

SEQ ID NO: 22466 - DNA, 20 bp, Artificial Sequence
  Antisense compound
attaaaaacctctccaaaag

SEQ ID NO: 22467 - DNA, 20 bp, Artificial Sequence
  Antisense compound
cattaaaaacctctccaaaa

SEQ ID NO: 22468 - DNA, 20 bp, Artificial Sequence
  Antisense compound
gcattaaaaacctctccaaa

SEQ ID NO: 22469 - DNA, 20 bp, Artificial Sequence
  Antisense compound
agcattaaaaacctctccaa

SEQ ID NO: 22470 - DNA, 20 bp, Artificial Sequence
  Antisense compound
tagcattaaaaacctctcca

SEQ ID NO: 22471 - DNA, 20 bp, Artificial Sequence
  Antisense compound
gtagcattaaaaacctctcc

SEQ ID NO: 22472 - DNA, 20 bp, Artificial Sequence
  Antisense compound
agtagcattaaaaacctctc

SEQ ID NO: 22473 - DNA, 20 bp, Artificial Sequence
  Antisense compound
tagtagcattaaaaacctct

SEQ ID NO: 22474 - DNA, 20 bp, Artificial Sequence
  Antisense compound
ttagtagcattaaaaacctc

SEQ ID NO: 22475 - DNA, 20 bp, Artificial Sequence
  Antisense compound
tttagtagcattaaaaacct

SEQ ID NO: 22476 - DNA, 20 bp, Artificial Sequence
  Antisense compound
atttagtagcattaaaaacc

SEQ ID NO: 22477 - DNA, 20 bp, Artificial Sequence
  Antisense compound
aatttagtagcattaaaaac

SEQ ID NO: 22478 - DNA, 20 bp, Artificial Sequence
  Antisense compound
gaatttagtagcattaaaaa

SEQ ID NO: 22479 - DNA, 20 bp, Artificial Sequence
  Antisense compound
ggaatttagtagcattaaaa

SEQ ID NO: 22480 - DNA, 20 bp, Artificial Sequence
  Antisense compound
gggaatttagtagcattaaa

SEQ ID NO: 22481 - DNA, 20 bp, Artificial Sequence
  Antisense compound
agggaatttagtagcattaa

SEQ ID NO: 22482 - DNA, 20 bp, Artificial Sequence
  Antisense compound
aagggaatttagtagcatta

SEQ ID NO: 22483 - DNA, 20 bp, Artificial Sequence
  Antisense compound
gaagggaatttagtagcatt

SEQ ID NO: 22484 - DNA, 20 bp, Artificial Sequence
  Antisense compound
agaagggaatttagtagcat

SEQ ID NO: 22485 - DNA, 20 bp, Artificial Sequence
  Antisense compound
cagaagggaatttagtagca

SEQ ID NO: 22486 - DNA, 20 bp, Artificial Sequence
  Antisense compound
acagaagggaatttagtagc

SEQ ID NO: 22487 - DNA, 20 bp, Artificial Sequence
  Antisense compound
gacagaagggaatttagtag

SEQ ID NO: 22488 - DNA, 20 bp, Artificial Sequence
  Antisense compound
agacagaagggaatttagta

SEQ ID NO: 22489 - DNA, 20 bp, Artificial Sequence
  Antisense compound
tagacagaagggaatttagt

SEQ ID NO: 22490 - DNA, 20 bp, Artificial Sequence
  Antisense compound
atagacagaagggaatttag

SEQ ID NO: 22491 - DNA, 20 bp, Artificial Sequence
  Antisense compound
catagacagaagggaattta

SEQ ID NO: 22492 - DNA, 20 bp, Artificial Sequence
  Antisense compound
gcatagacagaagggaattt

SEQ ID NO: 22493 - DNA, 20 bp, Artificial Sequence
  Antisense compound
tgcatagacagaagggaatt

SEQ ID NO: 22494 - DNA, 20 bp, Artificial Sequence
  Antisense compound
atgcatagacagaagggaat

SEQ ID NO: 22495 - DNA, 20 bp, Artificial Sequence
  Antisense compound
catgcatagacagaagggaa

SEQ ID NO: 22496 - DNA, 20 bp, Artificial Sequence
  Antisense compound
ccatgcatagacagaaggga

SEQ ID NO: 22497 - DNA, 20 bp, Artificial Sequence
  Antisense compound
cccatgcatagacagaaggg

SEQ ID NO: 22498 - DNA, 20 bp, Artificial Sequence
  Antisense compound
tcccatgcatagacagaagg

SEQ ID NO: 22499 - DNA, 20 bp, Artificial Sequence
  Antisense compound
ctcccatgcatagacagaag

SEQ ID NO: 22500 - DNA, 20 bp, Artificial Sequence
  Antisense compound
tctcccatgcatagacagaa

SEQ ID NO: 22501 - DNA, 20 bp, Artificial Sequence
  Antisense compound
ctctcccatgcatagacaga

SEQ ID NO: 22502 - DNA, 20 bp, Artificial Sequence
  Antisense compound
tctctcccatgcatagacag

SEQ ID NO: 22503 - DNA, 20 bp, Artificial Sequence
  Antisense compound
ttctctcccatgcatagaca

SEQ ID NO: 22504 - DNA, 20 bp, Artificial Sequence
  Antisense compound
tttctctcccatgcatagac

SEQ ID NO: 22505 - DNA, 20 bp, Artificial Sequence
  Antisense compound
ttttctctcccatgcataga

SEQ ID NO: 22506 - DNA, 20 bp, Artificial Sequence
  Antisense compound
tttttctctcccatgcatag

SEQ ID NO: 22507 - DNA, 20 bp, Artificial Sequence
  Antisense compound
ttttttctctcccatgcata

SEQ ID NO: 22508 - DNA, 20 bp, Artificial Sequence
  Antisense compound
tttttttctctcccatgcat

SEQ ID NO: 22509 - DNA, 20 bp, Artificial Sequence
  Antisense compound
ttttttttctctcccatgca

SEQ ID NO: 22510 - DNA, 20 bp, Artificial Sequence
  Antisense compound
attttttttctctcccatgc

SEQ ID NO: 22511 - DNA, 20 bp, Artificial Sequence
  Antisense compound
aattttttttctctcccatg

SEQ ID NO: 22512 - DNA, 20 bp, Artificial Sequence
  Antisense compound
aaattttttttctctcccat

SEQ ID NO: 22513 - DNA, 20 bp, Artificial Sequence
  Antisense compound
gaaattttttttctctccca

SEQ ID NO: 22514 - DNA, 20 bp, Artificial Sequence
  Antisense compound
agaaattttttttctctccc

SEQ ID NO: 22515 - DNA, 20 bp, Artificial Sequence
  Antisense compound
tagaaattttttttctctcc

SEQ ID NO: 22516 - DNA, 20 bp, Artificial Sequence
  Antisense compound
ttagaaattttttttctctc

SEQ ID NO: 22517 - DNA, 20 bp, Artificial Sequence
  Antisense compound
attagaaattttttttctct

SEQ ID NO: 22518 - DNA, 20 bp, Artificial Sequence
  Antisense compound
aattagaaattttttttctc

SEQ ID NO: 22519 - DNA, 20 bp, Artificial Sequence
  Antisense compound
caattagaaattttttttct

SEQ ID NO: 22520 - DNA, 20 bp, Artificial Sequence
  Antisense compound
acaattagaaattttttttc

SEQ ID NO: 22521 - DNA, 20 bp, Artificial Sequence
  Antisense compound
cacaattagaaatttttttt

SEQ ID NO: 22522 - DNA, 20 bp, Artificial Sequence
  Antisense compound
acacaattagaaattttttt

SEQ ID NO: 22523 - DNA, 20 bp, Artificial Sequence
  Antisense compound
aacacaattagaaatttttt

SEQ ID NO: 22524 - DNA, 20 bp, Artificial Sequence
  Antisense compound
caacacaattagaaattttt

SEQ ID NO: 22525 - DNA, 20 bp, Artificial Sequence
  Antisense compound
gcaacacaattagaaatttt

SEQ ID NO: 22526 - DNA, 20 bp, Artificial Sequence
  Antisense compound
agcaacacaattagaaattt

SEQ ID NO: 22527 - DNA, 20 bp, Artificial Sequence
  Antisense compound
cagcaacacaattagaaatt

SEQ ID NO: 22528 - DNA, 20 bp, Artificial Sequence
  Antisense compound
tcagcaacacaattagaaat

SEQ ID NO: 22529 - DNA, 20 bp, Artificial Sequence
  Antisense compound
atcagcaacacaattagaaa

SEQ ID NO: 22530 - DNA, 20 bp, Artificial Sequence
  Antisense compound
aatcagcaacacaattagaa

SEQ ID NO: 22531 - DNA, 20 bp, Artificial Sequence
  Antisense compound
taatcagcaacacaattaga

SEQ ID NO: 22532 - DNA, 20 bp, Artificial Sequence
  Antisense compound
gtaatcagcaacacaattag

SEQ ID NO: 22533 - DNA, 20 bp, Artificial Sequence
  Antisense compound
agtaatcagcaacacaatta

SEQ ID NO: 22534 - DNA, 20 bp, Artificial Sequence
  Antisense compound
gagtaatcagcaacacaatt

SEQ ID NO: 22535 - DNA, 20 bp, Artificial Sequence
  Antisense compound
agagtaatcagcaacacaat

SEQ ID NO: 22536 - DNA, 20 bp, Artificial Sequence
  Antisense compound
cagagtaatcagcaacacaa

SEQ ID NO: 22537 - DNA, 20 bp, Artificial Sequence
  Antisense compound
acagagtaatcagcaacaca

SEQ ID NO: 22538 - DNA, 20 bp, Artificial Sequence
  Antisense compound
cacagagtaatcagcaacac

SEQ ID NO: 22539 - DNA, 20 bp, Artificial Sequence
  Antisense compound
gcacagagtaatcagcaaca

SEQ ID NO: 22540 - DNA, 20 bp, Artificial Sequence
  Antisense compound
agcacagagtaatcagcaac

SEQ ID NO: 22541 - DNA, 20 bp, Artificial Sequence
  Antisense compound
gagcacagagtaatcagcaa

SEQ ID NO: 22542 - DNA, 20 bp, Artificial Sequence
  Antisense compound
agagcacagagtaatcagca

SEQ ID NO: 22543 - DNA, 20 bp, Artificial Sequence
  Antisense compound
tagagcacagagtaatcagc

SEQ ID NO: 22544 - DNA, 20 bp, Artificial Sequence
  Antisense compound
gtagagcacagagtaatcag

SEQ ID NO: 22545 - DNA, 20 bp, Artificial Sequence
  Antisense compound
tgtagagcacagagtaatca

SEQ ID NO: 22546 - DNA, 20 bp, Artificial Sequence
  Antisense compound
ttgtagagcacagagtaatc

SEQ ID NO: 22547 - DNA, 20 bp, Artificial Sequence
  Antisense compound
gttgtagagcacagagtaat

SEQ ID NO: 22548 - DNA, 20 bp, Artificial Sequence
  Antisense compound
agttgtagagcacagagtaa

SEQ ID NO: 22549 - DNA, 20 bp, Artificial Sequence
  Antisense compound
gagttgtagagcacagagta

SEQ ID NO: 22550 - DNA, 20 bp, Artificial Sequence
  Antisense compound
tgagttgtagagcacagagt

SEQ ID NO: 22551 - DNA, 20 bp, Artificial Sequence
  Antisense compound
ttgagttgtagagcacagag

SEQ ID NO: 22552 - DNA, 20 bp, Artificial Sequence
  Antisense compound
gttgagttgtagagcacaga

SEQ ID NO: 22553 - DNA, 20 bp, Artificial Sequence
  Antisense compound
tgttgagttgtagagcacag

SEQ ID NO: 22554 - DNA, 20 bp, Artificial Sequence
  Antisense compound
atgttgagttgtagagcaca

SEQ ID NO: 22555 - DNA, 20 bp, Artificial Sequence
  Antisense compound
aatgttgagttgtagagcac

SEQ ID NO: 22556 - DNA, 20 bp, Artificial Sequence
  Antisense compound
aaatgttgagttgtagagca

SEQ ID NO: 22557 - DNA, 20 bp, Artificial Sequence
  Antisense compound
aaaatgttgagttgtagagc

SEQ ID NO: 22558 - DNA, 20 bp, Artificial Sequence
  Antisense compound
aaaaatgttgagttgtagag

SEQ ID NO: 22559 - DNA, 20 bp, Artificial Sequence
  Antisense compound
aaaaaatgttgagttgtaga

SEQ ID NO: 22560 - DNA, 20 bp, Artificial Sequence
  Antisense compound
aaaaaaatgttgagttgtag

SEQ ID NO: 22561 - DNA, 20 bp, Artificial Sequence
  Antisense compound
gaaaaaaatgttgagttgta

SEQ ID NO: 22562 - DNA, 20 bp, Artificial Sequence
  Antisense compound
tgaaaaaaatgttgagttgt

SEQ ID NO: 22563 - DNA, 20 bp, Artificial Sequence
  Antisense compound
ttgaaaaaaatgttgagttg

SEQ ID NO: 22564 - DNA, 20 bp, Artificial Sequence
  Antisense compound
gttgaaaaaaatgttgagtt

SEQ ID NO: 22565 - DNA, 20 bp, Artificial Sequence
  Antisense compound
ggttgaaaaaaatgttgagt

SEQ ID NO: 22566 - DNA, 20 bp, Artificial Sequence
  Antisense compound
aggttgaaaaaaatgttgag

SEQ ID NO: 22567 - DNA, 20 bp, Artificial Sequence
  Antisense compound
aaggttgaaaaaaatgttga

SEQ ID NO: 22568 - DNA, 20 bp, Artificial Sequence
  Antisense compound
aaaggttgaaaaaaatgttg

SEQ ID NO: 22569 - DNA, 20 bp, Artificial Sequence
  Antisense compound
taaaggttgaaaaaaatgtt

SEQ ID NO: 22570 - DNA, 20 bp, Artificial Sequence
  Antisense compound
ttaaaggttgaaaaaaatgt

SEQ ID NO: 22571 - DNA, 20 bp, Artificial Sequence
  Antisense compound
cttaaaggttgaaaaaaatg

SEQ ID NO: 22572 - DNA, 20 bp, Artificial Sequence
  Antisense compound
acttaaaggttgaaaaaaat

SEQ ID NO: 22573 - DNA, 20 bp, Artificial Sequence
  Antisense compound
cacttaaaggttgaaaaaaa

SEQ ID NO: 22574 - DNA, 20 bp, Artificial Sequence
  Antisense compound
gcacttaaaggttgaaaaaa

SEQ ID NO: 22575 - DNA, 20 bp, Artificial Sequence
  Antisense compound
agcacttaaaggttgaaaaa

SEQ ID NO: 22576 - DNA, 20 bp, Artificial Sequence
  Antisense compound
tagcacttaaaggttgaaaa

SEQ ID NO: 22577 - DNA, 20 bp, Artificial Sequence
  Antisense compound
atagcacttaaaggttgaaa

SEQ ID NO: 22578 - DNA, 20 bp, Artificial Sequence
  Antisense compound
catagcacttaaaggttgaa

SEQ ID NO: 22579 - DNA, 20 bp, Artificial Sequence
  Antisense compound
ccatagcacttaaaggttga

SEQ ID NO: 22580 - DNA, 20 bp, Artificial Sequence
  Antisense compound
gccatagcacttaaaggttg

SEQ ID NO: 22581 - DNA, 20 bp, Artificial Sequence
  Antisense compound
cgccatagcacttaaaggtt

SEQ ID NO: 22582 - DNA, 20 bp, Artificial Sequence
  Antisense compound
acgccatagcacttaaaggt

SEQ ID NO: 22583 - DNA, 20 bp, Artificial Sequence
  Antisense compound
aacgccatagcacttaaagg

SEQ ID NO: 22584 - DNA, 20 bp, Artificial Sequence
  Antisense compound
aaacgccatagcacttaaag

SEQ ID NO: 22585 - DNA, 20 bp, Artificial Sequence
  Antisense compound
gaaacgccatagcacttaaa

SEQ ID NO: 22586 - DNA, 20 bp, Artificial Sequence
  Antisense compound
agaaacgccatagcacttaa

SEQ ID NO: 22587 - DNA, 20 bp, Artificial Sequence
  Antisense compound
cagaaacgccatagcactta

SEQ ID NO: 22588 - DNA, 20 bp, Artificial Sequence
  Antisense compound
gcagaaacgccatagcactt

SEQ ID NO: 22589 - DNA, 20 bp, Artificial Sequence
  Antisense compound
ggcagaaacgccatagcact

SEQ ID NO: 22590 - DNA, 20 bp, Artificial Sequence
  Antisense compound
tggcagaaacgccatagcac

SEQ ID NO: 22591 - DNA, 20 bp, Artificial Sequence
  Antisense compound
gtggcagaaacgccatagca

SEQ ID NO: 22592 - DNA, 20 bp, Artificial Sequence
  Antisense compound
agtggcagaaacgccatagc

SEQ ID NO: 22593 - DNA, 20 bp, Artificial Sequence
  Antisense compound
tagtggcagaaacgccatag

SEQ ID NO: 22594 - DNA, 20 bp, Artificial Sequence
  Antisense compound
ttagtggcagaaacgccata

SEQ ID NO: 22595 - DNA, 20 bp, Artificial Sequence
  Antisense compound
cttagtggcagaaacgccat

SEQ ID NO: 22596 - DNA, 20 bp, Artificial Sequence
  Antisense compound
acttagtggcagaaacgcca

SEQ ID NO: 22597 - DNA, 20 bp, Artificial Sequence
  Antisense compound
aacttagtggcagaaacgcc

SEQ ID NO: 22598 - DNA, 20 bp, Artificial Sequence
  Antisense compound
caacttagtggcagaaacgc

SEQ ID NO: 22599 - DNA, 20 bp, Artificial Sequence
  Antisense compound
tcaacttagtggcagaaacg

SEQ ID NO: 22600 - DNA, 20 bp, Artificial Sequence
  Antisense compound
ttcaacttagtggcagaaac

SEQ ID NO: 22601 - DNA, 20 bp, Artificial Sequence
  Antisense compound
attcaacttagtggcagaaa

SEQ ID NO: 22602 - DNA, 20 bp, Artificial Sequence
  Antisense compound
cattcaacttagtggcagaa

SEQ ID NO: 22603 - DNA, 20 bp, Artificial Sequence
  Antisense compound
tcattcaacttagtggcaga

SEQ ID NO: 22604 - DNA, 20 bp, Artificial Sequence
  Antisense compound
atcattcaacttagtggcag

SEQ ID NO: 22605 - DNA, 20 bp, Artificial Sequence
  Antisense compound
gatcattcaacttagtggca

SEQ ID NO: 22606 - DNA, 20 bp, Artificial Sequence
  Antisense compound
agatcattcaacttagtggc

SEQ ID NO: 22607 - DNA, 20 bp, Artificial Sequence
  Antisense compound
aagatcattcaacttagtgg

SEQ ID NO: 22608 - DNA, 20 bp, Artificial Sequence
  Antisense compound
aaagatcattcaacttagtg

SEQ ID NO: 22609 - DNA, 20 bp, Artificial Sequence
  Antisense compound
caaagatcattcaacttagt

SEQ ID NO: 22610 - DNA, 20 bp, Artificial Sequence
  Antisense compound
gcaaagatcattcaacttag

SEQ ID NO: 22611 - DNA, 20 bp, Artificial Sequence
  Antisense compound
agcaaagatcattcaactta

SEQ ID NO: 22612 - DNA, 20 bp, Artificial Sequence
  Antisense compound
aagcaaagatcattcaactt

SEQ ID NO: 22613 - DNA, 20 bp, Artificial Sequence
  Antisense compound
gaagcaaagatcattcaact

SEQ ID NO: 22614 - DNA, 20 bp, Artificial Sequence
  Antisense compound
agaagcaaagatcattcaac

SEQ ID NO: 22615 - DNA, 20 bp, Artificial Sequence
  Antisense compound
gagaagcaaagatcattcaa

SEQ ID NO: 22616 - DNA, 20 bp, Artificial Sequence
  Antisense compound
ggagaagcaaagatcattca

SEQ ID NO: 22617 - DNA, 20 bp, Artificial Sequence
  Antisense compound
tggagaagcaaagatcattc

SEQ ID NO: 22618 - DNA, 20 bp, Artificial Sequence
  Antisense compound
ttggagaagcaaagatcatt

SEQ ID NO: 22619 - DNA, 20 bp, Artificial Sequence
  Antisense compound
attggagaagcaaagatcat

SEQ ID NO: 22620 - DNA, 20 bp, Artificial Sequence
  Antisense compound
cattggagaagcaaagatca

SEQ ID NO: 22621 - DNA, 20 bp, Artificial Sequence
  Antisense compound
acattggagaagcaaagatc

SEQ ID NO: 22622 - DNA, 20 bp, Artificial Sequence
  Antisense compound
gacattggagaagcaaagat

SEQ ID NO: 22623 - DNA, 20 bp, Artificial Sequence
  Antisense compound
agacattggagaagcaaaga

SEQ ID NO: 22624 - DNA, 20 bp, Artificial Sequence
  Antisense compound
tagacattggagaagcaaag

SEQ ID NO: 22625 - DNA, 20 bp, Artificial Sequence
  Antisense compound
atagacattggagaagcaaa

SEQ ID NO: 22626 - DNA, 20 bp, Artificial Sequence
  Antisense compound
catagacattggagaagcaa

SEQ ID NO: 22627 - DNA, 20 bp, Artificial Sequence
  Antisense compound
gcatagacattggagaagca

SEQ ID NO: 22628 - DNA, 20 bp, Artificial Sequence
  Antisense compound
tgcatagacattggagaagc

SEQ ID NO: 22629 - DNA, 20 bp, Artificial Sequence
  Antisense compound
ctgcatagacattggagaag

SEQ ID NO: 22630 - DNA, 20 bp, Artificial Sequence
  Antisense compound
tctgcatagacattggagaa

SEQ ID NO: 22631 - DNA, 20 bp, Artificial Sequence
  Antisense compound
atctgcatagacattggaga

SEQ ID NO: 22632 - DNA, 20 bp, Artificial Sequence
  Antisense compound
aatctgcatagacattggag

SEQ ID NO: 22633 - DNA, 20 bp, Artificial Sequence
  Antisense compound
gaatctgcatagacattgga

SEQ ID NO: 22634 - DNA, 20 bp, Artificial Sequence
  Antisense compound
agaatctgcatagacattgg

SEQ ID NO: 22635 - DNA, 20 bp, Artificial Sequence
  Antisense compound
aagaatctgcatagacattg

SEQ ID NO: 22636 - DNA, 20 bp, Artificial Sequence
  Antisense compound
aaagaatctgcatagacatt

SEQ ID NO: 22637 - DNA, 20 bp, Artificial Sequence
  Antisense compound
aaaagaatctgcatagacat

SEQ ID NO: 22638 - DNA, 20 bp, Artificial Sequence
  Antisense compound
caaaagaatctgcatagaca

SEQ ID NO: 22639 - DNA, 20 bp, Artificial Sequence
  Antisense compound
acaaaagaatctgcatagac

SEQ ID NO: 22640 - DNA, 20 bp, Artificial Sequence
  Antisense compound
tacaaaagaatctgcataga

SEQ ID NO: 22641 - DNA, 20 bp, Artificial Sequence
  Antisense compound
ctacaaaagaatctgcatag

SEQ ID NO: 22642 - DNA, 20 bp, Artificial Sequence
  Antisense compound
actacaaaagaatctgcata

SEQ ID NO: 22643 - DNA, 20 bp, Artificial Sequence
  Antisense compound
gactacaaaagaatctgcat

SEQ ID NO: 22644 - DNA, 20 bp, Artificial Sequence
  Antisense compound
tgactacaaaagaatctgca

SEQ ID NO: 22645 - DNA, 20 bp, Artificial Sequence
  Antisense compound
ttgactacaaaagaatctgc

SEQ ID NO: 22646 - DNA, 20 bp, Artificial Sequence
  Antisense compound
cttgactacaaaagaatctg

SEQ ID NO: 22647 - DNA, 20 bp, Artificial Sequence
  Antisense compound
ccttgactacaaaagaatct

SEQ ID NO: 22648 - DNA, 20 bp, Artificial Sequence
  Antisense compound
cccttgactacaaaagaatc

SEQ ID NO: 22649 - DNA, 20 bp, Artificial Sequence
  Antisense compound
tcccttgactacaaaagaat

SEQ ID NO: 22650 - DNA, 20 bp, Artificial Sequence
  Antisense compound
ctcccttgactacaaaagaa

SEQ ID NO: 22651 - DNA, 20 bp, Artificial Sequence
  Antisense compound
tctcccttgactacaaaaga

SEQ ID NO: 22652 - DNA, 20 bp, Artificial Sequence
  Antisense compound
atctcccttgactacaaaag

SEQ ID NO: 22653 - DNA, 20 bp, Artificial Sequence
  Antisense compound
catctcccttgactacaaaa

SEQ ID NO: 22654 - DNA, 20 bp, Artificial Sequence
  Antisense compound
tcatctcccttgactacaaa

SEQ ID NO: 22655 - DNA, 20 bp, Artificial Sequence
  Antisense compound
atcatctcccttgactacaa

SEQ ID NO: 22656 - DNA, 20 bp, Artificial Sequence
  Antisense compound
catcatctcccttgactaca

SEQ ID NO: 22657 - DNA, 20 bp, Artificial Sequence
  Antisense compound
acatcatctcccttgactac

SEQ ID NO: 22658 - DNA, 20 bp, Artificial Sequence
  Antisense compound
tacatcatctcccttgacta

SEQ ID NO: 22659 - DNA, 20 bp, Artificial Sequence
  Antisense compound
ttacatcatctcccttgact

SEQ ID NO: 22660 - DNA, 20 bp, Artificial Sequence
  Antisense compound
cttacatcatctcccttgac

SEQ ID NO: 22661 - DNA, 20 bp, Artificial Sequence
  Antisense compound
tcttacatcatctcccttga

SEQ ID NO: 22662 - DNA, 20 bp, Artificial Sequence
  Antisense compound
gtcttacatcatctcccttg

SEQ ID NO: 22663 - DNA, 20 bp, Artificial Sequence
  Antisense compound
tgtcttacatcatctccctt

SEQ ID NO: 22664 - DNA, 20 bp, Artificial Sequence
  Antisense compound
ttgtcttacatcatctccct

SEQ ID NO: 22665 - DNA, 20 bp, Artificial Sequence
  Antisense compound
tttgtcttacatcatctccc

SEQ ID NO: 22666 - DNA, 20 bp, Artificial Sequence
  Antisense compound
atttgtcttacatcatctcc

SEQ ID NO: 22667 - DNA, 20 bp, Artificial Sequence
  Antisense compound
tatttgtcttacatcatctc

SEQ ID NO: 22668 - DNA, 20 bp, Artificial Sequence
  Antisense compound
ctatttgtcttacatcatct

SEQ ID NO: 22669 - DNA, 20 bp, Artificial Sequence
  Antisense compound
gctatttgtcttacatcatc

SEQ ID NO: 22670 - DNA, 20 bp, Artificial Sequence
  Antisense compound
cgctatttgtcttacatcat

SEQ ID NO: 22671 - DNA, 20 bp, Artificial Sequence
  Antisense compound
gcgctatttgtcttacatca

SEQ ID NO: 22672 - DNA, 20 bp, Artificial Sequence
  Antisense compound
ggcgctatttgtcttacatc

SEQ ID NO: 22673 - DNA, 20 bp, Artificial Sequence
  Antisense compound
tggcgctatttgtcttacat

SEQ ID NO: 22674 - DNA, 20 bp, Artificial Sequence
  Antisense compound
ctggcgctatttgtcttaca

SEQ ID NO: 22675 - DNA, 20 bp, Artificial Sequence
  Antisense compound
cctggcgctatttgtcttac

SEQ ID NO: 22676 - DNA, 20 bp, Artificial Sequence
  Antisense compound
tcctggcgctatttgtctta

SEQ ID NO: 22677 - DNA, 20 bp, Artificial Sequence
  Antisense compound
gtcctggcgctatttgtctt

SEQ ID NO: 22678 - DNA, 20 bp, Artificial Sequence
  Antisense compound
tgtcctggcgctatttgtct

SEQ ID NO: 22679 - DNA, 20 bp, Artificial Sequence
  Antisense compound
ttgtcctggcgctatttgtc

SEQ ID NO: 22680 - DNA, 20 bp, Artificial Sequence
  Antisense compound
tttgtcctggcgctatttgt

SEQ ID NO: 22681 - DNA, 20 bp, Artificial Sequence
  Antisense compound
gtttgtcctggcgctatttg

SEQ ID NO: 22682 - DNA, 20 bp, Artificial Sequence
  Antisense compound
agtttgtcctggcgctattt

SEQ ID NO: 22683 - DNA, 20 bp, Artificial Sequence
  Antisense compound
cagtttgtcctggcgctatt

SEQ ID NO: 22684 - DNA, 20 bp, Artificial Sequence
  Antisense compound
ccagtttgtcctggcgctat

SEQ ID NO: 22685 - DNA, 20 bp, Artificial Sequence
  Antisense compound
accagtttgtcctggcgcta

SEQ ID NO: 22686 - DNA, 20 bp, Artificial Sequence
  Antisense compound
caccagtttgtcctggcgct

SEQ ID NO: 22687 - DNA, 20 bp, Artificial Sequence
  Antisense compound
acaccagtttgtcctggcgc

SEQ ID NO: 22688 - DNA, 20 bp, Artificial Sequence
  Antisense compound
aacaccagtttgtcctggcg

SEQ ID NO: 22689 - DNA, 20 bp, Artificial Sequence
  Antisense compound
taacaccagtttgtcctggc

SEQ ID NO: 22690 - DNA, 20 bp, Artificial Sequence
  Antisense compound
ataacaccagtttgtcctgg

SEQ ID NO: 22691 - DNA, 20 bp, Artificial Sequence
  Antisense compound
aataacaccagtttgtcctg

SEQ ID NO: 22692 - DNA, 20 bp, Artificial Sequence
  Antisense compound
caataacaccagtttgtcct

SEQ ID NO: 22693 - DNA, 20 bp, Artificial Sequence
  Antisense compound
gcaataacaccagtttgtcc

SEQ ID NO: 22694 - DNA, 20 bp, Artificial Sequence
  Antisense compound
agcaataacaccagtttgtc

SEQ ID NO: 22695 - DNA, 20 bp, Artificial Sequence
  Antisense compound
cagcaataacaccagtttgt

SEQ ID NO: 22696 - DNA, 20 bp, Artificial Sequence
  Antisense compound
tcagcaataacaccagtttg

SEQ ID NO: 22697 - DNA, 20 bp, Artificial Sequence
  Antisense compound
atcagcaataacaccagttt

SEQ ID NO: 22698 - DNA, 20 bp, Artificial Sequence
  Antisense compound
aatcagcaataacaccagtt

SEQ ID NO: 22699 - DNA, 20 bp, Artificial Sequence
  Antisense compound
taatcagcaataacaccagt

SEQ ID NO: 22700 - DNA, 20 bp, Artificial Sequence
  Antisense compound
ataatcagcaataacaccag

SEQ ID NO: 22701 - DNA, 20 bp, Artificial Sequence
  Antisense compound
tataatcagcaataacacca

SEQ ID NO: 22702 - DNA, 20 bp, Artificial Sequence
  Antisense compound
ttataatcagcaataacacc

SEQ ID NO: 22703 - DNA, 20 bp, Artificial Sequence
  Antisense compound
attataatcagcaataacac

SEQ ID NO: 22704 - DNA, 20 bp, Artificial Sequence
  Antisense compound
aattataatcagcaataaca

SEQ ID NO: 22705 - DNA, 20 bp, Artificial Sequence
  Antisense compound
taattataatcagcaataac

SEQ ID NO: 22706 - DNA, 20 bp, Artificial Sequence
  Antisense compound
ataattataatcagcaataa

SEQ ID NO: 22707 - DNA, 20 bp, Artificial Sequence
  Antisense compound
tataattataatcagcaata

SEQ ID NO: 22708 - DNA, 20 bp, Artificial Sequence
  Antisense compound
ttataattataatcagcaat

SEQ ID NO: 22709 - DNA, 20 bp, Artificial Sequence
  Antisense compound
tttataattataatcagcaa

SEQ ID NO: 22710 - DNA, 20 bp, Artificial Sequence
  Antisense compound
atttataattataatcagca

SEQ ID NO: 22711 - DNA, 20 bp, Artificial Sequence
  Antisense compound
aatttataattataatcagc

SEQ ID NO: 22712 - DNA, 20 bp, Artificial Sequence
  Antisense compound
caatttataattataatcag

SEQ ID NO: 22713 - DNA, 20 bp, Artificial Sequence
  Antisense compound
gcaatttataattataatca

SEQ ID NO: 22714 - DNA, 20 bp, Artificial Sequence
  Antisense compound
ggcaatttataattataatc

SEQ ID NO: 22715 - DNA, 20 bp, Artificial Sequence
  Antisense compound
tggcaatttataattataat

SEQ ID NO: 22716 - DNA, 20 bp, Artificial Sequence
  Antisense compound
ctggcaatttataattataa

SEQ ID NO: 22717 - DNA, 20 bp, Artificial Sequence
  Antisense compound
tctggcaatttataattata

SEQ ID NO: 22718 - DNA, 20 bp, Artificial Sequence
  Antisense compound
atctggcaatttataattat

SEQ ID NO: 22719 - DNA, 20 bp, Artificial Sequence
  Antisense compound
catctggcaatttataatta

SEQ ID NO: 22720 - DNA, 20 bp, Artificial Sequence
  Antisense compound
tcatctggcaatttataatt

SEQ ID NO: 22721 - DNA, 20 bp, Artificial Sequence
  Antisense compound
atcatctggcaatttataat

SEQ ID NO: 22722 - DNA, 20 bp, Artificial Sequence
  Antisense compound
aatcatctggcaatttataa

SEQ ID NO: 22723 - DNA, 20 bp, Artificial Sequence
  Antisense compound
aaatcatctggcaatttata

SEQ ID NO: 22724 - DNA, 20 bp, Artificial Sequence
  Antisense compound
gaaatcatctggcaatttat

SEQ ID NO: 22725 - DNA, 20 bp, Artificial Sequence
  Antisense compound
tgaaatcatctggcaattta

SEQ ID NO: 22726 - DNA, 20 bp, Artificial Sequence
  Antisense compound
atgaaatcatctggcaattt

SEQ ID NO: 22727 - DNA, 20 bp, Artificial Sequence
  Antisense compound
catgaaatcatctggcaatt

SEQ ID NO: 22728 - DNA, 20 bp, Artificial Sequence
  Antisense compound
ccatgaaatcatctggcaat

SEQ ID NO: 22729 - DNA, 20 bp, Artificial Sequence
  Antisense compound
cccatgaaatcatctggcaa

SEQ ID NO: 22730 - DNA, 20 bp, Artificial Sequence
  Antisense compound
acccatgaaatcatctggca

SEQ ID NO: 22731 - DNA, 20 bp, Artificial Sequence
  Antisense compound
aacccatgaaatcatctggc

SEQ ID NO: 22732 - DNA, 20 bp, Artificial Sequence
  Antisense compound
caacccatgaaatcatctgg

SEQ ID NO: 22733 - DNA, 20 bp, Artificial Sequence
  Antisense compound
acaacccatgaaatcatctg

SEQ ID NO: 22734 - DNA, 20 bp, Artificial Sequence
  Antisense compound
cacaacccatgaaatcatct

SEQ ID NO: 22735 - DNA, 20 bp, Artificial Sequence
  Antisense compound
acacaacccatgaaatcatc

SEQ ID NO: 22736 - DNA, 20 bp, Artificial Sequence
  Antisense compound
gacacaacccatgaaatcat

SEQ ID NO: 22737 - DNA, 20 bp, Artificial Sequence
  Antisense compound
ggacacaacccatgaaatca

SEQ ID NO: 22738 - DNA, 20 bp, Artificial Sequence
  Antisense compound
aggacacaacccatgaaatc

SEQ ID NO: 22739 - DNA, 20 bp, Artificial Sequence
  Antisense compound
aaggacacaacccatgaaat

SEQ ID NO: 22740 - DNA, 20 bp, Artificial Sequence
  Antisense compound
caaggacacaacccatgaaa

SEQ ID NO: 22741 - DNA, 20 bp, Artificial Sequence
  Antisense compound
gcaaggacacaacccatgaa

SEQ ID NO: 22742 - DNA, 20 bp, Artificial Sequence
  Antisense compound
agcaaggacacaacccatga

SEQ ID NO: 22743 - DNA, 20 bp, Artificial Sequence
  Antisense compound
aagcaaggacacaacccatg

SEQ ID NO: 22744 - DNA, 20 bp, Artificial Sequence
  Antisense compound
caagcaaggacacaacccat

SEQ ID NO: 22745 - DNA, 20 bp, Artificial Sequence
  Antisense compound
ccaagcaaggacacaaccca

SEQ ID NO: 22746 - DNA, 20 bp, Artificial Sequence
  Antisense compound
tccaagcaaggacacaaccc

SEQ ID NO: 22747 - DNA, 20 bp, Artificial Sequence
  Antisense compound
ttccaagcaaggacacaacc

SEQ ID NO: 22748 - DNA, 20 bp, Artificial Sequence
  Antisense compound
attccaagcaaggacacaac

SEQ ID NO: 22749 - DNA, 20 bp, Artificial Sequence
  Antisense compound
tattccaagcaaggacacaa

SEQ ID NO: 22750 - DNA, 20 bp, Artificial Sequence
  Antisense compound
gtattccaagcaaggacaca

SEQ ID NO: 22751 - DNA, 20 bp, Artificial Sequence
  Antisense compound
agtattccaagcaaggacac

SEQ ID NO: 22752 - DNA, 20 bp, Artificial Sequence
  Antisense compound
tagtattccaagcaaggaca

SEQ ID NO: 22753 - DNA, 20 bp, Artificial Sequence
  Antisense compound
ctagtattccaagcaaggac

SEQ ID NO: 22754 - DNA, 20 bp, Artificial Sequence
  Antisense compound
cctagtattccaagcaagga

SEQ ID NO: 22755 - DNA, 20 bp, Artificial Sequence
  Antisense compound
tcctagtattccaagcaagg

SEQ ID NO: 22756 - DNA, 20 bp, Artificial Sequence
  Antisense compound
ttcctagtattccaagcaag

SEQ ID NO: 22757 - DNA, 20 bp, Artificial Sequence
  Antisense compound
gttcctagtattccaagcaa

SEQ ID NO: 22758 - DNA, 20 bp, Artificial Sequence
  Antisense compound
tgttcctagtattccaagca

SEQ ID NO: 22759 - DNA, 20 bp, Artificial Sequence
  Antisense compound
atgttcctagtattccaagc

SEQ ID NO: 22760 - DNA, 20 bp, Artificial Sequence
  Antisense compound
aatgttcctagtattccaag

SEQ ID NO: 22761 - DNA, 20 bp, Artificial Sequence
  Antisense compound
caatgttcctagtattccaa

SEQ ID NO: 22762 - DNA, 20 bp, Artificial Sequence
  Antisense compound
tcaatgttcctagtattcca

SEQ ID NO: 22763 - DNA, 20 bp, Artificial Sequence
  Antisense compound
atcaatgttcctagtattcc

SEQ ID NO: 22764 - DNA, 20 bp, Artificial Sequence
  Antisense compound
catcaatgttcctagtattc

SEQ ID NO: 22765 - DNA, 20 bp, Artificial Sequence
  Antisense compound
gcatcaatgttcctagtatt

SEQ ID NO: 22766 - DNA, 20 bp, Artificial Sequence
  Antisense compound
agcatcaatgttcctagtat

SEQ ID NO: 22767 - DNA, 20 bp, Artificial Sequence
  Antisense compound
tagcatcaatgttcctagta

SEQ ID NO: 22768 - DNA, 20 bp, Artificial Sequence
  Antisense compound
gtagcatcaatgttcctagt

SEQ ID NO: 22769 - DNA, 20 bp, Artificial Sequence
  Antisense compound
agtagcatcaatgttcctag

SEQ ID NO: 22770 - DNA, 20 bp, Artificial Sequence
  Antisense compound
aagtagcatcaatgttccta

SEQ ID NO: 22771 - DNA, 20 bp, Artificial Sequence
  Antisense compound
gaagtagcatcaatgttcct

SEQ ID NO: 22772 - DNA, 20 bp, Artificial Sequence
  Antisense compound
tgaagtagcatcaatgttcc

SEQ ID NO: 22773 - DNA, 20 bp, Artificial Sequence
  Antisense compound
ttgaagtagcatcaatgttc

SEQ ID NO: 22774 - DNA, 20 bp, Artificial Sequence
  Antisense compound
gttgaagtagcatcaatgtt

SEQ ID NO: 22775 - DNA, 20 bp, Artificial Sequence
  Antisense compound
agttgaagtagcatcaatgt

SEQ ID NO: 22776 - DNA, 20 bp, Artificial Sequence
  Antisense compound
cagttgaagtagcatcaatg

SEQ ID NO: 22777 - DNA, 20 bp, Artificial Sequence
  Antisense compound
ccagttgaagtagcatcaat

SEQ ID NO: 22778 - DNA, 20 bp, Artificial Sequence
  Antisense compound
accagttgaagtagcatcaa

SEQ ID NO: 22779 - DNA, 20 bp, Artificial Sequence
  Antisense compound
taccagttgaagtagcatca

SEQ ID NO: 22780 - DNA, 20 bp, Artificial Sequence
  Antisense compound
ttaccagttgaagtagcatc

SEQ ID NO: 22781 - DNA, 20 bp, Artificial Sequence
  Antisense compound
attaccagttgaagtagcat

SEQ ID NO: 22782 - DNA, 20 bp, Artificial Sequence
  Antisense compound
aattaccagttgaagtagca

SEQ ID NO: 22783 - DNA, 20 bp, Artificial Sequence
  Antisense compound
taattaccagttgaagtagc

SEQ ID NO: 22784 - DNA, 20 bp, Artificial Sequence
  Antisense compound
ataattaccagttgaagtag

SEQ ID NO: 22785 - DNA, 20 bp, Artificial Sequence
  Antisense compound
tataattaccagttgaagta

SEQ ID NO: 22786 - DNA, 20 bp, Artificial Sequence
  Antisense compound
ttataattaccagttgaagt

SEQ ID NO: 22787 - DNA, 20 bp, Artificial Sequence
  Antisense compound
attataattaccagttgaag

SEQ ID NO: 22788 - DNA, 20 bp, Artificial Sequence
  Antisense compound
aattataattaccagttgaa

SEQ ID NO: 22789 - DNA, 20 bp, Artificial Sequence
  Antisense compound
taattataattaccagttga

SEQ ID NO: 22790 - DNA, 20 bp, Artificial Sequence
  Antisense compound
ataattataattaccagttg

SEQ ID NO: 22791 - DNA, 20 bp, Artificial Sequence
  Antisense compound
tataattataattaccagtt

SEQ ID NO: 22792 - DNA, 20 bp, Artificial Sequence
  Antisense compound
ttataattataattaccagt

SEQ ID NO: 22793 - DNA, 20 bp, Artificial Sequence
  Antisense compound
tttataattataattaccag

SEQ ID NO: 22794 - DNA, 20 bp, Artificial Sequence
  Antisense compound
atttataattataattacca

SEQ ID NO: 22795 - DNA, 20 bp, Artificial Sequence
  Antisense compound
tatttataattataattacc

SEQ ID NO: 22796 - DNA, 20 bp, Artificial Sequence
  Antisense compound
atatttataattataattac

SEQ ID NO: 22797 - DNA, 20 bp, Artificial Sequence
  Antisense compound
tatatttataattataatta

SEQ ID NO: 22798 - DNA, 20 bp, Artificial Sequence
  Antisense compound
ctatatttataattataatt

SEQ ID NO: 22799 - DNA, 20 bp, Artificial Sequence
  Antisense compound
cctatatttataattataat

SEQ ID NO: 22800 - DNA, 20 bp, Artificial Sequence
  Antisense compound
acctatatttataattataa

SEQ ID NO: 22801 - DNA, 20 bp, Artificial Sequence
  Antisense compound
tacctatatttataattata

SEQ ID NO: 22802 - DNA, 20 bp, Artificial Sequence
  Antisense compound
atacctatatttataattat

SEQ ID NO: 22803 - DNA, 20 bp, Artificial Sequence
  Antisense compound
gatacctatatttataatta

SEQ ID NO: 22804 - DNA, 20 bp, Artificial Sequence
  Antisense compound
agatacctatatttataatt

SEQ ID NO: 22805 - DNA, 20 bp, Artificial Sequence
  Antisense compound
aagatacctatatttataat

SEQ ID NO: 22806 - DNA, 20 bp, Artificial Sequence
  Antisense compound
taagatacctatatttataa

SEQ ID NO: 22807 - DNA, 20 bp, Artificial Sequence
  Antisense compound
ctaagatacctatatttata

SEQ ID NO: 22808 - DNA, 20 bp, Artificial Sequence
  Antisense compound
tctaagatacctatatttat

SEQ ID NO: 22809 - DNA, 20 bp, Artificial Sequence
  Antisense compound
gtctaagatacctatattta

SEQ ID NO: 22810 - DNA, 20 bp, Artificial Sequence
  Antisense compound
tgtctaagatacctatattt

SEQ ID NO: 22811 - DNA, 20 bp, Artificial Sequence
  Antisense compound
atgtctaagatacctatatt

SEQ ID NO: 22812 - DNA, 20 bp, Artificial Sequence
  Antisense compound
catgtctaagatacctatat

SEQ ID NO: 22813 - DNA, 20 bp, Artificial Sequence
  Antisense compound
ccatgtctaagatacctata

SEQ ID NO: 22814 - DNA, 20 bp, Artificial Sequence
  Antisense compound
gccatgtctaagatacctat

SEQ ID NO: 22815 - DNA, 20 bp, Artificial Sequence
  Antisense compound
tgccatgtctaagataccta

SEQ ID NO: 22816 - DNA, 20 bp, Artificial Sequence
  Antisense compound
ttgccatgtctaagatacct

SEQ ID NO: 22817 - DNA, 20 bp, Artificial Sequence
  Antisense compound
cttgccatgtctaagatacc

SEQ ID NO: 22818 - DNA, 20 bp, Artificial Sequence
  Antisense compound
gcttgccatgtctaagatac

SEQ ID NO: 22819 - DNA, 20 bp, Artificial Sequence
  Antisense compound
agcttgccatgtctaagata

SEQ ID NO: 22820 - DNA, 20 bp, Artificial Sequence
  Antisense compound
aagcttgccatgtctaagat

SEQ ID NO: 22821 - DNA, 20 bp, Artificial Sequence
  Antisense compound
taagcttgccatgtctaaga

SEQ ID NO: 22822 - DNA, 20 bp, Artificial Sequence
  Antisense compound
ctaagcttgccatgtctaag

SEQ ID NO: 22823 - DNA, 20 bp, Artificial Sequence
  Antisense compound
cctaagcttgccatgtctaa

SEQ ID NO: 22824 - DNA, 20 bp, Artificial Sequence
  Antisense compound
gcctaagcttgccatgtcta

SEQ ID NO: 22825 - DNA, 20 bp, Artificial Sequence
  Antisense compound
ggcctaagcttgccatgtct

SEQ ID NO: 22826 - DNA, 20 bp, Artificial Sequence
  Antisense compound
gggcctaagcttgccatgtc

SEQ ID NO: 22827 - DNA, 20 bp, Artificial Sequence
  Antisense compound
agggcctaagcttgccatgt

SEQ ID NO: 22828 - DNA, 20 bp, Artificial Sequence
  Antisense compound
aagggcctaagcttgccatg

SEQ ID NO: 22829 - DNA, 20 bp, Artificial Sequence
  Antisense compound
aaagggcctaagcttgccat

SEQ ID NO: 22830 - DNA, 20 bp, Artificial Sequence
  Antisense compound
caaagggcctaagcttgcca

SEQ ID NO: 22831 - DNA, 20 bp, Artificial Sequence
  Antisense compound
tcaaagggcctaagcttgcc

SEQ ID NO: 22832 - DNA, 20 bp, Artificial Sequence
  Antisense compound
ctcaaagggcctaagcttgc

SEQ ID NO: 22833 - DNA, 20 bp, Artificial Sequence
  Antisense compound
tctcaaagggcctaagcttg

SEQ ID NO: 22834 - DNA, 20 bp, Artificial Sequence
  Antisense compound
ctctcaaagggcctaagctt

SEQ ID NO: 22835 - DNA, 20 bp, Artificial Sequence
  Antisense compound
tctctcaaagggcctaagct

SEQ ID NO: 22836 - DNA, 20 bp, Artificial Sequence
  Antisense compound
ctctctcaaagggcctaagc

SEQ ID NO: 22837 - DNA, 20 bp, Artificial Sequence
  Antisense compound
tctctctcaaagggcctaag

SEQ ID NO: 22838 - DNA, 20 bp, Artificial Sequence
  Antisense compound
gtctctctcaaagggcctaa

SEQ ID NO: 22839 - DNA, 20 bp, Artificial Sequence
  Antisense compound
tgtctctctcaaagggccta

SEQ ID NO: 22840 - DNA, 20 bp, Artificial Sequence
  Antisense compound
atgtctctctcaaagggcct

SEQ ID NO: 22841 - DNA, 20 bp, Artificial Sequence
  Antisense compound
tatgtctctctcaaagggcc

SEQ ID NO: 22842 - DNA, 20 bp, Artificial Sequence
  Antisense compound
atatgtctctctcaaagggc

SEQ ID NO: 22843 - DNA, 20 bp, Artificial Sequence
  Antisense compound
gatatgtctctctcaaaggg

SEQ ID NO: 22844 - DNA, 20 bp, Artificial Sequence
  Antisense compound
agatatgtctctctcaaagg

SEQ ID NO: 22845 - DNA, 20 bp, Artificial Sequence
  Antisense compound
tagatatgtctctctcaaag

SEQ ID NO: 22846 - DNA, 20 bp, Artificial Sequence
  Antisense compound
ttagatatgtctctctcaaa

SEQ ID NO: 22847 - DNA, 20 bp, Artificial Sequence
  Antisense compound
attagatatgtctctctcaa

SEQ ID NO: 22848 - DNA, 20 bp, Artificial Sequence
  Antisense compound
cattagatatgtctctctca

SEQ ID NO: 22849 - DNA, 20 bp, Artificial Sequence
  Antisense compound
acattagatatgtctctctc

SEQ ID NO: 22850 - DNA, 20 bp, Artificial Sequence
  Antisense compound
cacattagatatgtctctct

SEQ ID NO: 22851 - DNA, 20 bp, Artificial Sequence
  Antisense compound
gcacattagatatgtctctc

SEQ ID NO: 22852 - DNA, 20 bp, Artificial Sequence
  Antisense compound
ggcacattagatatgtctct

SEQ ID NO: 22853 - DNA, 20 bp, Artificial Sequence
  Antisense compound
aggcacattagatatgtctc

SEQ ID NO: 22854 - DNA, 20 bp, Artificial Sequence
  Antisense compound
aaggcacattagatatgtct

SEQ ID NO: 22855 - DNA, 20 bp, Artificial Sequence
  Antisense compound
aaaggcacattagatatgtc

SEQ ID NO: 22856 - DNA, 20 bp, Artificial Sequence
  Antisense compound
gaaaggcacattagatatgt

SEQ ID NO: 22857 - DNA, 20 bp, Artificial Sequence
  Antisense compound
agaaaggcacattagatatg

SEQ ID NO: 22858 - DNA, 20 bp, Artificial Sequence
  Antisense compound
gagaaaggcacattagatat

SEQ ID NO: 22859 - DNA, 20 bp, Artificial Sequence
  Antisense compound
ggagaaaggcacattagata

SEQ ID NO: 22860 - DNA, 20 bp, Artificial Sequence
  Antisense compound
gggagaaaggcacattagat

SEQ ID NO: 22861 - DNA, 20 bp, Artificial Sequence
  Antisense compound
ggggagaaaggcacattaga

SEQ ID NO: 22862 - DNA, 20 bp, Artificial Sequence
  Antisense compound
aggggagaaaggcacattag

SEQ ID NO: 22863 - DNA, 20 bp, Artificial Sequence
  Antisense compound
caggggagaaaggcacatta

SEQ ID NO: 22864 - DNA, 20 bp, Artificial Sequence
  Antisense compound
tcaggggagaaaggcacatt

SEQ ID NO: 22865 - DNA, 20 bp, Artificial Sequence
  Antisense compound
atcaggggagaaaggcacat

SEQ ID NO: 22866 - DNA, 20 bp, Artificial Sequence
  Antisense compound
catcaggggagaaaggcaca

SEQ ID NO: 22867 - DNA, 20 bp, Artificial Sequence
  Antisense compound
ccatcaggggagaaaggcac

SEQ ID NO: 22868 - DNA, 20 bp, Artificial Sequence
  Antisense compound
gccatcaggggagaaaggca

SEQ ID NO: 22869 - DNA, 20 bp, Artificial Sequence
  Antisense compound
tgccatcaggggagaaaggc

SEQ ID NO: 22870 - DNA, 20 bp, Artificial Sequence
  Antisense compound
ttgccatcaggggagaaagg

SEQ ID NO: 22871 - DNA, 20 bp, Artificial Sequence
  Antisense compound
tttgccatcaggggagaaag

SEQ ID NO: 22872 - DNA, 20 bp, Artificial Sequence
  Antisense compound
gtttgccatcaggggagaaa

SEQ ID NO: 22873 - DNA, 20 bp, Artificial Sequence
  Antisense compound
ggtttgccatcaggggagaa

SEQ ID NO: 22874 - DNA, 20 bp, Artificial Sequence
  Antisense compound
aggtttgccatcaggggaga

SEQ ID NO: 22875 - DNA, 20 bp, Artificial Sequence
  Antisense compound
aaggtttgccatcaggggag

SEQ ID NO: 22876 - DNA, 20 bp, Artificial Sequence
  Antisense compound
caaggtttgccatcagggga

SEQ ID NO: 22877 - DNA, 20 bp, Artificial Sequence
  Antisense compound
gcaaggtttgccatcagggg

SEQ ID NO: 22878 - DNA, 20 bp, Artificial Sequence
  Antisense compound
tgcaaggtttgccatcaggg

SEQ ID NO: 22879 - DNA, 20 bp, Artificial Sequence
  Antisense compound
gtgcaaggtttgccatcagg

SEQ ID NO: 22880 - DNA, 20 bp, Artificial Sequence
  Antisense compound
ggtgcaaggtttgccatcag

SEQ ID NO: 22881 - DNA, 20 bp, Artificial Sequence
  Antisense compound
gggtgcaaggtttgccatca

SEQ ID NO: 22882 - DNA, 20 bp, Artificial Sequence
  Antisense compound
ggggtgcaaggtttgccatc

SEQ ID NO: 22883 - DNA, 20 bp, Artificial Sequence
  Antisense compound
tggggtgcaaggtttgccat

SEQ ID NO: 22884 - DNA, 20 bp, Artificial Sequence
  Antisense compound
gtggggtgcaaggtttgcca

SEQ ID NO: 22885 - DNA, 20 bp, Artificial Sequence
  Antisense compound
ggtggggtgcaaggtttgcc

SEQ ID NO: 22886 - DNA, 20 bp, Artificial Sequence
  Antisense compound
aggtggggtgcaaggtttgc

SEQ ID NO: 22887 - DNA, 20 bp, Artificial Sequence
  Antisense compound
caggtggggtgcaaggtttg

SEQ ID NO: 22888 - DNA, 20 bp, Artificial Sequence
  Antisense compound
gcaggtggggtgcaaggttt

SEQ ID NO: 22889 - DNA, 20 bp, Artificial Sequence
  Antisense compound
agcaggtggggtgcaaggtt

SEQ ID NO: 22890 - DNA, 20 bp, Artificial Sequence
  Antisense compound
gagcaggtggggtgcaaggt

SEQ ID NO: 22891 - DNA, 20 bp, Artificial Sequence
  Antisense compound
agagcaggtggggtgcaagg

SEQ ID NO: 22892 - DNA, 20 bp, Artificial Sequence
  Antisense compound
aagagcaggtggggtgcaag

SEQ ID NO: 22893 - DNA, 20 bp, Artificial Sequence
  Antisense compound
taagagcaggtggggtgcaa

SEQ ID NO: 22894 - DNA, 20 bp, Artificial Sequence
  Antisense compound
ttaagagcaggtggggtgca

SEQ ID NO: 22895 - DNA, 20 bp, Artificial Sequence
  Antisense compound
attaagagcaggtggggtgc

SEQ ID NO: 22896 - DNA, 20 bp, Artificial Sequence
  Antisense compound
aattaagagcaggtggggtg

SEQ ID NO: 22897 - DNA, 20 bp, Artificial Sequence
  Antisense compound
caattaagagcaggtggggt

SEQ ID NO: 22898 - DNA, 20 bp, Artificial Sequence
  Antisense compound
acaattaagagcaggtgggg

SEQ ID NO: 22899 - DNA, 20 bp, Artificial Sequence
  Antisense compound
aacaattaagagcaggtggg

SEQ ID NO: 22900 - DNA, 20 bp, Artificial Sequence
  Antisense compound
taacaattaagagcaggtgg

SEQ ID NO: 22901 - DNA, 20 bp, Artificial Sequence
  Antisense compound
ataacaattaagagcaggtg

SEQ ID NO: 22902 - DNA, 20 bp, Artificial Sequence
  Antisense compound
aataacaattaagagcaggt

SEQ ID NO: 22903 - DNA, 20 bp, Artificial Sequence
  Antisense compound
caataacaattaagagcagg

SEQ ID NO: 22904 - DNA, 20 bp, Artificial Sequence
  Antisense compound
ccaataacaattaagagcag

SEQ ID NO: 22905 - DNA, 20 bp, Artificial Sequence
  Antisense compound
gccaataacaattaagagca

SEQ ID NO: 22906 - DNA, 20 bp, Artificial Sequence
  Antisense compound
ggccaataacaattaagagc

SEQ ID NO: 22907 - DNA, 20 bp, Artificial Sequence
  Antisense compound
tggccaataacaattaagag

SEQ ID NO: 22908 - DNA, 20 bp, Artificial Sequence
  Antisense compound
atggccaataacaattaaga

SEQ ID NO: 22909 - DNA, 20 bp, Artificial Sequence
  Antisense compound
aatggccaataacaattaag

SEQ ID NO: 22910 - DNA, 20 bp, Artificial Sequence
  Antisense compound
taatggccaataacaattaa

SEQ ID NO: 22911 - DNA, 20 bp, Artificial Sequence
  Antisense compound
ttaatggccaataacaatta

SEQ ID NO: 22912 - DNA, 20 bp, Artificial Sequence
  Antisense compound
tttaatggccaataacaatt

SEQ ID NO: 22913 - DNA, 20 bp, Artificial Sequence
  Antisense compound
atttaatggccaataacaat

SEQ ID NO: 22914 - DNA, 20 bp, Artificial Sequence
  Antisense compound
catttaatggccaataacaa

SEQ ID NO: 22915 - DNA, 20 bp, Artificial Sequence
  Antisense compound
tcatttaatggccaataaca

SEQ ID NO: 22916 - DNA, 20 bp, Artificial Sequence
  Antisense compound
atcatttaatggccaataac

SEQ ID NO: 22917 - DNA, 20 bp, Artificial Sequence
  Antisense compound
aatcatttaatggccaataa

SEQ ID NO: 22918 - DNA, 20 bp, Artificial Sequence
  Antisense compound
taatcatttaatggccaata

SEQ ID NO: 22919 - DNA, 20 bp, Artificial Sequence
  Antisense compound
ataatcatttaatggccaat

SEQ ID NO: 22920 - DNA, 20 bp, Artificial Sequence
  Antisense compound
cataatcatttaatggccaa

SEQ ID NO: 22921 - DNA, 20 bp, Artificial Sequence
  Antisense compound
ccataatcatttaatggcca

SEQ ID NO: 22922 - DNA, 20 bp, Artificial Sequence
  Antisense compound
accataatcatttaatggcc

SEQ ID NO: 22923 - DNA, 20 bp, Artificial Sequence
  Antisense compound
aaccataatcatttaatggc

SEQ ID NO: 22924 - DNA, 20 bp, Artificial Sequence
  Antisense compound
aaaccataatcatttaatgg

SEQ ID NO: 22925 - DNA, 20 bp, Artificial Sequence
  Antisense compound
aaaaccataatcatttaatg

SEQ ID NO: 22926 - DNA, 20 bp, Artificial Sequence
  Antisense compound
aaaaaccataatcatttaat

SEQ ID NO: 22927 - DNA, 20 bp, Artificial Sequence
  Antisense compound
taaaaaccataatcatttaa

SEQ ID NO: 22928 - DNA, 20 bp, Artificial Sequence
  Antisense compound
gtaaaaaccataatcattta

SEQ ID NO: 22929 - DNA, 20 bp, Artificial Sequence
  Antisense compound
tgtaaaaaccataatcattt

SEQ ID NO: 22930 - DNA, 20 bp, Artificial Sequence
  Antisense compound
gtgtaaaaaccataatcatt

SEQ ID NO: 22931 - DNA, 20 bp, Artificial Sequence
  Antisense compound
ggtgtaaaaaccataatcat

SEQ ID NO: 22932 - DNA, 20 bp, Artificial Sequence
  Antisense compound
tggtgtaaaaaccataatca

SEQ ID NO: 22933 - DNA, 20 bp, Artificial Sequence
  Antisense compound
gtggtgtaaaaaccataatc

SEQ ID NO: 22934 - DNA, 20 bp, Artificial Sequence
  Antisense compound
agtggtgtaaaaaccataat

SEQ ID NO: 22935 - DNA, 20 bp, Artificial Sequence
  Antisense compound
tagtggtgtaaaaaccataa

SEQ ID NO: 22936 - DNA, 20 bp, Artificial Sequence
  Antisense compound
gtagtggtgtaaaaaccata

SEQ ID NO: 22937 - DNA, 20 bp, Artificial Sequence
  Antisense compound
agtagtggtgtaaaaaccat

SEQ ID NO: 22938 - DNA, 20 bp, Artificial Sequence
  Antisense compound
cagtagtggtgtaaaaacca

SEQ ID NO: 22939 - DNA, 20 bp, Artificial Sequence
  Antisense compound
ccagtagtggtgtaaaaacc

SEQ ID NO: 22940 - DNA, 20 bp, Artificial Sequence
  Antisense compound
gccagtagtggtgtaaaaac

SEQ ID NO: 22941 - DNA, 20 bp, Artificial Sequence
  Antisense compound
tgccagtagtggtgtaaaaa

SEQ ID NO: 22942 - DNA, 20 bp, Artificial Sequence
  Antisense compound
atgccagtagtggtgtaaaa

SEQ ID NO: 22943 - DNA, 20 bp, Artificial Sequence
  Antisense compound
aatgccagtagtggtgtaaa

SEQ ID NO: 22944 - DNA, 20 bp, Artificial Sequence
  Antisense compound
caatgccagtagtggtgtaa

SEQ ID NO: 22945 - DNA, 20 bp, Artificial Sequence
  Antisense compound
ccaatgccagtagtggtgta

SEQ ID NO: 22946 - DNA, 20 bp, Artificial Sequence
  Antisense compound
gccaatgccagtagtggtgt

SEQ ID NO: 22947 - DNA, 20 bp, Artificial Sequence
  Antisense compound
agccaatgccagtagtggtg

SEQ ID NO: 22948 - DNA, 20 bp, Artificial Sequence
  Antisense compound
tagccaatgccagtagtggt

SEQ ID NO: 22949 - DNA, 20 bp, Artificial Sequence
  Antisense compound
gtagccaatgccagtagtgg

SEQ ID NO: 22950 - DNA, 20 bp, Artificial Sequence
  Antisense compound
ggtagccaatgccagtagtg

SEQ ID NO: 22951 - DNA, 20 bp, Artificial Sequence
  Antisense compound
tggtagccaatgccagtagt

SEQ ID NO: 22952 - DNA, 20 bp, Artificial Sequence
  Antisense compound
ttggtagccaatgccagtag

SEQ ID NO: 22953 - DNA, 20 bp, Artificial Sequence
  Antisense compound
gttggtagccaatgccagta

SEQ ID NO: 22954 - DNA, 20 bp, Artificial Sequence
  Antisense compound
ggttggtagccaatgccagt

SEQ ID NO: 22955 - DNA, 20 bp, Artificial Sequence
  Antisense compound
aggttggtagccaatgccag

SEQ ID NO: 22956 - DNA, 20 bp, Artificial Sequence
  Antisense compound
aaggttggtagccaatgcca

SEQ ID NO: 22957 - DNA, 20 bp, Artificial Sequence
  Antisense compound
taaggttggtagccaatgcc

SEQ ID NO: 22958 - DNA, 20 bp, Artificial Sequence
  Antisense compound
gtaaggttggtagccaatgc

SEQ ID NO: 22959 - DNA, 20 bp, Artificial Sequence
  Antisense compound
tgtaaggttggtagccaatg

SEQ ID NO: 22960 - DNA, 20 bp, Artificial Sequence
  Antisense compound
ctgtaaggttggtagccaat

SEQ ID NO: 22961 - DNA, 20 bp, Artificial Sequence
  Antisense compound
tctgtaaggttggtagccaa

SEQ ID NO: 22962 - DNA, 20 bp, Artificial Sequence
  Antisense compound
ctctgtaaggttggtagcca

SEQ ID NO: 22963 - DNA, 20 bp, Artificial Sequence
  Antisense compound
actctgtaaggttggtagcc

SEQ ID NO: 22964 - DNA, 20 bp, Artificial Sequence
  Antisense compound
aactctgtaaggttggtagc

SEQ ID NO: 22965 - DNA, 20 bp, Artificial Sequence
  Antisense compound
caactctgtaaggttggtag

SEQ ID NO: 22966 - DNA, 20 bp, Artificial Sequence
  Antisense compound
acaactctgtaaggttggta

SEQ ID NO: 22967 - DNA, 20 bp, Artificial Sequence
  Antisense compound
tacaactctgtaaggttggt

SEQ ID NO: 22968 - DNA, 20 bp, Artificial Sequence
  Antisense compound
ctacaactctgtaaggttgg

SEQ ID NO: 22969 - DNA, 20 bp, Artificial Sequence
  Antisense compound
actacaactctgtaaggttg

SEQ ID NO: 22970 - DNA, 20 bp, Artificial Sequence
  Antisense compound
tactacaactctgtaaggtt

SEQ ID NO: 22971 - DNA, 20 bp, Artificial Sequence
  Antisense compound
gtactacaactctgtaaggt

SEQ ID NO: 22972 - DNA, 20 bp, Artificial Sequence
  Antisense compound
agtactacaactctgtaagg

SEQ ID NO: 22973 - DNA, 20 bp, Artificial Sequence
  Antisense compound
aagtactacaactctgtaag

SEQ ID NO: 22974 - DNA, 20 bp, Artificial Sequence
  Antisense compound
aaagtactacaactctgtaa

SEQ ID NO: 22975 - DNA, 20 bp, Artificial Sequence
  Antisense compound
gaaagtactacaactctgta

SEQ ID NO: 22976 - DNA, 20 bp, Artificial Sequence
  Antisense compound
agaaagtactacaactctgt

SEQ ID NO: 22977 - DNA, 20 bp, Artificial Sequence
  Antisense compound
aagaaagtactacaactctg

SEQ ID NO: 22978 - DNA, 20 bp, Artificial Sequence
  Antisense compound
aaagaaagtactacaactct

SEQ ID NO: 22979 - DNA, 20 bp, Artificial Sequence
  Antisense compound
aaaagaaagtactacaactc

SEQ ID NO: 22980 - DNA, 20 bp, Artificial Sequence
  Antisense compound
caaaagaaagtactacaact

SEQ ID NO: 22981 - DNA, 20 bp, Artificial Sequence
  Antisense compound
tcaaaagaaagtactacaac

SEQ ID NO: 22982 - DNA, 20 bp, Artificial Sequence
  Antisense compound
ttcaaaagaaagtactacaa

SEQ ID NO: 22983 - DNA, 20 bp, Artificial Sequence
  Antisense compound
gttcaaaagaaagtactaca

SEQ ID NO: 22984 - DNA, 20 bp, Artificial Sequence
  Antisense compound
agttcaaaagaaagtactac

SEQ ID NO: 22985 - DNA, 20 bp, Artificial Sequence
  Antisense compound
aagttcaaaagaaagtacta

SEQ ID NO: 22986 - DNA, 20 bp, Artificial Sequence
  Antisense compound
aaagttcaaaagaaagtact

SEQ ID NO: 22987 - DNA, 20 bp, Artificial Sequence
  Antisense compound
aaaagttcaaaagaaagtac

SEQ ID NO: 22988 - DNA, 20 bp, Artificial Sequence
  Antisense compound
taaaagttcaaaagaaagta

SEQ ID NO: 22989 - DNA, 20 bp, Artificial Sequence
  Antisense compound
ttaaaagttcaaaagaaagt

SEQ ID NO: 22990 - DNA, 20 bp, Artificial Sequence
  Antisense compound
tttaaaagttcaaaagaaag

SEQ ID NO: 22991 - DNA, 20 bp, Artificial Sequence
  Antisense compound
atttaaaagttcaaaagaaa

SEQ ID NO: 22992 - DNA, 20 bp, Artificial Sequence
  Antisense compound
catttaaaagttcaaaagaa

SEQ ID NO: 22993 - DNA, 20 bp, Artificial Sequence
  Antisense compound
gcatttaaaagttcaaaaga

SEQ ID NO: 22994 - DNA, 20 bp, Artificial Sequence
  Antisense compound
tgcatttaaaagttcaaaag

SEQ ID NO: 22995 - DNA, 20 bp, Artificial Sequence
  Antisense compound
gtgcatttaaaagttcaaaa

SEQ ID NO: 22996 - DNA, 20 bp, Artificial Sequence
  Antisense compound
ggtgcatttaaaagttcaaa

SEQ ID NO: 22997 - DNA, 20 bp, Artificial Sequence
  Antisense compound
cggtgcatttaaaagttcaa

SEQ ID NO: 22998 - DNA, 20 bp, Artificial Sequence
  Antisense compound
ccggtgcatttaaaagttca

SEQ ID NO: 22999 - DNA, 20 bp, Artificial Sequence
  Antisense compound
gccggtgcatttaaaagttc

SEQ ID NO: 23000 - DNA, 20 bp, Artificial Sequence
  Antisense compound
ggccggtgcatttaaaagtt

SEQ ID NO: 23001 - DNA, 20 bp, Artificial Sequence
  Antisense compound
tggccggtgcatttaaaagt

SEQ ID NO: 23002 - DNA, 20 bp, Artificial Sequence
  Antisense compound
gtggccggtgcatttaaaag

SEQ ID NO: 23003 - DNA, 20 bp, Artificial Sequence
  Antisense compound
cgtggccggtgcatttaaaa

SEQ ID NO: 23004 - DNA, 20 bp, Artificial Sequence
  Antisense compound
ccgtggccggtgcatttaaa

SEQ ID NO: 23005 - DNA, 20 bp, Artificial Sequence
  Antisense compound
accgtggccggtgcatttaa

SEQ ID NO: 23006 - DNA, 20 bp, Artificial Sequence
  Antisense compound
aaccgtggccggtgcattta

SEQ ID NO: 23007 - DNA, 20 bp, Artificial Sequence
  Antisense compound
aaaccgtggccggtgcattt

SEQ ID NO: 23008 - DNA, 20 bp, Artificial Sequence
  Antisense compound
caaaccgtggccggtgcatt

SEQ ID NO: 23009 - DNA, 20 bp, Artificial Sequence
  Antisense compound
acaaaccgtggccggtgcat

SEQ ID NO: 23010 - DNA, 20 bp, Artificial Sequence
  Antisense compound
cacaaaccgtggccggtgca

SEQ ID NO: 23011 - DNA, 20 bp, Artificial Sequence
  Antisense compound
ccacaaaccgtggccggtgc

SEQ ID NO: 23012 - DNA, 20 bp, Artificial Sequence
  Antisense compound
tccacaaaccgtggccggtg

SEQ ID NO: 23013 - DNA, 20 bp, Artificial Sequence
  Antisense compound
gtccacaaaccgtggccggt

SEQ ID NO: 23014 - DNA, 20 bp, Artificial Sequence
  Antisense compound
ggtccacaaaccgtggccgg

SEQ ID NO: 23015 - DNA, 20 bp, Artificial Sequence
  Antisense compound
tggtccacaaaccgtggccg

SEQ ID NO: 23016 - DNA, 20 bp, Artificial Sequence
  Antisense compound
ttggtccacaaaccgtggcc

SEQ ID NO: 23017 - DNA, 20 bp, Artificial Sequence
  Antisense compound
tttggtccacaaaccgtggc

SEQ ID NO: 23018 - DNA, 20 bp, Artificial Sequence
  Antisense compound
ttttggtccacaaaccgtgg

SEQ ID NO: 23019 - DNA, 20 bp, Artificial Sequence
  Antisense compound
attttggtccacaaaccgtg

SEQ ID NO: 23020 - DNA, 20 bp, Artificial Sequence
  Antisense compound
aattttggtccacaaaccgt

SEQ ID NO: 23021 - DNA, 20 bp, Artificial Sequence
  Antisense compound
taattttggtccacaaaccg

SEQ ID NO: 23022 - DNA, 20 bp, Artificial Sequence
  Antisense compound
ataattttggtccacaaacc

SEQ ID NO: 23023 - DNA, 20 bp, Artificial Sequence
  Antisense compound
gataattttggtccacaaac

SEQ ID NO: 23024 - DNA, 20 bp, Artificial Sequence
  Antisense compound
ggataattttggtccacaaa

SEQ ID NO: 23025 - DNA, 20 bp, Artificial Sequence
  Antisense compound
tggataattttggtccacaa

SEQ ID NO: 23026 - DNA, 20 bp, Artificial Sequence
  Antisense compound
gtggataattttggtccaca

SEQ ID NO: 23027 - DNA, 20 bp, Artificial Sequence
  Antisense compound
agtggataattttggtccac

SEQ ID NO: 23028 - DNA, 20 bp, Artificial Sequence
  Antisense compound
cagtggataattttggtcca

SEQ ID NO: 23029 - DNA, 20 bp, Artificial Sequence
  Antisense compound
tcagtggataattttggtcc

SEQ ID NO: 23030 - DNA, 20 bp, Artificial Sequence
  Antisense compound
gtcagtggataattttggtc

SEQ ID NO: 23031 - DNA, 20 bp, Artificial Sequence
  Antisense compound
ggtcagtggataattttggt

SEQ ID NO: 23032 - DNA, 20 bp, Artificial Sequence
  Antisense compound
aggtcagtggataattttgg

SEQ ID NO: 23033 - DNA, 20 bp, Artificial Sequence
  Antisense compound
aaggtcagtggataattttg

SEQ ID NO: 23034 - DNA, 20 bp, Artificial Sequence
  Antisense compound
taaggtcagtggataatttt

SEQ ID NO: 23035 - DNA, 20 bp, Artificial Sequence
  Antisense compound
ataaggtcagtggataattt

SEQ ID NO: 23036 - DNA, 20 bp, Artificial Sequence
  Antisense compound
aataaggtcagtggataatt

SEQ ID NO: 23037 - DNA, 20 bp, Artificial Sequence
  Antisense compound
taataaggtcagtggataat

SEQ ID NO: 23038 - DNA, 20 bp, Artificial Sequence
  Antisense compound
ttaataaggtcagtggataa

SEQ ID NO: 23039 - DNA, 20 bp, Artificial Sequence
  Antisense compound
cttaataaggtcagtggata

SEQ ID NO: 23040 - DNA, 20 bp, Artificial Sequence
  Antisense compound
tcttaataaggtcagtggat

SEQ ID NO: 23041 - DNA, 20 bp, Artificial Sequence
  Antisense compound
ttcttaataaggtcagtgga

SEQ ID NO: 23042 - DNA, 20 bp, Artificial Sequence
  Antisense compound
gttcttaataaggtcagtgg

SEQ ID NO: 23043 - DNA, 20 bp, Artificial Sequence
  Antisense compound
ggttcttaataaggtcagtg

SEQ ID NO: 23044 - DNA, 20 bp, Artificial Sequence
  Antisense compound
tggttcttaataaggtcagt

SEQ ID NO: 23045 - DNA, 20 bp, Artificial Sequence
  Antisense compound
ctggttcttaataaggtcag

SEQ ID NO: 23046 - DNA, 20 bp, Artificial Sequence
  Antisense compound
actggttcttaataaggtca

SEQ ID NO: 23047 - DNA, 20 bp, Artificial Sequence
  Antisense compound
cactggttcttaataaggtc

SEQ ID NO: 23048 - DNA, 20 bp, Artificial Sequence
  Antisense compound
acactggttcttaataaggt

SEQ ID NO: 23049 - DNA, 20 bp, Artificial Sequence
  Antisense compound
cacactggttcttaataagg

SEQ ID NO: 23050 - DNA, 20 bp, Artificial Sequence
  Antisense compound
acacactggttcttaataag

SEQ ID NO: 23051 - DNA, 20 bp, Artificial Sequence
  Antisense compound
gacacactggttcttaataa

SEQ ID NO: 23052 - DNA, 20 bp, Artificial Sequence
  Antisense compound
tgacacactggttcttaata

SEQ ID NO: 23053 - DNA, 20 bp, Artificial Sequence
  Antisense compound
ttgacacactggttcttaat

SEQ ID NO: 23054 - DNA, 20 bp, Artificial Sequence
  Antisense compound
attgacacactggttcttaa

SEQ ID NO: 23055 - DNA, 20 bp, Artificial Sequence
  Antisense compound
aattgacacactggttctta

SEQ ID NO: 23056 - DNA, 20 bp, Artificial Sequence
  Antisense compound
aaattgacacactggttctt

SEQ ID NO: 23057 - DNA, 20 bp, Artificial Sequence
  Antisense compound
aaaattgacacactggttct

SEQ ID NO: 23058 - DNA, 20 bp, Artificial Sequence
  Antisense compound
taaaattgacacactggttc

SEQ ID NO: 23059 - DNA, 20 bp, Artificial Sequence
  Antisense compound
ttaaaattgacacactggtt

SEQ ID NO: 23060 - DNA, 20 bp, Artificial Sequence
  Antisense compound
attaaaattgacacactggt

SEQ ID NO: 23061 - DNA, 20 bp, Artificial Sequence
  Antisense compound
aattaaaattgacacactgg

SEQ ID NO: 23062 - DNA, 20 bp, Artificial Sequence
  Antisense compound
aaattaaaattgacacactg

SEQ ID NO: 23063 - DNA, 20 bp, Artificial Sequence
  Antisense compound
aaaattaaaattgacacact

SEQ ID NO: 23064 - DNA, 20 bp, Artificial Sequence
  Antisense compound
taaaattaaaattgacacac

SEQ ID NO: 23065 - DNA, 20 bp, Artificial Sequence
  Antisense compound
ttaaaattaaaattgacaca

SEQ ID NO: 23066 - DNA, 20 bp, Artificial Sequence
  Antisense compound
attaaaattaaaattgacac

SEQ ID NO: 23067 - DNA, 20 bp, Artificial Sequence
  Antisense compound
cattaaaattaaaattgaca

SEQ ID NO: 23068 - DNA, 20 bp, Artificial Sequence
  Antisense compound
ccattaaaattaaaattgac

SEQ ID NO: 23069 - DNA, 20 bp, Artificial Sequence
  Antisense compound
tccattaaaattaaaattga

SEQ ID NO: 23070 - DNA, 20 bp, Artificial Sequence
  Antisense compound
gtccattaaaattaaaattg

SEQ ID NO: 23071 - DNA, 20 bp, Artificial Sequence
  Antisense compound
agtccattaaaattaaaatt

SEQ ID NO: 23072 - DNA, 20 bp, Artificial Sequence
  Antisense compound
gagtccattaaaattaaaat

SEQ ID NO: 23073 - DNA, 20 bp, Artificial Sequence
  Antisense compound
tgagtccattaaaattaaaa

SEQ ID NO: 23074 - DNA, 20 bp, Artificial Sequence
  Antisense compound
gtgagtccattaaaattaaa

SEQ ID NO: 23075 - DNA, 20 bp, Artificial Sequence
  Antisense compound
agtgagtccattaaaattaa

SEQ ID NO: 23076 - DNA, 20 bp, Artificial Sequence
  Antisense compound
cagtgagtccattaaaatta

SEQ ID NO: 23077 - DNA, 20 bp, Artificial Sequence
  Antisense compound
ccagtgagtccattaaaatt

SEQ ID NO: 23078 - DNA, 20 bp, Artificial Sequence
  Antisense compound
accagtgagtccattaaaat

SEQ ID NO: 23079 - DNA, 20 bp, Artificial Sequence
  Antisense compound
taccagtgagtccattaaaa

SEQ ID NO: 23080 - DNA, 20 bp, Artificial Sequence
  Antisense compound
gtaccagtgagtccattaaa

SEQ ID NO: 23081 - DNA, 20 bp, Artificial Sequence
  Antisense compound
agtaccagtgagtccattaa

SEQ ID NO: 23082 - DNA, 20 bp, Artificial Sequence
  Antisense compound
cagtaccagtgagtccatta

SEQ ID NO: 23083 - DNA, 20 bp, Artificial Sequence
  Antisense compound
ccagtaccagtgagtccatt

SEQ ID NO: 23084 - DNA, 20 bp, Artificial Sequence
  Antisense compound
accagtaccagtgagtccat

SEQ ID NO: 23085 - DNA, 20 bp, Artificial Sequence
  Antisense compound
caccagtaccagtgagtcca

SEQ ID NO: 23086 - DNA, 20 bp, Artificial Sequence
  Antisense compound
acaccagtaccagtgagtcc

SEQ ID NO: 23087 - DNA, 20 bp, Artificial Sequence
  Antisense compound
cacaccagtaccagtgagtc

SEQ ID NO: 23088 - DNA, 20 bp, Artificial Sequence
  Antisense compound
acacaccagtaccagtgagt

SEQ ID NO: 23089 - DNA, 20 bp, Artificial Sequence
  Antisense compound
aacacaccagtaccagtgag

SEQ ID NO: 23090 - DNA, 20 bp, Artificial Sequence
  Antisense compound
taacacaccagtaccagtga

SEQ ID NO: 23091 - DNA, 20 bp, Artificial Sequence
  Antisense compound
ttaacacaccagtaccagtg

SEQ ID NO: 23092 - DNA, 20 bp, Artificial Sequence
  Antisense compound
gttaacacaccagtaccagt

SEQ ID NO: 23093 - DNA, 20 bp, Artificial Sequence
  Antisense compound
agttaacacaccagtaccag

SEQ ID NO: 23094 - DNA, 20 bp, Artificial Sequence
  Antisense compound
gagttaacacaccagtacca

SEQ ID NO: 23095 - DNA, 20 bp, Artificial Sequence
  Antisense compound
ggagttaacacaccagtacc

SEQ ID NO: 23096 - DNA, 20 bp, Artificial Sequence
  Antisense compound
aggagttaacacaccagtac

SEQ ID NO: 23097 - DNA, 20 bp, Artificial Sequence
  Antisense compound
aaggagttaacacaccagta

SEQ ID NO: 23098 - DNA, 20 bp, Artificial Sequence
  Antisense compound
gaaggagttaacacaccagt

SEQ ID NO: 23099 - DNA, 20 bp, Artificial Sequence
  Antisense compound
agaaggagttaacacaccag

SEQ ID NO: 23100 - DNA, 20 bp, Artificial Sequence
  Antisense compound
aagaaggagttaacacacca

SEQ ID NO: 23101 - DNA, 20 bp, Artificial Sequence
  Antisense compound
gaagaaggagttaacacacc

SEQ ID NO: 23102 - DNA, 20 bp, Artificial Sequence
  Antisense compound
tgaagaaggagttaacacac

SEQ ID NO: 23103 - DNA, 20 bp, Artificial Sequence
  Antisense compound
ttgaagaaggagttaacaca

SEQ ID NO: 23104 - DNA, 20 bp, Artificial Sequence
  Antisense compound
tttgaagaaggagttaacac

SEQ ID NO: 23105 - DNA, 20 bp, Artificial Sequence
  Antisense compound
ctttgaagaaggagttaaca

SEQ ID NO: 23106 - DNA, 20 bp, Artificial Sequence
  Antisense compound
tctttgaagaaggagttaac

SEQ ID NO: 23107 - DNA, 20 bp, Artificial Sequence
  Antisense compound
ctctttgaagaaggagttaa

SEQ ID NO: 23108 - DNA, 20 bp, Artificial Sequence
  Antisense compound
tctctttgaagaaggagtta

SEQ ID NO: 23109 - DNA, 20 bp, Artificial Sequence
  Antisense compound
atctctttgaagaaggagtt

SEQ ID NO: 23110 - DNA, 20 bp, Artificial Sequence
  Antisense compound
aatctctttgaagaaggagt

SEQ ID NO: 23111 - DNA, 20 bp, Artificial Sequence
  Antisense compound
aaatctctttgaagaaggag

SEQ ID NO: 23112 - DNA, 20 bp, Artificial Sequence
  Antisense compound
gaaatctctttgaagaagga

SEQ ID NO: 23113 - DNA, 20 bp, Artificial Sequence
  Antisense compound
tgaaatctctttgaagaagg

SEQ ID NO: 23114 - DNA, 20 bp, Artificial Sequence
  Antisense compound
ttgaaatctctttgaagaag

SEQ ID NO: 23115 - DNA, 20 bp, Artificial Sequence
  Antisense compound
gttgaaatctctttgaagaa

SEQ ID NO: 23116 - DNA, 20 bp, Artificial Sequence
  Antisense compound
ggttgaaatctctttgaaga

SEQ ID NO: 23117 - DNA, 20 bp, Artificial Sequence
  Antisense compound
tggttgaaatctctttgaag

SEQ ID NO: 23118 - DNA, 20 bp, Artificial Sequence
  Antisense compound
atggttgaaatctctttgaa

SEQ ID NO: 23119 - DNA, 20 bp, Artificial Sequence
  Antisense compound
aatggttgaaatctctttga

SEQ ID NO: 23120 - DNA, 20 bp, Artificial Sequence
  Antisense compound
aaatggttgaaatctctttg

SEQ ID NO: 23121 - DNA, 20 bp, Artificial Sequence
  Antisense compound
gaaatggttgaaatctcttt

SEQ ID NO: 23122 - DNA, 20 bp, Artificial Sequence
  Antisense compound
tgaaatggttgaaatctctt

SEQ ID NO: 23123 - DNA, 20 bp, Artificial Sequence
  Antisense compound
ttgaaatggttgaaatctct

SEQ ID NO: 23124 - DNA, 20 bp, Artificial Sequence
  Antisense compound
gttgaaatggttgaaatctc

SEQ ID NO: 23125 - DNA, 20 bp, Artificial Sequence
  Antisense compound
tgttgaaatggttgaaatct

SEQ ID NO: 23126 - DNA, 20 bp, Artificial Sequence
  Antisense compound
ttgttgaaatggttgaaatc

SEQ ID NO: 23127 - DNA, 20 bp, Artificial Sequence
  Antisense compound
attgttgaaatggttgaaat

SEQ ID NO: 23128 - DNA, 20 bp, Artificial Sequence
  Antisense compound
aattgttgaaatggttgaaa

SEQ ID NO: 23129 - DNA, 20 bp, Artificial Sequence
  Antisense compound
aaattgttgaaatggttgaa

SEQ ID NO: 23130 - DNA, 20 bp, Artificial Sequence
  Antisense compound
caaattgttgaaatggttga

SEQ ID NO: 23131 - DNA, 20 bp, Artificial Sequence
  Antisense compound
ccaaattgttgaaatggttg

SEQ ID NO: 23132 - DNA, 20 bp, Artificial Sequence
  Antisense compound
gccaaattgttgaaatggtt

SEQ ID NO: 23133 - DNA, 20 bp, Artificial Sequence
  Antisense compound
ggccaaattgttgaaatggt

SEQ ID NO: 23134 - DNA, 20 bp, Artificial Sequence
  Antisense compound
cggccaaattgttgaaatgg

SEQ ID NO: 23135 - DNA, 20 bp, Artificial Sequence
  Antisense compound
acggccaaattgttgaaatg

SEQ ID NO: 23136 - DNA, 20 bp, Artificial Sequence
  Antisense compound
cacggccaaattgttgaaat

SEQ ID NO: 23137 - DNA, 20 bp, Artificial Sequence
  Antisense compound
tcacggccaaattgttgaaa

SEQ ID NO: 23138 - DNA, 20 bp, Artificial Sequence
  Antisense compound
atcacggccaaattgttgaa

SEQ ID NO: 23139 - DNA, 20 bp, Artificial Sequence
  Antisense compound
catcacggccaaattgttga

SEQ ID NO: 23140 - DNA, 20 bp, Artificial Sequence
  Antisense compound
acatcacggccaaattgttg

SEQ ID NO: 23141 - DNA, 20 bp, Artificial Sequence
  Antisense compound
aacatcacggccaaattgtt

SEQ ID NO: 23142 - DNA, 20 bp, Artificial Sequence
  Antisense compound
aaacatcacggccaaattgt

SEQ ID NO: 23143 - DNA, 20 bp, Artificial Sequence
  Antisense compound
gaaacatcacggccaaattg

SEQ ID NO: 23144 - DNA, 20 bp, Artificial Sequence
  Antisense compound
agaaacatcacggccaaatt

SEQ ID NO: 23145 - DNA, 20 bp, Artificial Sequence
  Antisense compound
cagaaacatcacggccaaat

SEQ ID NO: 23146 - DNA, 20 bp, Artificial Sequence
  Antisense compound
tcagaaacatcacggccaaa

SEQ ID NO: 23147 - DNA, 20 bp, Artificial Sequence
  Antisense compound
atcagaaacatcacggccaa

SEQ ID NO: 23148 - DNA, 20 bp, Artificial Sequence
  Antisense compound
aatcagaaacatcacggcca

SEQ ID NO: 23149 - DNA, 20 bp, Artificial Sequence
  Antisense compound
aaatcagaaacatcacggcc

SEQ ID NO: 23150 - DNA, 20 bp, Artificial Sequence
  Antisense compound
gaaatcagaaacatcacggc

SEQ ID NO: 23151 - DNA, 20 bp, Artificial Sequence
  Antisense compound
tgaaatcagaaacatcacgg

SEQ ID NO: 23152 - DNA, 20 bp, Artificial Sequence
  Antisense compound
gtgaaatcagaaacatcacg

SEQ ID NO: 23153 - DNA, 20 bp, Artificial Sequence
  Antisense compound
agtgaaatcagaaacatcac

SEQ ID NO: 23154 - DNA, 20 bp, Artificial Sequence
  Antisense compound
cagtgaaatcagaaacatca

SEQ ID NO: 23155 - DNA, 20 bp, Artificial Sequence
  Antisense compound
tcagtgaaatcagaaacatc

SEQ ID NO: 23156 - DNA, 20 bp, Artificial Sequence
  Antisense compound
atcagtgaaatcagaaacat

SEQ ID NO: 23157 - DNA, 20 bp, Artificial Sequence
  Antisense compound
aatcagtgaaatcagaaaca

SEQ ID NO: 23158 - DNA, 20 bp, Artificial Sequence
  Antisense compound
gaatcagtgaaatcagaaac

SEQ ID NO: 23159 - DNA, 20 bp, Artificial Sequence
  Antisense compound
ggaatcagtgaaatcagaaa

SEQ ID NO: 23160 - DNA, 20 bp, Artificial Sequence
  Antisense compound
cggaatcagtgaaatcagaa

SEQ ID NO: 23161 - DNA, 20 bp, Artificial Sequence
  Antisense compound
acggaatcagtgaaatcaga

SEQ ID NO: 23162 - DNA, 20 bp, Artificial Sequence
  Antisense compound
aacggaatcagtgaaatcag

SEQ ID NO: 23163 - DNA, 20 bp, Artificial Sequence
  Antisense compound
gaacggaatcagtgaaatca

SEQ ID NO: 23164 - DNA, 20 bp, Artificial Sequence
  Antisense compound
cgaacggaatcagtgaaatc

SEQ ID NO: 23165 - DNA, 20 bp, Artificial Sequence
  Antisense compound
tcgaacggaatcagtgaaat

SEQ ID NO: 23166 - DNA, 20 bp, Artificial Sequence
  Antisense compound
ctcgaacggaatcagtgaaa

SEQ ID NO: 23167 - DNA, 20 bp, Artificial Sequence
  Antisense compound
tctcgaacggaatcagtgaa

SEQ ID NO: 23168 - DNA, 20 bp, Artificial Sequence
  Antisense compound
atctcgaacggaatcagtga

SEQ ID NO: 23169 - DNA, 20 bp, Artificial Sequence
  Antisense compound
gatctcgaacggaatcagtg

SEQ ID NO: 23170 - DNA, 20 bp, Artificial Sequence
  Antisense compound
ggatctcgaacggaatcagt

SEQ ID NO: 23171 - DNA, 20 bp, Artificial Sequence
  Antisense compound
aggatctcgaacggaatcag

SEQ ID NO: 23172 - DNA, 20 bp, Artificial Sequence
  Antisense compound
taggatctcgaacggaatca

SEQ ID NO: 23173 - DNA, 20 bp, Artificial Sequence
  Antisense compound
ttaggatctcgaacggaatc

SEQ ID NO: 23174 - DNA, 20 bp, Artificial Sequence
  Antisense compound
tttaggatctcgaacggaat

SEQ ID NO: 23175 - DNA, 20 bp, Artificial Sequence
  Antisense compound
ttttaggatctcgaacggaa

SEQ ID NO: 23176 - DNA, 20 bp, Artificial Sequence
  Antisense compound
gttttaggatctcgaacgga

SEQ ID NO: 23177 - DNA, 20 bp, Artificial Sequence
  Antisense compound
tgttttaggatctcgaacgg

SEQ ID NO: 23178 - DNA, 20 bp, Artificial Sequence
  Antisense compound
atgttttaggatctcgaacg

SEQ ID NO: 23179 - DNA, 20 bp, Artificial Sequence
  Antisense compound
gatgttttaggatctcgaac

SEQ ID NO: 23180 - DNA, 20 bp, Artificial Sequence
  Antisense compound
agatgttttaggatctcgaa

SEQ ID NO: 23181 - DNA, 20 bp, Artificial Sequence
  Antisense compound
cagatgttttaggatctcga

SEQ ID NO: 23182 - DNA, 20 bp, Artificial Sequence
  Antisense compound
tcagatgttttaggatctcg

SEQ ID NO: 23183 - DNA, 20 bp, Artificial Sequence
  Antisense compound
ttcagatgttttaggatctc

SEQ ID NO: 23184 - DNA, 20 bp, Artificial Sequence
  Antisense compound
tttcagatgttttaggatct

SEQ ID NO: 23185 - DNA, 20 bp, Artificial Sequence
  Antisense compound
atttcagatgttttaggatc

SEQ ID NO: 23186 - DNA, 20 bp, Artificial Sequence
  Antisense compound
tatttcagatgttttaggat

SEQ ID NO: 23187 - DNA, 20 bp, Artificial Sequence
  Antisense compound
atatttcagatgttttagga

SEQ ID NO: 23188 - DNA, 20 bp, Artificial Sequence
  Antisense compound
aatatttcagatgttttagg

SEQ ID NO: 23189 - DNA, 20 bp, Artificial Sequence
  Antisense compound
taatatttcagatgttttag

SEQ ID NO: 23190 - DNA, 20 bp, Artificial Sequence
  Antisense compound
ctaatatttcagatgtttta

SEQ ID NO: 23191 - DNA, 20 bp, Artificial Sequence
  Antisense compound
tctaatatttcagatgtttt

SEQ ID NO: 23192 - DNA, 20 bp, Artificial Sequence
  Antisense compound
gtctaatatttcagatgttt

SEQ ID NO: 23193 - DNA, 20 bp, Artificial Sequence
  Antisense compound
tgtctaatatttcagatgtt

SEQ ID NO: 23194 - DNA, 20 bp, Artificial Sequence
  Antisense compound
atgtctaatatttcagatgt

SEQ ID NO: 23195 - DNA, 20 bp, Artificial Sequence
  Antisense compound
aatgtctaatatttcagatg

SEQ ID NO: 23196 - DNA, 20 bp, Artificial Sequence
  Antisense compound
aaatgtctaatatttcagat

SEQ ID NO: 23197 - DNA, 20 bp, Artificial Sequence
  Antisense compound
gaaatgtctaatatttcaga

SEQ ID NO: 23198 - DNA, 20 bp, Artificial Sequence
  Antisense compound
tgaaatgtctaatatttcag

SEQ ID NO: 23199 - DNA, 20 bp, Artificial Sequence
  Antisense compound
gtgaaatgtctaatatttca

SEQ ID NO: 23200 - DNA, 20 bp, Artificial Sequence
  Antisense compound
ggtgaaatgtctaatatttc

SEQ ID NO: 23201 - DNA, 20 bp, Artificial Sequence
  Antisense compound
aggtgaaatgtctaatattt

SEQ ID NO: 23202 - DNA, 20 bp, Artificial Sequence
  Antisense compound
aaggtgaaatgtctaatatt

SEQ ID NO: 23203 - DNA, 20 bp, Artificial Sequence
  Antisense compound
caaggtgaaatgtctaatat

SEQ ID NO: 23204 - DNA, 20 bp, Artificial Sequence
  Antisense compound
gcaaggtgaaatgtctaata

SEQ ID NO: 23205 - DNA, 20 bp, Artificial Sequence
  Antisense compound
cgcaaggtgaaatgtctaat

SEQ ID NO: 23206 - DNA, 20 bp, Artificial Sequence
  Antisense compound
gcgcaaggtgaaatgtctaa

SEQ ID NO: 23207 - DNA, 20 bp, Artificial Sequence
  Antisense compound
agcgcaaggtgaaatgtcta

SEQ ID NO: 23208 - DNA, 20 bp, Artificial Sequence
  Antisense compound
aagcgcaaggtgaaatgtct

SEQ ID NO: 23209 - DNA, 20 bp, Artificial Sequence
  Antisense compound
aaagcgcaaggtgaaatgtc

SEQ ID NO: 23210 - DNA, 20 bp, Artificial Sequence
  Antisense compound
aaaagcgcaaggtgaaatgt

SEQ ID NO: 23211 - DNA, 20 bp, Artificial Sequence
  Antisense compound
caaaagcgcaaggtgaaatg

SEQ ID NO: 23212 - DNA, 20 bp, Artificial Sequence
  Antisense compound
ccaaaagcgcaaggtgaaat

SEQ ID NO: 23213 - DNA, 20 bp, Artificial Sequence
  Antisense compound
cccaaaagcgcaaggtgaaa

SEQ ID NO: 23214 - DNA, 20 bp, Artificial Sequence
  Antisense compound
ccccaaaagcgcaaggtgaa

SEQ ID NO: 23215 - DNA, 20 bp, Artificial Sequence
  Antisense compound
cccccaaaagcgcaaggtga

SEQ ID NO: 23216 - DNA, 20 bp, Artificial Sequence
  Antisense compound
acccccaaaagcgcaaggtg

SEQ ID NO: 23217 - DNA, 20 bp, Artificial Sequence
  Antisense compound
cacccccaaaagcgcaaggt

SEQ ID NO: 23218 - DNA, 20 bp, Artificial Sequence
  Antisense compound
acacccccaaaagcgcaagg

SEQ ID NO: 23219 - DNA, 20 bp, Artificial Sequence
  Antisense compound
tacacccccaaaagcgcaag

SEQ ID NO: 23220 - DNA, 20 bp, Artificial Sequence
  Antisense compound
ttacacccccaaaagcgcaa

SEQ ID NO: 23221 - DNA, 20 bp, Artificial Sequence
  Antisense compound
cttacacccccaaaagcgca

SEQ ID NO: 23222 - DNA, 20 bp, Artificial Sequence
  Antisense compound
acttacacccccaaaagcgc

SEQ ID NO: 23223 - DNA, 20 bp, Artificial Sequence
  Antisense compound
cacttacacccccaaaagcg

SEQ ID NO: 23224 - DNA, 20 bp, Artificial Sequence
  Antisense compound
acacttacacccccaaaagc

SEQ ID NO: 23225 - DNA, 20 bp, Artificial Sequence
  Antisense compound
tacacttacacccccaaaag

SEQ ID NO: 23226 - DNA, 20 bp, Artificial Sequence
  Antisense compound
ttacacttacacccccaaaa

SEQ ID NO: 23227 - DNA, 20 bp, Artificial Sequence
  Antisense compound
attacacttacacccccaaa

SEQ ID NO: 23228 - DNA, 20 bp, Artificial Sequence
  Antisense compound
aattacacttacacccccaa

SEQ ID NO: 23229 - DNA, 20 bp, Artificial Sequence
  Antisense compound
taattacacttacaccccca

SEQ ID NO: 23230 - DNA, 20 bp, Artificial Sequence
  Antisense compound
gtaattacacttacaccccc

SEQ ID NO: 23231 - DNA, 20 bp, Artificial Sequence
  Antisense compound
tgtaattacacttacacccc

SEQ ID NO: 23232 - DNA, 20 bp, Artificial Sequence
  Antisense compound
gtgtaattacacttacaccc

SEQ ID NO: 23233 - DNA, 20 bp, Artificial Sequence
  Antisense compound
ggtgtaattacacttacacc

SEQ ID NO: 23234 - DNA, 20 bp, Artificial Sequence
  Antisense compound
aggtgtaattacacttacac

SEQ ID NO: 23235 - DNA, 20 bp, Artificial Sequence
  Antisense compound
caggtgtaattacacttaca

SEQ ID NO: 23236 - DNA, 20 bp, Artificial Sequence
  Antisense compound
ccaggtgtaattacacttac

SEQ ID NO: 23237 - DNA, 20 bp, Artificial Sequence
  Antisense compound
tccaggtgtaattacactta

SEQ ID NO: 23238 - DNA, 20 bp, Artificial Sequence
  Antisense compound
ttccaggtgtaattacactt

SEQ ID NO: 23239 - DNA, 20 bp, Artificial Sequence
  Antisense compound
gttccaggtgtaattacact

SEQ ID NO: 23240 - DNA, 20 bp, Artificial Sequence
  Antisense compound
tgttccaggtgtaattacac

SEQ ID NO: 23241 - DNA, 20 bp, Artificial Sequence
  Antisense compound
ttgttccaggtgtaattaca

SEQ ID NO: 23242 - DNA, 20 bp, Artificial Sequence
  Antisense compound
tttgttccaggtgtaattac

SEQ ID NO: 23243 - DNA, 20 bp, Artificial Sequence
  Antisense compound
atttgttccaggtgtaatta

SEQ ID NO: 23244 - DNA, 20 bp, Artificial Sequence
  Antisense compound
catttgttccaggtgtaatt

SEQ ID NO: 23245 - DNA, 20 bp, Artificial Sequence
  Antisense compound
gcatttgttccaggtgtaat

SEQ ID NO: 23246 - DNA, 20 bp, Artificial Sequence
  Antisense compound
agcatttgttccaggtgtaa

SEQ ID NO: 23247 - DNA, 20 bp, Artificial Sequence
  Antisense compound
aagcatttgttccaggtgta

SEQ ID NO: 23248 - DNA, 20 bp, Artificial Sequence
  Antisense compound
gaagcatttgttccaggtgt

SEQ ID NO: 23249 - DNA, 20 bp, Artificial Sequence
  Antisense compound
tgaagcatttgttccaggtg

SEQ ID NO: 23250 - DNA, 20 bp, Artificial Sequence
  Antisense compound
atgaagcatttgttccaggt

SEQ ID NO: 23251 - DNA, 20 bp, Artificial Sequence
  Antisense compound
gatgaagcatttgttccagg

SEQ ID NO: 23252 - DNA, 20 bp, Artificial Sequence
  Antisense compound
agatgaagcatttgttccag

SEQ ID NO: 23253 - DNA, 20 bp, Artificial Sequence
  Antisense compound
cagatgaagcatttgttcca

SEQ ID NO: 23254 - DNA, 20 bp, Artificial Sequence
  Antisense compound
tcagatgaagcatttgttcc

SEQ ID NO: 23255 - DNA, 20 bp, Artificial Sequence
  Antisense compound
ttcagatgaagcatttgttc

SEQ ID NO: 23256 - DNA, 20 bp, Artificial Sequence
  Antisense compound
cttcagatgaagcatttgtt

SEQ ID NO: 23257 - DNA, 20 bp, Artificial Sequence
  Antisense compound
acttcagatgaagcatttgt

SEQ ID NO: 23258 - DNA, 20 bp, Artificial Sequence
  Antisense compound
aacttcagatgaagcatttg

SEQ ID NO: 23259 - DNA, 20 bp, Artificial Sequence
  Antisense compound
caacttcagatgaagcattt

SEQ ID NO: 23260 - DNA, 20 bp, Artificial Sequence
  Antisense compound
gcaacttcagatgaagcatt

SEQ ID NO: 23261 - DNA, 20 bp, Artificial Sequence
  Antisense compound
agcaacttcagatgaagcat

SEQ ID NO: 23262 - DNA, 20 bp, Artificial Sequence
  Antisense compound
cagcaacttcagatgaagca

SEQ ID NO: 23263 - DNA, 20 bp, Artificial Sequence
  Antisense compound
acagcaacttcagatgaagc

SEQ ID NO: 23264 - DNA, 20 bp, Artificial Sequence
  Antisense compound
aacagcaacttcagatgaag

SEQ ID NO: 23265 - DNA, 20 bp, Artificial Sequence
  Antisense compound
gaacagcaacttcagatgaa

SEQ ID NO: 23266 - DNA, 20 bp, Artificial Sequence
  Antisense compound
agaacagcaacttcagatga

SEQ ID NO: 23267 - DNA, 20 bp, Artificial Sequence
  Antisense compound
tagaacagcaacttcagatg

SEQ ID NO: 23268 - DNA, 20 bp, Artificial Sequence
  Antisense compound
atagaacagcaacttcagat

SEQ ID NO: 23269 - DNA, 20 bp, Artificial Sequence
  Antisense compound
tatagaacagcaacttcaga

SEQ ID NO: 23270 - DNA, 20 bp, Artificial Sequence
  Antisense compound
atatagaacagcaacttcag

SEQ ID NO: 23271 - DNA, 20 bp, Artificial Sequence
  Antisense compound
gatatagaacagcaacttca

SEQ ID NO: 23272 - DNA, 20 bp, Artificial Sequence
  Antisense compound
tgatatagaacagcaacttc

SEQ ID NO: 23273 - DNA, 20 bp, Artificial Sequence
  Antisense compound
ttgatatagaacagcaactt

SEQ ID NO: 23274 - DNA, 20 bp, Artificial Sequence
  Antisense compound
cttgatatagaacagcaact

SEQ ID NO: 23275 - DNA, 20 bp, Artificial Sequence
  Antisense compound
tcttgatatagaacagcaac

SEQ ID NO: 23276 - DNA, 20 bp, Artificial Sequence
  Antisense compound
atcttgatatagaacagcaa

SEQ ID NO: 23277 - DNA, 20 bp, Artificial Sequence
  Antisense compound
catcttgatatagaacagca

SEQ ID NO: 23278 - DNA, 20 bp, Artificial Sequence
  Antisense compound
acatcttgatatagaacagc

SEQ ID NO: 23279 - DNA, 20 bp, Artificial Sequence
  Antisense compound
aacatcttgatatagaacag

SEQ ID NO: 23280 - DNA, 20 bp, Artificial Sequence
  Antisense compound
taacatcttgatatagaaca

SEQ ID NO: 23281 - DNA, 20 bp, Artificial Sequence
  Antisense compound
ttaacatcttgatatagaac

SEQ ID NO: 23282 - DNA, 20 bp, Artificial Sequence
  Antisense compound
gttaacatcttgatatagaa

SEQ ID NO: 23283 - DNA, 20 bp, Artificial Sequence
  Antisense compound
agttaacatcttgatataga

SEQ ID NO: 23284 - DNA, 20 bp, Artificial Sequence
  Antisense compound
cagttaacatcttgatatag

SEQ ID NO: 23285 - DNA, 20 bp, Artificial Sequence
  Antisense compound
gcagttaacatcttgatata

SEQ ID NO: 23286 - DNA, 20 bp, Artificial Sequence
  Antisense compound
tgcagttaacatcttgatat

SEQ ID NO: 23287 - DNA, 20 bp, Artificial Sequence
  Antisense compound
gtgcagttaacatcttgata

SEQ ID NO: 23288 - DNA, 20 bp, Artificial Sequence
  Antisense compound
agtgcagttaacatcttgat

SEQ ID NO: 23289 - DNA, 20 bp, Artificial Sequence
  Antisense compound
cagtgcagttaacatcttga

SEQ ID NO: 23290 - DNA, 20 bp, Artificial Sequence
  Antisense compound
tcagtgcagttaacatcttg

SEQ ID NO: 23291 - DNA, 20 bp, Artificial Sequence
  Antisense compound
atcagtgcagttaacatctt

SEQ ID NO: 23292 - DNA, 20 bp, Artificial Sequence
  Antisense compound
catcagtgcagttaacatct

SEQ ID NO: 23293 - DNA, 20 bp, Artificial Sequence
  Antisense compound
acatcagtgcagttaacatc

SEQ ID NO: 23294 - DNA, 20 bp, Artificial Sequence
  Antisense compound
aacatcagtgcagttaacat

SEQ ID NO: 23295 - DNA, 20 bp, Artificial Sequence
  Antisense compound
aaacatcagtgcagttaaca

SEQ ID NO: 23296 - DNA, 20 bp, Artificial Sequence
  Antisense compound
gaaacatcagtgcagttaac

SEQ ID NO: 23297 - DNA, 20 bp, Artificial Sequence
  Antisense compound
agaaacatcagtgcagttaa

SEQ ID NO: 23298 - DNA, 20 bp, Artificial Sequence
  Antisense compound
tagaaacatcagtgcagtta

SEQ ID NO: 23299 - DNA, 20 bp, Artificial Sequence
  Antisense compound
gtagaaacatcagtgcagtt

SEQ ID NO: 23300 - DNA, 20 bp, Artificial Sequence
  Antisense compound
tgtagaaacatcagtgcagt

SEQ ID NO: 23301 - DNA, 20 bp, Artificial Sequence
  Antisense compound
ctgtagaaacatcagtgcag

SEQ ID NO: 23302 - DNA, 20 bp, Artificial Sequence
  Antisense compound
gctgtagaaacatcagtgca

SEQ ID NO: 23303 - DNA, 20 bp, Artificial Sequence
  Antisense compound
tgctgtagaaacatcagtgc

SEQ ID NO: 23304 - DNA, 20 bp, Artificial Sequence
  Antisense compound
ttgctgtagaaacatcagtg

SEQ ID NO: 23305 - DNA, 20 bp, Artificial Sequence
  Antisense compound
attgctgtagaaacatcagt

SEQ ID NO: 23306 - DNA, 20 bp, Artificial Sequence
  Antisense compound
aattgctgtagaaacatcag

SEQ ID NO: 23307 - DNA, 20 bp, Artificial Sequence
  Antisense compound
gaattgctgtagaaacatca

SEQ ID NO: 23308 - DNA, 20 bp, Artificial Sequence
  Antisense compound
tgaattgctgtagaaacatc

SEQ ID NO: 23309 - DNA, 20 bp, Artificial Sequence
  Antisense compound
atgaattgctgtagaaacat

SEQ ID NO: 23310 - DNA, 20 bp, Artificial Sequence
  Antisense compound
catgaattgctgtagaaaca

SEQ ID NO: 23311 - DNA, 20 bp, Artificial Sequence
  Antisense compound
gcatgaattgctgtagaaac

SEQ ID NO: 23312 - DNA, 20 bp, Artificial Sequence
  Antisense compound
tgcatgaattgctgtagaaa

SEQ ID NO: 23313 - DNA, 20 bp, Artificial Sequence
  Antisense compound
ctgcatgaattgctgtagaa

SEQ ID NO: 23314 - DNA, 20 bp, Artificial Sequence
  Antisense compound
tctgcatgaattgctgtaga

SEQ ID NO: 23315 - DNA, 20 bp, Artificial Sequence
  Antisense compound
atctgcatgaattgctgtag

SEQ ID NO: 23316 - DNA, 20 bp, Artificial Sequence
  Antisense compound
gatctgcatgaattgctgta

SEQ ID NO: 23317 - DNA, 20 bp, Artificial Sequence
  Antisense compound
tgatctgcatgaattgctgt

SEQ ID NO: 23318 - DNA, 20 bp, Artificial Sequence
  Antisense compound
ttgatctgcatgaattgctg

SEQ ID NO: 23319 - DNA, 20 bp, Artificial Sequence
  Antisense compound
gttgatctgcatgaattgct

SEQ ID NO: 23320 - DNA, 20 bp, Artificial Sequence
  Antisense compound
agttgatctgcatgaattgc

SEQ ID NO: 23321 - DNA, 20 bp, Artificial Sequence
  Antisense compound
gagttgatctgcatgaattg

SEQ ID NO: 23322 - DNA, 20 bp, Artificial Sequence
  Antisense compound
tgagttgatctgcatgaatt

SEQ ID NO: 23323 - DNA, 20 bp, Artificial Sequence
  Antisense compound
gtgagttgatctgcatgaat

SEQ ID NO: 23324 - DNA, 20 bp, Artificial Sequence
  Antisense compound
tgtgagttgatctgcatgaa

SEQ ID NO: 23325 - DNA, 20 bp, Artificial Sequence
  Antisense compound
gtgtgagttgatctgcatga

SEQ ID NO: 23326 - DNA, 20 bp, Artificial Sequence
  Antisense compound
ggtgtgagttgatctgcatg

SEQ ID NO: 23327 - DNA, 20 bp, Artificial Sequence
  Antisense compound
tggtgtgagttgatctgcat

SEQ ID NO: 23328 - DNA, 20 bp, Artificial Sequence
  Antisense compound
ctggtgtgagttgatctgca

SEQ ID NO: 23329 - DNA, 20 bp, Artificial Sequence
  Antisense compound
gctggtgtgagttgatctgc

SEQ ID NO: 23330 - DNA, 20 bp, Artificial Sequence
  Antisense compound
agctggtgtgagttgatctg

SEQ ID NO: 23331 - DNA, 20 bp, Artificial Sequence
  Antisense compound
aagctggtgtgagttgatct

SEQ ID NO: 23332 - DNA, 20 bp, Artificial Sequence
  Antisense compound
caagctggtgtgagttgatc

SEQ ID NO: 23333 - DNA, 20 bp, Artificial Sequence
  Antisense compound
ccaagctggtgtgagttgat

SEQ ID NO: 23334 - DNA, 20 bp, Artificial Sequence
  Antisense compound
gccaagctggtgtgagttga

SEQ ID NO: 23335 - DNA, 20 bp, Artificial Sequence
  Antisense compound
cgccaagctggtgtgagttg

SEQ ID NO: 23336 - DNA, 20 bp, Artificial Sequence
  Antisense compound
gcgccaagctggtgtgagtt

SEQ ID NO: 23337 - DNA, 20 bp, Artificial Sequence
  Antisense compound
tgcgccaagctggtgtgagt

SEQ ID NO: 23338 - DNA, 20 bp, Artificial Sequence
  Antisense compound
atgcgccaagctggtgtgag

SEQ ID NO: 23339 - DNA, 20 bp, Artificial Sequence
  Antisense compound
tatgcgccaagctggtgtga

SEQ ID NO: 23340 - DNA, 20 bp, Artificial Sequence
  Antisense compound
atatgcgccaagctggtgtg

SEQ ID NO: 23341 - DNA, 20 bp, Artificial Sequence
  Antisense compound
tatatgcgccaagctggtgt

SEQ ID NO: 23342 - DNA, 20 bp, Artificial Sequence
  Antisense compound
atatatgcgccaagctggtg

SEQ ID NO: 23343 - DNA, 20 bp, Artificial Sequence
  Antisense compound
aatatatgcgccaagctggt

SEQ ID NO: 23344 - DNA, 20 bp, Artificial Sequence
  Antisense compound
gaatatatgcgccaagctgg

SEQ ID NO: 23345 - DNA, 20 bp, Artificial Sequence
  Antisense compound
agaatatatgcgccaagctg

SEQ ID NO: 23346 - DNA, 20 bp, Artificial Sequence
  Antisense compound
tagaatatatgcgccaagct

SEQ ID NO: 23347 - DNA, 20 bp, Artificial Sequence
  Antisense compound
gtagaatatatgcgccaagc

SEQ ID NO: 23348 - DNA, 20 bp, Artificial Sequence
  Antisense compound
agtagaatatatgcgccaag

SEQ ID NO: 23349 - DNA, 20 bp, Artificial Sequence
  Antisense compound
cagtagaatatatgcgccaa

SEQ ID NO: 23350 - DNA, 20 bp, Artificial Sequence
  Antisense compound
ccagtagaatatatgcgcca

SEQ ID NO: 23351 - DNA, 20 bp, Artificial Sequence
  Antisense compound
tccagtagaatatatgcgcc

SEQ ID NO: 23352 - DNA, 20 bp, Artificial Sequence
  Antisense compound
ttccagtagaatatatgcgc

SEQ ID NO: 23353 - DNA, 20 bp, Artificial Sequence
  Antisense compound
tttccagtagaatatatgcg

SEQ ID NO: 23354 - DNA, 20 bp, Artificial Sequence
  Antisense compound
gtttccagtagaatatatgc

SEQ ID NO: 23355 - DNA, 20 bp, Artificial Sequence
  Antisense compound
tgtttccagtagaatatatg

SEQ ID NO: 23356 - DNA, 20 bp, Artificial Sequence
  Antisense compound
ttgtttccagtagaatatat

SEQ ID NO: 23357 - DNA, 20 bp, Artificial Sequence
  Antisense compound
attgtttccagtagaatata

SEQ ID NO: 23358 - DNA, 20 bp, Artificial Sequence
  Antisense compound
cattgtttccagtagaatat

SEQ ID NO: 23359 - DNA, 20 bp, Artificial Sequence
  Antisense compound
acattgtttccagtagaata

SEQ ID NO: 23360 - DNA, 20 bp, Artificial Sequence
  Antisense compound
tacattgtttccagtagaat

SEQ ID NO: 23361 - DNA, 20 bp, Artificial Sequence
  Antisense compound
atacattgtttccagtagaa

SEQ ID NO: 23362 - DNA, 20 bp, Artificial Sequence
  Antisense compound
aatacattgtttccagtaga

SEQ ID NO: 23363 - DNA, 20 bp, Artificial Sequence
  Antisense compound
gaatacattgtttccagtag

SEQ ID NO: 23364 - DNA, 20 bp, Artificial Sequence
  Antisense compound
ggaatacattgtttccagta

SEQ ID NO: 23365 - DNA, 20 bp, Artificial Sequence
  Antisense compound
tggaatacattgtttccagt

SEQ ID NO: 23366 - DNA, 20 bp, Artificial Sequence
  Antisense compound
ctggaatacattgtttccag

SEQ ID NO: 23367 - DNA, 20 bp, Artificial Sequence
  Antisense compound
tctggaatacattgtttcca

SEQ ID NO: 23368 - DNA, 20 bp, Artificial Sequence
  Antisense compound
gtctggaatacattgtttcc

SEQ ID NO: 23369 - DNA, 20 bp, Artificial Sequence
  Antisense compound
agtctggaatacattgtttc

SEQ ID NO: 23370 - DNA, 20 bp, Artificial Sequence
  Antisense compound
gagtctggaatacattgttt

SEQ ID NO: 23371 - DNA, 20 bp, Artificial Sequence
  Antisense compound
tgagtctggaatacattgtt

SEQ ID NO: 23372 - DNA, 20 bp, Artificial Sequence
  Antisense compound
ttgagtctggaatacattgt

SEQ ID NO: 23373 - DNA, 20 bp, Artificial Sequence
  Antisense compound
cttgagtctggaatacattg

SEQ ID NO: 23374 - DNA, 20 bp, Artificial Sequence
  Antisense compound
gcttgagtctggaatacatt

SEQ ID NO: 23375 - DNA, 20 bp, Artificial Sequence
  Antisense compound
tgcttgagtctggaatacat

SEQ ID NO: 23376 - DNA, 20 bp, Artificial Sequence
  Antisense compound
ctgcttgagtctggaataca

SEQ ID NO: 23377 - DNA, 20 bp, Artificial Sequence
  Antisense compound
cctgcttgagtctggaatac

SEQ ID NO: 23378 - DNA, 20 bp, Artificial Sequence
  Antisense compound
gcctgcttgagtctggaata

SEQ ID NO: 23379 - DNA, 20 bp, Artificial Sequence
  Antisense compound
agcctgcttgagtctggaat

SEQ ID NO: 23380 - DNA, 20 bp, Artificial Sequence
  Antisense compound
cagcctgcttgagtctggaa

SEQ ID NO: 23381 - DNA, 20 bp, Artificial Sequence
  Antisense compound
acagcctgcttgagtctgga

SEQ ID NO: 23382 - DNA, 20 bp, Artificial Sequence
  Antisense compound
gacagcctgcttgagtctgg

SEQ ID NO: 23383 - DNA, 20 bp, Artificial Sequence
  Antisense compound
agacagcctgcttgagtctg

SEQ ID NO: 23384 - DNA, 20 bp, Artificial Sequence
  Antisense compound
aagacagcctgcttgagtct

SEQ ID NO: 23385 - DNA, 20 bp, Artificial Sequence
  Antisense compound
taagacagcctgcttgagtc

SEQ ID NO: 23386 - DNA, 20 bp, Artificial Sequence
  Antisense compound
ataagacagcctgcttgagt

SEQ ID NO: 23387 - DNA, 20 bp, Artificial Sequence
  Antisense compound
tataagacagcctgcttgag

SEQ ID NO: 23388 - DNA, 20 bp, Artificial Sequence
  Antisense compound
ctataagacagcctgcttga

SEQ ID NO: 23389 - DNA, 20 bp, Artificial Sequence
  Antisense compound
cctataagacagcctgcttg

SEQ ID NO: 23390 - DNA, 20 bp, Artificial Sequence
  Antisense compound
tcctataagacagcctgctt

SEQ ID NO: 23391 - DNA, 20 bp, Artificial Sequence
  Antisense compound
ctcctataagacagcctgct

SEQ ID NO: 23392 - DNA, 20 bp, Artificial Sequence
  Antisense compound
gctcctataagacagcctgc

SEQ ID NO: 23393 - DNA, 20 bp, Artificial Sequence
  Antisense compound
agctcctataagacagcctg

SEQ ID NO: 23394 - DNA, 20 bp, Artificial Sequence
  Antisense compound
cagctcctataagacagcct

SEQ ID NO: 23395 - DNA, 20 bp, Artificial Sequence
  Antisense compound
tcagctcctataagacagcc

SEQ ID NO: 23396 - DNA, 20 bp, Artificial Sequence
  Antisense compound
ctcagctcctataagacagc

SEQ ID NO: 23397 - DNA, 20 bp, Artificial Sequence
  Antisense compound
gctcagctcctataagacag

SEQ ID NO: 23398 - DNA, 20 bp, Artificial Sequence
  Antisense compound
tgctcagctcctataagaca

SEQ ID NO: 23399 - DNA, 20 bp, Artificial Sequence
  Antisense compound
atgctcagctcctataagac

SEQ ID NO: 23400 - DNA, 20 bp, Artificial Sequence
  Antisense compound
catgctcagctcctataaga

SEQ ID NO: 23401 - DNA, 20 bp, Artificial Sequence
  Antisense compound
acatgctcagctcctataag

SEQ ID NO: 23402 - DNA, 20 bp, Artificial Sequence
  Antisense compound
gacatgctcagctcctataa

SEQ ID NO: 23403 - DNA, 20 bp, Artificial Sequence
  Antisense compound
cgacatgctcagctcctata

SEQ ID NO: 23404 - DNA, 20 bp, Artificial Sequence
  Antisense compound
tcgacatgctcagctcctat

SEQ ID NO: 23405 - DNA, 20 bp, Artificial Sequence
  Antisense compound
gtcgacatgctcagctccta

SEQ ID NO: 23406 - DNA, 20 bp, Artificial Sequence
  Antisense compound
tgtcgacatgctcagctcct

SEQ ID NO: 23407 - DNA, 20 bp, Artificial Sequence
  Antisense compound
gtgtcgacatgctcagctcc

SEQ ID NO: 23408 - DNA, 20 bp, Artificial Sequence
  Antisense compound
agtgtcgacatgctcagctc

SEQ ID NO: 23409 - DNA, 20 bp, Artificial Sequence
  Antisense compound
aagtgtcgacatgctcagct

SEQ ID NO: 23410 - DNA, 20 bp, Artificial Sequence
  Antisense compound
gaagtgtcgacatgctcagc

SEQ ID NO: 23411 - DNA, 20 bp, Artificial Sequence
  Antisense compound
agaagtgtcgacatgctcag

SEQ ID NO: 23412 - DNA, 20 bp, Artificial Sequence
  Antisense compound
aagaagtgtcgacatgctca

SEQ ID NO: 23413 - DNA, 20 bp, Artificial Sequence
  Antisense compound
taagaagtgtcgacatgctc

SEQ ID NO: 23414 - DNA, 20 bp, Artificial Sequence
  Antisense compound
ataagaagtgtcgacatgct

SEQ ID NO: 23415 - DNA, 20 bp, Artificial Sequence
  Antisense compound
cataagaagtgtcgacatgc

SEQ ID NO: 23416 - DNA, 20 bp, Artificial Sequence
  Antisense compound
tcataagaagtgtcgacatg

SEQ ID NO: 23417 - DNA, 20 bp, Artificial Sequence
  Antisense compound
ctcataagaagtgtcgacat

SEQ ID NO: 23418 - DNA, 20 bp, Artificial Sequence
  Antisense compound
actcataagaagtgtcgaca

SEQ ID NO: 23419 - DNA, 20 bp, Artificial Sequence
  Antisense compound
cactcataagaagtgtcgac

SEQ ID NO: 23420 - DNA, 20 bp, Artificial Sequence
  Antisense compound
gcactcataagaagtgtcga

SEQ ID NO: 23421 - DNA, 20 bp, Artificial Sequence
  Antisense compound
cgcactcataagaagtgtcg

SEQ ID NO: 23422 - DNA, 20 bp, Artificial Sequence
  Antisense compound
tcgcactcataagaagtgtc

SEQ ID NO: 23423 - DNA, 20 bp, Artificial Sequence
  Antisense compound
gtcgcactcataagaagtgt

SEQ ID NO: 23424 - DNA, 20 bp, Artificial Sequence
  Antisense compound
tgtcgcactcataagaagtg

SEQ ID NO: 23425 - DNA, 20 bp, Artificial Sequence
  Antisense compound
atgtcgcactcataagaagt

SEQ ID NO: 23426 - DNA, 20 bp, Artificial Sequence
  Antisense compound
aatgtcgcactcataagaag

SEQ ID NO: 23427 - DNA, 20 bp, Artificial Sequence
  Antisense compound
gaatgtcgcactcataagaa

SEQ ID NO: 23428 - DNA, 20 bp, Artificial Sequence
  Antisense compound
ggaatgtcgcactcataaga

SEQ ID NO: 23429 - DNA, 20 bp, Artificial Sequence
  Antisense compound
aggaatgtcgcactcataag

SEQ ID NO: 23430 - DNA, 20 bp, Artificial Sequence
  Antisense compound
taggaatgtcgcactcataa

SEQ ID NO: 23431 - DNA, 20 bp, Artificial Sequence
  Antisense compound
ataggaatgtcgcactcata

SEQ ID NO: 23432 - DNA, 20 bp, Artificial Sequence
  Antisense compound
aataggaatgtcgcactcat

SEQ ID NO: 23433 - DNA, 20 bp, Artificial Sequence
  Antisense compound
caataggaatgtcgcactca

SEQ ID NO: 23434 - DNA, 20 bp, Artificial Sequence
  Antisense compound
ccaataggaatgtcgcactc

SEQ ID NO: 23435 - DNA, 20 bp, Artificial Sequence
  Antisense compound
tccaataggaatgtcgcact

SEQ ID NO: 23436 - DNA, 20 bp, Artificial Sequence
  Antisense compound
ctccaataggaatgtcgcac

SEQ ID NO: 23437 - DNA, 20 bp, Artificial Sequence
  Antisense compound
gctccaataggaatgtcgca

SEQ ID NO: 23438 - DNA, 20 bp, Artificial Sequence
  Antisense compound
agctccaataggaatgtcgc

SEQ ID NO: 23439 - DNA, 20 bp, Artificial Sequence
  Antisense compound
cagctccaataggaatgtcg

SEQ ID NO: 23440 - DNA, 20 bp, Artificial Sequence
  Antisense compound
ccagctccaataggaatgtc

SEQ ID NO: 23441 - DNA, 20 bp, Artificial Sequence
  Antisense compound
gccagctccaataggaatgt

SEQ ID NO: 23442 - DNA, 20 bp, Artificial Sequence
  Antisense compound
tgccagctccaataggaatg

SEQ ID NO: 23443 - DNA, 20 bp, Artificial Sequence
  Antisense compound
atgccagctccaataggaat

SEQ ID NO: 23444 - DNA, 20 bp, Artificial Sequence
  Antisense compound
aatgccagctccaataggaa

SEQ ID NO: 23445 - DNA, 20 bp, Artificial Sequence
  Antisense compound
aaatgccagctccaatagga

SEQ ID NO: 23446 - DNA, 20 bp, Artificial Sequence
  Antisense compound
caaatgccagctccaatagg

SEQ ID NO: 23447 - DNA, 20 bp, Artificial Sequence
  Antisense compound
acaaatgccagctccaatag

SEQ ID NO: 23448 - DNA, 20 bp, Artificial Sequence
  Antisense compound
cacaaatgccagctccaata

SEQ ID NO: 23449 - DNA, 20 bp, Artificial Sequence
  Antisense compound
gcacaaatgccagctccaat

SEQ ID NO: 23450 - DNA, 20 bp, Artificial Sequence
  Antisense compound
agcacaaatgccagctccaa

SEQ ID NO: 23451 - DNA, 20 bp, Artificial Sequence
  Antisense compound
tagcacaaatgccagctcca

SEQ ID NO: 23452 - DNA, 20 bp, Artificial Sequence
  Antisense compound
ctagcacaaatgccagctcc

SEQ ID NO: 23453 - DNA, 20 bp, Artificial Sequence
  Antisense compound
actagcacaaatgccagctc

SEQ ID NO: 23454 - DNA, 20 bp, Artificial Sequence
  Antisense compound
aactagcacaaatgccagct

SEQ ID NO: 23455 - DNA, 20 bp, Artificial Sequence
  Antisense compound
taactagcacaaatgccagc

SEQ ID NO: 23456 - DNA, 20 bp, Artificial Sequence
  Antisense compound
gtaactagcacaaatgccag

SEQ ID NO: 23457 - DNA, 20 bp, Artificial Sequence
  Antisense compound
ggtaactagcacaaatgcca

SEQ ID NO: 23458 - DNA, 20 bp, Artificial Sequence
  Antisense compound
tggtaactagcacaaatgcc

SEQ ID NO: 23459 - DNA, 20 bp, Artificial Sequence
  Antisense compound
atggtaactagcacaaatgc

SEQ ID NO: 23460 - DNA, 20 bp, Artificial Sequence
  Antisense compound
tatggtaactagcacaaatg

SEQ ID NO: 23461 - DNA, 20 bp, Artificial Sequence
  Antisense compound
gtatggtaactagcacaaat

SEQ ID NO: 23462 - DNA, 20 bp, Artificial Sequence
  Antisense compound
tgtatggtaactagcacaaa

SEQ ID NO: 23463 - DNA, 20 bp, Artificial Sequence
  Antisense compound
ctgtatggtaactagcacaa

SEQ ID NO: 23464 - DNA, 20 bp, Artificial Sequence
  Antisense compound
actgtatggtaactagcaca

SEQ ID NO: 23465 - DNA, 20 bp, Artificial Sequence
  Antisense compound
aactgtatggtaactagcac

SEQ ID NO: 23466 - DNA, 20 bp, Artificial Sequence
  Antisense compound
aaactgtatggtaactagca

SEQ ID NO: 23467 - DNA, 20 bp, Artificial Sequence
  Antisense compound
gaaactgtatggtaactagc

SEQ ID NO: 23468 - DNA, 20 bp, Artificial Sequence
  Antisense compound
agaaactgtatggtaactag

SEQ ID NO: 23469 - DNA, 20 bp, Artificial Sequence
  Antisense compound
aagaaactgtatggtaacta

SEQ ID NO: 23470 - DNA, 20 bp, Artificial Sequence
  Antisense compound
aaagaaactgtatggtaact

SEQ ID NO: 23471 - DNA, 20 bp, Artificial Sequence
  Antisense compound
taaagaaactgtatggtaac

SEQ ID NO: 23472 - DNA, 20 bp, Artificial Sequence
  Antisense compound
ataaagaaactgtatggtaa

SEQ ID NO: 23473 - DNA, 20 bp, Artificial Sequence
  Antisense compound
aataaagaaactgtatggta

SEQ ID NO: 23474 - DNA, 20 bp, Artificial Sequence
  Antisense compound
taataaagaaactgtatggt

SEQ ID NO: 23475 - DNA, 20 bp, Artificial Sequence
  Antisense compound
gtaataaagaaactgtatgg

SEQ ID NO: 23476 - DNA, 20 bp, Artificial Sequence
  Antisense compound
cgtaataaagaaactgtatg

SEQ ID NO: 23477 - DNA, 20 bp, Artificial Sequence
  Antisense compound
acgtaataaagaaactgtat

SEQ ID NO: 23478 - DNA, 20 bp, Artificial Sequence
  Antisense compound
tacgtaataaagaaactgta

SEQ ID NO: 23479 - DNA, 20 bp, Artificial Sequence
  Antisense compound
ctacgtaataaagaaactgt

SEQ ID NO: 23480 - DNA, 20 bp, Artificial Sequence
  Antisense compound
actacgtaataaagaaactg

SEQ ID NO: 23481 - DNA, 20 bp, Artificial Sequence
  Antisense compound
tactacgtaataaagaaact

SEQ ID NO: 23482 - DNA, 20 bp, Artificial Sequence
  Antisense compound
gtactacgtaataaagaaac

SEQ ID NO: 23483 - DNA, 20 bp, Artificial Sequence
  Antisense compound
agtactacgtaataaagaaa

SEQ ID NO: 23484 - DNA, 20 bp, Artificial Sequence
  Antisense compound
tagtactacgtaataaagaa

SEQ ID NO: 23485 - DNA, 20 bp, Artificial Sequence
  Antisense compound
ctagtactacgtaataaaga

SEQ ID NO: 23486 - DNA, 20 bp, Artificial Sequence
  Antisense compound
gctagtactacgtaataaag

SEQ ID NO: 23487 - DNA, 20 bp, Artificial Sequence
  Antisense compound
ggctagtactacgtaataaa

SEQ ID NO: 23488 - DNA, 20 bp, Artificial Sequence
  Antisense compound
tggctagtactacgtaataa

SEQ ID NO: 23489 - DNA, 20 bp, Artificial Sequence
  Antisense compound
ttggctagtactacgtaata

SEQ ID NO: 23490 - DNA, 20 bp, Artificial Sequence
  Antisense compound
tttggctagtactacgtaat

SEQ ID NO: 23491 - DNA, 20 bp, Artificial Sequence
  Antisense compound
ttttggctagtactacgtaa

SEQ ID NO: 23492 - DNA, 20 bp, Artificial Sequence
  Antisense compound
tttttggctagtactacgta

SEQ ID NO: 23493 - DNA, 20 bp, Artificial Sequence
  Antisense compound
atttttggctagtactacgt

SEQ ID NO: 23494 - DNA, 20 bp, Artificial Sequence
  Antisense compound
gatttttggctagtactacg

SEQ ID NO: 23495 - DNA, 20 bp, Artificial Sequence
  Antisense compound
agatttttggctagtactac

SEQ ID NO: 23496 - DNA, 20 bp, Artificial Sequence
  Antisense compound
tagatttttggctagtacta

SEQ ID NO: 23497 - DNA, 20 bp, Artificial Sequence
  Antisense compound
atagatttttggctagtact

SEQ ID NO: 23498 - DNA, 20 bp, Artificial Sequence
  Antisense compound
aatagatttttggctagtac

SEQ ID NO: 23499 - DNA, 20 bp, Artificial Sequence
  Antisense compound
caatagatttttggctagta

SEQ ID NO: 23500 - DNA, 20 bp, Artificial Sequence
  Antisense compound
acaatagatttttggctagt

SEQ ID NO: 23501 - DNA, 20 bp, Artificial Sequence
  Antisense compound
cacaatagatttttggctag

SEQ ID NO: 23502 - DNA, 20 bp, Artificial Sequence
  Antisense compound
ccacaatagatttttggcta

SEQ ID NO: 23503 - DNA, 20 bp, Artificial Sequence
  Antisense compound
gccacaatagatttttggct

SEQ ID NO: 23504 - DNA, 20 bp, Artificial Sequence
  Antisense compound
agccacaatagatttttggc

SEQ ID NO: 23505 - DNA, 20 bp, Artificial Sequence
  Antisense compound
aagccacaatagatttttgg

SEQ ID NO: 23506 - DNA, 20 bp, Artificial Sequence
  Antisense compound
taagccacaatagatttttg

SEQ ID NO: 23507 - DNA, 20 bp, Artificial Sequence
  Antisense compound
ataagccacaatagattttt

SEQ ID NO: 23508 - DNA, 20 bp, Artificial Sequence
  Antisense compound
tataagccacaatagatttt

SEQ ID NO: 23509 - DNA, 20 bp, Artificial Sequence
  Antisense compound
gtataagccacaatagattt

SEQ ID NO: 23510 - DNA, 20 bp, Artificial Sequence
  Antisense compound
agtataagccacaatagatt

SEQ ID NO: 23511 - DNA, 20 bp, Artificial Sequence
  Antisense compound
tagtataagccacaatagat

SEQ ID NO: 23512 - DNA, 20 bp, Artificial Sequence
  Antisense compound
atagtataagccacaataga

SEQ ID NO: 23513 - DNA, 20 bp, Artificial Sequence
  Antisense compound
catagtataagccacaatag

SEQ ID NO: 23514 - DNA, 20 bp, Artificial Sequence
  Antisense compound
acatagtataagccacaata

SEQ ID NO: 23515 - DNA, 20 bp, Artificial Sequence
  Antisense compound
gacatagtataagccacaat

SEQ ID NO: 23516 - DNA, 20 bp, Artificial Sequence
  Antisense compound
agacatagtataagccacaa

SEQ ID NO: 23517 - DNA, 20 bp, Artificial Sequence
  Antisense compound
aagacatagtataagccaca

SEQ ID NO: 23518 - DNA, 20 bp, Artificial Sequence
  Antisense compound
aaagacatagtataagccac

SEQ ID NO: 23519 - DNA, 20 bp, Artificial Sequence
  Antisense compound
taaagacatagtataagcca

SEQ ID NO: 23520 - DNA, 20 bp, Artificial Sequence
  Antisense compound
ctaaagacatagtataagcc

SEQ ID NO: 23521 - DNA, 20 bp, Artificial Sequence
  Antisense compound
cctaaagacatagtataagc

SEQ ID NO: 23522 - DNA, 20 bp, Artificial Sequence
  Antisense compound
acctaaagacatagtataag

SEQ ID NO: 23523 - DNA, 20 bp, Artificial Sequence
  Antisense compound
cacctaaagacatagtataa

SEQ ID NO: 23524 - DNA, 20 bp, Artificial Sequence
  Antisense compound
gcacctaaagacatagtata

SEQ ID NO: 23525 - DNA, 20 bp, Artificial Sequence
  Antisense compound
agcacctaaagacatagtat

SEQ ID NO: 23526 - DNA, 20 bp, Artificial Sequence
  Antisense compound
cagcacctaaagacatagta

SEQ ID NO: 23527 - DNA, 20 bp, Artificial Sequence
  Antisense compound
tcagcacctaaagacatagt

SEQ ID NO: 23528 - DNA, 20 bp, Artificial Sequence
  Antisense compound
atcagcacctaaagacatag

SEQ ID NO: 23529 - DNA, 20 bp, Artificial Sequence
  Antisense compound
tatcagcacctaaagacata

SEQ ID NO: 23530 - DNA, 20 bp, Artificial Sequence
  Antisense compound
ctatcagcacctaaagacat

SEQ ID NO: 23531 - DNA, 20 bp, Artificial Sequence
  Antisense compound
actatcagcacctaaagaca

SEQ ID NO: 23532 - DNA, 20 bp, Artificial Sequence
  Antisense compound
aactatcagcacctaaagac

SEQ ID NO: 23533 - DNA, 20 bp, Artificial Sequence
  Antisense compound
gaactatcagcacctaaaga

SEQ ID NO: 23534 - DNA, 20 bp, Artificial Sequence
  Antisense compound
tgaactatcagcacctaaag

SEQ ID NO: 23535 - DNA, 20 bp, Artificial Sequence
  Antisense compound
ttgaactatcagcacctaaa

SEQ ID NO: 23536 - DNA, 20 bp, Artificial Sequence
  Antisense compound
attgaactatcagcacctaa

SEQ ID NO: 23537 - DNA, 20 bp, Artificial Sequence
  Antisense compound
aattgaactatcagcaccta

SEQ ID NO: 23538 - DNA, 20 bp, Artificial Sequence
  Antisense compound
caattgaactatcagcacct

SEQ ID NO: 23539 - DNA, 20 bp, Artificial Sequence
  Antisense compound
gcaattgaactatcagcacc

SEQ ID NO: 23540 - DNA, 20 bp, Artificial Sequence
  Antisense compound
agcaattgaactatcagcac

SEQ ID NO: 23541 - DNA, 20 bp, Artificial Sequence
  Antisense compound
aagcaattgaactatcagca

SEQ ID NO: 23542 - DNA, 20 bp, Artificial Sequence
  Antisense compound
taagcaattgaactatcagc

SEQ ID NO: 23543 - DNA, 20 bp, Artificial Sequence
  Antisense compound
gtaagcaattgaactatcag

SEQ ID NO: 23544 - DNA, 20 bp, Artificial Sequence
  Antisense compound
agtaagcaattgaactatca

SEQ ID NO: 23545 - DNA, 20 bp, Artificial Sequence
  Antisense compound
gagtaagcaattgaactatc

SEQ ID NO: 23546 - DNA, 20 bp, Artificial Sequence
  Antisense compound
agagtaagcaattgaactat

SEQ ID NO: 23547 - DNA, 20 bp, Artificial Sequence
  Antisense compound
tagagtaagcaattgaacta

SEQ ID NO: 23548 - DNA, 20 bp, Artificial Sequence
  Antisense compound
ttagagtaagcaattgaact

SEQ ID NO: 23549 - DNA, 20 bp, Artificial Sequence
  Antisense compound
attagagtaagcaattgaac

SEQ ID NO: 23550 - DNA, 20 bp, Artificial Sequence
  Antisense compound
tattagagtaagcaattgaa

SEQ ID NO: 23551 - DNA, 20 bp, Artificial Sequence
  Antisense compound
ttattagagtaagcaattga

SEQ ID NO: 23552 - DNA, 20 bp, Artificial Sequence
  Antisense compound
gttattagagtaagcaattg

SEQ ID NO: 23553 - DNA, 20 bp, Artificial Sequence
  Antisense compound
tgttattagagtaagcaatt

SEQ ID NO: 23554 - DNA, 20 bp, Artificial Sequence
  Antisense compound
gtgttattagagtaagcaat

SEQ ID NO: 23555 - DNA, 20 bp, Artificial Sequence
  Antisense compound
ggtgttattagagtaagcaa

SEQ ID NO: 23556 - DNA, 20 bp, Artificial Sequence
  Antisense compound
tggtgttattagagtaagca

SEQ ID NO: 23557 - DNA, 20 bp, Artificial Sequence
  Antisense compound
atggtgttattagagtaagc

SEQ ID NO: 23558 - DNA, 20 bp, Artificial Sequence
  Antisense compound
aatggtgttattagagtaag

SEQ ID NO: 23559 - DNA, 20 bp, Artificial Sequence
  Antisense compound
caatggtgttattagagtaa

SEQ ID NO: 23560 - DNA, 20 bp, Artificial Sequence
  Antisense compound
gcaatggtgttattagagta

SEQ ID NO: 23561 - DNA, 20 bp, Artificial Sequence
  Antisense compound
agcaatggtgttattagagt

SEQ ID NO: 23562 - DNA, 20 bp, Artificial Sequence
  Antisense compound
tagcaatggtgttattagag

SEQ ID NO: 23563 - DNA, 20 bp, Artificial Sequence
  Antisense compound
atagcaatggtgttattaga

SEQ ID NO: 23564 - DNA, 20 bp, Artificial Sequence
  Antisense compound
tatagcaatggtgttattag

SEQ ID NO: 23565 - DNA, 20 bp, Artificial Sequence
  Antisense compound
gtatagcaatggtgttatta

SEQ ID NO: 23566 - DNA, 20 bp, Artificial Sequence
  Antisense compound
ggtatagcaatggtgttatt

SEQ ID NO: 23567 - DNA, 20 bp, Artificial Sequence
  Antisense compound
aggtatagcaatggtgttat

SEQ ID NO: 23568 - DNA, 20 bp, Artificial Sequence
  Antisense compound
taggtatagcaatggtgtta

SEQ ID NO: 23569 - DNA, 20 bp, Artificial Sequence
  Antisense compound
gtaggtatagcaatggtgtt

SEQ ID NO: 23570 - DNA, 20 bp, Artificial Sequence
  Antisense compound
agtaggtatagcaatggtgt

SEQ ID NO: 23571 - DNA, 20 bp, Artificial Sequence
  Antisense compound
tagtaggtatagcaatggtg

SEQ ID NO: 23572 - DNA, 20 bp, Artificial Sequence
  Antisense compound
ttagtaggtatagcaatggt

SEQ ID NO: 23573 - DNA, 20 bp, Artificial Sequence
  Antisense compound
gttagtaggtatagcaatgg

SEQ ID NO: 23574 - DNA, 20 bp, Artificial Sequence
  Antisense compound
agttagtaggtatagcaatg

SEQ ID NO: 23575 - DNA, 20 bp, Artificial Sequence
  Antisense compound
aagttagtaggtatagcaat

SEQ ID NO: 23576 - DNA, 20 bp, Artificial Sequence
  Antisense compound
aaagttagtaggtatagcaa

SEQ ID NO: 23577 - DNA, 20 bp, Artificial Sequence
  Antisense compound
aaaagttagtaggtatagca

SEQ ID NO: 23578 - DNA, 20 bp, Artificial Sequence
  Antisense compound
gaaaagttagtaggtatagc

SEQ ID NO: 23579 - DNA, 20 bp, Artificial Sequence
  Antisense compound
tgaaaagttagtaggtatag

SEQ ID NO: 23580 - DNA, 20 bp, Artificial Sequence
  Antisense compound
ttgaaaagttagtaggtata

SEQ ID NO: 23581 - DNA, 20 bp, Artificial Sequence
  Antisense compound
attgaaaagttagtaggtat

SEQ ID NO: 23582 - DNA, 20 bp, Artificial Sequence
  Antisense compound
aattgaaaagttagtaggta

SEQ ID NO: 23583 - DNA, 20 bp, Artificial Sequence
  Antisense compound
taattgaaaagttagtaggt

SEQ ID NO: 23584 - DNA, 20 bp, Artificial Sequence
  Antisense compound
ctaattgaaaagttagtagg

SEQ ID NO: 23585 - DNA, 20 bp, Artificial Sequence
  Antisense compound
gctaattgaaaagttagtag

SEQ ID NO: 23586 - DNA, 20 bp, Artificial Sequence
  Antisense compound
tgctaattgaaaagttagta

SEQ ID NO: 23587 - DNA, 20 bp, Artificial Sequence
  Antisense compound
atgctaattgaaaagttagt

SEQ ID NO: 23588 - DNA, 20 bp, Artificial Sequence
  Antisense compound
aatgctaattgaaaagttag

SEQ ID NO: 23589 - DNA, 20 bp, Artificial Sequence
  Antisense compound
taatgctaattgaaaagtta

SEQ ID NO: 23590 - DNA, 20 bp, Artificial Sequence
  Antisense compound
gtaatgctaattgaaaagtt

SEQ ID NO: 23591 - DNA, 20 bp, Artificial Sequence
  Antisense compound
agtaatgctaattgaaaagt

SEQ ID NO: 23592 - DNA, 20 bp, Artificial Sequence
  Antisense compound
tagtaatgctaattgaaaag

SEQ ID NO: 23593 - DNA, 20 bp, Artificial Sequence
  Antisense compound
gtagtaatgctaattgaaaa

SEQ ID NO: 23594 - DNA, 20 bp, Artificial Sequence
  Antisense compound
tgtagtaatgctaattgaaa

SEQ ID NO: 23595 - DNA, 20 bp, Artificial Sequence
  Antisense compound
ctgtagtaatgctaattgaa

SEQ ID NO: 23596 - DNA, 20 bp, Artificial Sequence
  Antisense compound
tctgtagtaatgctaattga

SEQ ID NO: 23597 - DNA, 20 bp, Artificial Sequence
  Antisense compound
ttctgtagtaatgctaattg

SEQ ID NO: 23598 - DNA, 20 bp, Artificial Sequence
  Antisense compound
cttctgtagtaatgctaatt

SEQ ID NO: 23599 - DNA, 20 bp, Artificial Sequence
  Antisense compound
acttctgtagtaatgctaat

SEQ ID NO: 23600 - DNA, 20 bp, Artificial Sequence
  Antisense compound
tacttctgtagtaatgctaa

SEQ ID NO: 23601 - DNA, 20 bp, Artificial Sequence
  Antisense compound
ttacttctgtagtaatgcta

SEQ ID NO: 23602 - DNA, 20 bp, Artificial Sequence
  Antisense compound
attacttctgtagtaatgct

SEQ ID NO: 23603 - DNA, 20 bp, Artificial Sequence
  Antisense compound
cattacttctgtagtaatgc

SEQ ID NO: 23604 - DNA, 20 bp, Artificial Sequence
  Antisense compound
gcattacttctgtagtaatg

SEQ ID NO: 23605 - DNA, 20 bp, Artificial Sequence
  Antisense compound
ggcattacttctgtagtaat

SEQ ID NO: 23606 - DNA, 20 bp, Artificial Sequence
  Antisense compound
aggcattacttctgtagtaa

SEQ ID NO: 23607 - DNA, 20 bp, Artificial Sequence
  Antisense compound
caggcattacttctgtagta

SEQ ID NO: 23608 - DNA, 20 bp, Artificial Sequence
  Antisense compound
acaggcattacttctgtagt

SEQ ID NO: 23609 - DNA, 20 bp, Artificial Sequence
  Antisense compound
aacaggcattacttctgtag

SEQ ID NO: 23610 - DNA, 20 bp, Artificial Sequence
  Antisense compound
aaacaggcattacttctgta

SEQ ID NO: 23611 - DNA, 20 bp, Artificial Sequence
  Antisense compound
gaaacaggcattacttctgt

SEQ ID NO: 23612 - DNA, 20 bp, Artificial Sequence
  Antisense compound
agaaacaggcattacttctg

SEQ ID NO: 23613 - DNA, 20 bp, Artificial Sequence
  Antisense compound
tagaaacaggcattacttct

SEQ ID NO: 23614 - DNA, 20 bp, Artificial Sequence
  Antisense compound
atagaaacaggcattacttc

SEQ ID NO: 23615 - DNA, 20 bp, Artificial Sequence
  Antisense compound
catagaaacaggcattactt

SEQ ID NO: 23616 - DNA, 20 bp, Artificial Sequence
  Antisense compound
ccatagaaacaggcattact

SEQ ID NO: 23617 - DNA, 20 bp, Artificial Sequence
  Antisense compound
gccatagaaacaggcattac

SEQ ID NO: 23618 - DNA, 20 bp, Artificial Sequence
  Antisense compound
agccatagaaacaggcatta

SEQ ID NO: 23619 - DNA, 20 bp, Artificial Sequence
  Antisense compound
tagccatagaaacaggcatt

SEQ ID NO: 23620 - DNA, 20 bp, Artificial Sequence
  Antisense compound
ttagccatagaaacaggcat

SEQ ID NO: 23621 - DNA, 20 bp, Artificial Sequence
  Antisense compound
tttagccatagaaacaggca

SEQ ID NO: 23622 - DNA, 20 bp, Artificial Sequence
  Antisense compound
ttttagccatagaaacaggc

SEQ ID NO: 23623 - DNA, 20 bp, Artificial Sequence
  Antisense compound
gttttagccatagaaacagg

SEQ ID NO: 23624 - DNA, 20 bp, Artificial Sequence
  Antisense compound
ggttttagccatagaaacag

SEQ ID NO: 23625 - DNA, 20 bp, Artificial Sequence
  Antisense compound
aggttttagccatagaaaca

SEQ ID NO: 23626 - DNA, 20 bp, Artificial Sequence
  Antisense compound
gaggttttagccatagaaac

SEQ ID NO: 23627 - DNA, 20 bp, Artificial Sequence
  Antisense compound
ggaggttttagccatagaaa

SEQ ID NO: 23628 - DNA, 20 bp, Artificial Sequence
  Antisense compound
cggaggttttagccatagaa

SEQ ID NO: 23629 - DNA, 20 bp, Artificial Sequence
  Antisense compound
acggaggttttagccataga

SEQ ID NO: 23630 - DNA, 20 bp, Artificial Sequence
  Antisense compound
tacggaggttttagccatag

SEQ ID NO: 23631 - DNA, 20 bp, Artificial Sequence
  Antisense compound
ctacggaggttttagccata

SEQ ID NO: 23632 - DNA, 20 bp, Artificial Sequence
  Antisense compound
tctacggaggttttagccat

SEQ ID NO: 23633 - DNA, 20 bp, Artificial Sequence
  Antisense compound
atctacggaggttttagcca

SEQ ID NO: 23634 - DNA, 20 bp, Artificial Sequence
  Antisense compound
aatctacggaggttttagcc

SEQ ID NO: 23635 - DNA, 20 bp, Artificial Sequence
  Antisense compound
caatctacggaggttttagc

SEQ ID NO: 23636 - DNA, 20 bp, Artificial Sequence
  Antisense compound
acaatctacggaggttttag

SEQ ID NO: 23637 - DNA, 20 bp, Artificial Sequence
  Antisense compound
tacaatctacggaggtttta

SEQ ID NO: 23638 - DNA, 20 bp, Artificial Sequence
  Antisense compound
ttacaatctacggaggtttt

SEQ ID NO: 23639 - DNA, 20 bp, Artificial Sequence
  Antisense compound
attacaatctacggaggttt

SEQ ID NO: 23640 - DNA, 20 bp, Artificial Sequence
  Antisense compound
tattacaatctacggaggtt

SEQ ID NO: 23641 - DNA, 20 bp, Artificial Sequence
  Antisense compound
atattacaatctacggaggt

SEQ ID NO: 23642 - DNA, 20 bp, Artificial Sequence
  Antisense compound
catattacaatctacggagg

SEQ ID NO: 23643 - DNA, 20 bp, Artificial Sequence
  Antisense compound
acatattacaatctacggag

SEQ ID NO: 23644 - DNA, 20 bp, Artificial Sequence
  Antisense compound
tacatattacaatctacgga

SEQ ID NO: 23645 - DNA, 20 bp, Artificial Sequence
  Antisense compound
gtacatattacaatctacgg

SEQ ID NO: 23646 - DNA, 20 bp, Artificial Sequence
  Antisense compound
tgtacatattacaatctacg

SEQ ID NO: 23647 - DNA, 20 bp, Artificial Sequence
  Antisense compound
atgtacatattacaatctac

SEQ ID NO: 23648 - DNA, 20 bp, Artificial Sequence
  Antisense compound
gatgtacatattacaatcta

SEQ ID NO: 23649 - DNA, 20 bp, Artificial Sequence
  Antisense compound
agatgtacatattacaatct

SEQ ID NO: 23650 - DNA, 20 bp, Artificial Sequence
  Antisense compound
cagatgtacatattacaatc

SEQ ID NO: 23651 - DNA, 20 bp, Artificial Sequence
  Antisense compound
gcagatgtacatattacaat

SEQ ID NO: 23652 - DNA, 20 bp, Artificial Sequence
  Antisense compound
cgcagatgtacatattacaa

SEQ ID NO: 23653 - DNA, 20 bp, Artificial Sequence
  Antisense compound
ccgcagatgtacatattaca

SEQ ID NO: 23654 - DNA, 20 bp, Artificial Sequence
  Antisense compound
tccgcagatgtacatattac

SEQ ID NO: 23655 - DNA, 20 bp, Artificial Sequence
  Antisense compound
ctccgcagatgtacatatta

SEQ ID NO: 23656 - DNA, 20 bp, Artificial Sequence
  Antisense compound
tctccgcagatgtacatatt

SEQ ID NO: 23657 - DNA, 20 bp, Artificial Sequence
  Antisense compound
atctccgcagatgtacatat

SEQ ID NO: 23658 - DNA, 20 bp, Artificial Sequence
  Antisense compound
aatctccgcagatgtacata

SEQ ID NO: 23659 - DNA, 20 bp, Artificial Sequence
  Antisense compound
gaatctccgcagatgtacat

SEQ ID NO: 23660 - DNA, 20 bp, Artificial Sequence
  Antisense compound
agaatctccgcagatgtaca

SEQ ID NO: 23661 - DNA, 20 bp, Artificial Sequence
  Antisense compound
tagaatctccgcagatgtac

SEQ ID NO: 23662 - DNA, 20 bp, Artificial Sequence
  Antisense compound
gtagaatctccgcagatgta

SEQ ID NO: 23663 - DNA, 20 bp, Artificial Sequence
  Antisense compound
agtagaatctccgcagatgt

SEQ ID NO: 23664 - DNA, 20 bp, Artificial Sequence
  Antisense compound
cagtagaatctccgcagatg

SEQ ID NO: 23665 - DNA, 20 bp, Artificial Sequence
  Antisense compound
tcagtagaatctccgcagat

SEQ ID NO: 23666 - DNA, 20 bp, Artificial Sequence
  Antisense compound
ttcagtagaatctccgcaga

SEQ ID NO: 23667 - DNA, 20 bp, Artificial Sequence
  Antisense compound
attcagtagaatctccgcag

SEQ ID NO: 23668 - DNA, 20 bp, Artificial Sequence
  Antisense compound
cattcagtagaatctccgca

SEQ ID NO: 23669 - DNA, 20 bp, Artificial Sequence
  Antisense compound
acattcagtagaatctccgc

SEQ ID NO: 23670 - DNA, 20 bp, Artificial Sequence
  Antisense compound
cacattcagtagaatctccg

SEQ ID NO: 23671 - DNA, 20 bp, Artificial Sequence
  Antisense compound
gcacattcagtagaatctcc

SEQ ID NO: 23672 - DNA, 20 bp, Artificial Sequence
  Antisense compound
agcacattcagtagaatctc

SEQ ID NO: 23673 - DNA, 20 bp, Artificial Sequence
  Antisense compound
tagcacattcagtagaatct

SEQ ID NO: 23674 - DNA, 20 bp, Artificial Sequence
  Antisense compound
ttagcacattcagtagaatc

SEQ ID NO: 23675 - DNA, 20 bp, Artificial Sequence
  Antisense compound
attagcacattcagtagaat

SEQ ID NO: 23676 - DNA, 20 bp, Artificial Sequence
  Antisense compound
aattagcacattcagtagaa

SEQ ID NO: 23677 - DNA, 20 bp, Artificial Sequence
  Antisense compound
aaattagcacattcagtaga

SEQ ID NO: 23678 - DNA, 20 bp, Artificial Sequence
  Antisense compound
caaattagcacattcagtag

SEQ ID NO: 23679 - DNA, 20 bp, Artificial Sequence
  Antisense compound
gcaaattagcacattcagta

SEQ ID NO: 23680 - DNA, 20 bp, Artificial Sequence
  Antisense compound
agcaaattagcacattcagt

SEQ ID NO: 23681 - DNA, 20 bp, Artificial Sequence
  Antisense compound
aagcaaattagcacattcag

SEQ ID NO: 23682 - DNA, 20 bp, Artificial Sequence
  Antisense compound
gaagcaaattagcacattca

SEQ ID NO: 23683 - DNA, 20 bp, Artificial Sequence
  Antisense compound
agaagcaaattagcacattc

SEQ ID NO: 23684 - DNA, 20 bp, Artificial Sequence
  Antisense compound
gagaagcaaattagcacatt

SEQ ID NO: 23685 - DNA, 20 bp, Artificial Sequence
  Antisense compound
ggagaagcaaattagcacat

SEQ ID NO: 23686 - DNA, 20 bp, Artificial Sequence
  Antisense compound
tggagaagcaaattagcaca

SEQ ID NO: 23687 - DNA, 20 bp, Artificial Sequence
  Antisense compound
ttggagaagcaaattagcac

SEQ ID NO: 23688 - DNA, 20 bp, Artificial Sequence
  Antisense compound
attggagaagcaaattagca

SEQ ID NO: 23689 - DNA, 20 bp, Artificial Sequence
  Antisense compound
tattggagaagcaaattagc

SEQ ID NO: 23690 - DNA, 20 bp, Artificial Sequence
  Antisense compound
atattggagaagcaaattag

SEQ ID NO: 23691 - DNA, 20 bp, Artificial Sequence
  Antisense compound
catattggagaagcaaatta

SEQ ID NO: 23692 - DNA, 20 bp, Artificial Sequence
  Antisense compound
ccatattggagaagcaaatt

SEQ ID NO: 23693 - DNA, 20 bp, Artificial Sequence
  Antisense compound
accatattggagaagcaaat

SEQ ID NO: 23694 - DNA, 20 bp, Artificial Sequence
  Antisense compound
taccatattggagaagcaaa

SEQ ID NO: 23695 - DNA, 20 bp, Artificial Sequence
  Antisense compound
ctaccatattggagaagcaa

SEQ ID NO: 23696 - DNA, 20 bp, Artificial Sequence
  Antisense compound
gctaccatattggagaagca

SEQ ID NO: 23697 - DNA, 20 bp, Artificial Sequence
  Antisense compound
agctaccatattggagaagc

SEQ ID NO: 23698 - DNA, 20 bp, Artificial Sequence
  Antisense compound
aagctaccatattggagaag

SEQ ID NO: 23699 - DNA, 20 bp, Artificial Sequence
  Antisense compound
aaagctaccatattggagaa

SEQ ID NO: 23700 - DNA, 20 bp, Artificial Sequence
  Antisense compound
aaaagctaccatattggaga

SEQ ID NO: 23701 - DNA, 20 bp, Artificial Sequence
  Antisense compound
caaaagctaccatattggag

SEQ ID NO: 23702 - DNA, 20 bp, Artificial Sequence
  Antisense compound
gcaaaagctaccatattgga

SEQ ID NO: 23703 - DNA, 20 bp, Artificial Sequence
  Antisense compound
tgcaaaagctaccatattgg

SEQ ID NO: 23704 - DNA, 20 bp, Artificial Sequence
  Antisense compound
gtgcaaaagctaccatattg

SEQ ID NO: 23705 - DNA, 20 bp, Artificial Sequence
  Antisense compound
tgtgcaaaagctaccatatt

SEQ ID NO: 23706 - DNA, 20 bp, Artificial Sequence
  Antisense compound
gtgtgcaaaagctaccatat

SEQ ID NO: 23707 - DNA, 20 bp, Artificial Sequence
  Antisense compound
tgtgtgcaaaagctaccata

SEQ ID NO: 23708 - DNA, 20 bp, Artificial Sequence
  Antisense compound
ttgtgtgcaaaagctaccat

SEQ ID NO: 23709 - DNA, 20 bp, Artificial Sequence
  Antisense compound
gttgtgtgcaaaagctacca

SEQ ID NO: 23710 - DNA, 20 bp, Artificial Sequence
  Antisense compound
agttgtgtgcaaaagctacc

SEQ ID NO: 23711 - DNA, 20 bp, Artificial Sequence
  Antisense compound
tagttgtgtgcaaaagctac

SEQ ID NO: 23712 - DNA, 20 bp, Artificial Sequence
  Antisense compound
ttagttgtgtgcaaaagcta

SEQ ID NO: 23713 - DNA, 20 bp, Artificial Sequence
  Antisense compound
tttagttgtgtgcaaaagct

SEQ ID NO: 23714 - DNA, 20 bp, Artificial Sequence
  Antisense compound
atttagttgtgtgcaaaagc

SEQ ID NO: 23715 - DNA, 20 bp, Artificial Sequence
  Antisense compound
gatttagttgtgtgcaaaag

SEQ ID NO: 23716 - DNA, 20 bp, Artificial Sequence
  Antisense compound
cgatttagttgtgtgcaaaa

SEQ ID NO: 23717 - DNA, 20 bp, Artificial Sequence
  Antisense compound
acgatttagttgtgtgcaaa

SEQ ID NO: 23718 - DNA, 20 bp, Artificial Sequence
  Antisense compound
cacgatttagttgtgtgcaa

SEQ ID NO: 23719 - DNA, 20 bp, Artificial Sequence
  Antisense compound
gcacgatttagttgtgtgca

SEQ ID NO: 23720 - DNA, 20 bp, Artificial Sequence
  Antisense compound
tgcacgatttagttgtgtgc

SEQ ID NO: 23721 - DNA, 20 bp, Artificial Sequence
  Antisense compound
gtgcacgatttagttgtgtg

SEQ ID NO: 23722 - DNA, 20 bp, Artificial Sequence
  Antisense compound
agtgcacgatttagttgtgt

SEQ ID NO: 23723 - DNA, 20 bp, Artificial Sequence
  Antisense compound
gagtgcacgatttagttgtg

SEQ ID NO: 23724 - DNA, 20 bp, Artificial Sequence
  Antisense compound
agagtgcacgatttagttgt

SEQ ID NO: 23725 - DNA, 20 bp, Artificial Sequence
  Antisense compound
gagagtgcacgatttagttg

SEQ ID NO: 23726 - DNA, 20 bp, Artificial Sequence
  Antisense compound
tgagagtgcacgatttagtt

SEQ ID NO: 23727 - DNA, 20 bp, Artificial Sequence
  Antisense compound
ctgagagtgcacgatttagt

SEQ ID NO: 23728 - DNA, 20 bp, Artificial Sequence
  Antisense compound
cctgagagtgcacgatttag

SEQ ID NO: 23729 - DNA, 20 bp, Artificial Sequence
  Antisense compound
acctgagagtgcacgattta

SEQ ID NO: 23730 - DNA, 20 bp, Artificial Sequence
  Antisense compound
tacctgagagtgcacgattt

SEQ ID NO: 23731 - DNA, 20 bp, Artificial Sequence
  Antisense compound
atacctgagagtgcacgatt

SEQ ID NO: 23732 - DNA, 20 bp, Artificial Sequence
  Antisense compound
aatacctgagagtgcacgat

SEQ ID NO: 23733 - DNA, 20 bp, Artificial Sequence
  Antisense compound
caatacctgagagtgcacga

SEQ ID NO: 23734 - DNA, 20 bp, Artificial Sequence
  Antisense compound
gcaatacctgagagtgcacg

SEQ ID NO: 23735 - DNA, 20 bp, Artificial Sequence
  Antisense compound
agcaatacctgagagtgcac

SEQ ID NO: 23736 - DNA, 20 bp, Artificial Sequence
  Antisense compound
cagcaatacctgagagtgca

SEQ ID NO: 23737 - DNA, 20 bp, Artificial Sequence
  Antisense compound
gcagcaatacctgagagtgc

SEQ ID NO: 23738 - DNA, 20 bp, Artificial Sequence
  Antisense compound
agcagcaatacctgagagtg

SEQ ID NO: 23739 - DNA, 20 bp, Artificial Sequence
  Antisense compound
cagcagcaatacctgagagt

SEQ ID NO: 23740 - DNA, 20 bp, Artificial Sequence
  Antisense compound
tcagcagcaatacctgagag

SEQ ID NO: 23741 - DNA, 20 bp, Artificial Sequence
  Antisense compound
ttcagcagcaatacctgaga

SEQ ID NO: 23742 - DNA, 20 bp, Artificial Sequence
  Antisense compound
gttcagcagcaatacctgag

SEQ ID NO: 23743 - DNA, 20 bp, Artificial Sequence
  Antisense compound
tgttcagcagcaatacctga

SEQ ID NO: 23744 - DNA, 20 bp, Artificial Sequence
  Antisense compound
ctgttcagcagcaatacctg

SEQ ID NO: 23745 - DNA, 20 bp, Artificial Sequence
  Antisense compound
cctgttcagcagcaatacct

SEQ ID NO: 23746 - DNA, 20 bp, Artificial Sequence
  Antisense compound
tcctgttcagcagcaatacc

SEQ ID NO: 23747 - DNA, 20 bp, Artificial Sequence
  Antisense compound
atcctgttcagcagcaatac

SEQ ID NO: 23748 - DNA, 20 bp, Artificial Sequence
  Antisense compound
gatcctgttcagcagcaata

SEQ ID NO: 23749 - DNA, 20 bp, Artificial Sequence
  Antisense compound
cgatcctgttcagcagcaat

SEQ ID NO: 23750 - DNA, 20 bp, Artificial Sequence
  Antisense compound
gcgatcctgttcagcagcaa

SEQ ID NO: 23751 - DNA, 20 bp, Artificial Sequence
  Antisense compound
tgcgatcctgttcagcagca

SEQ ID NO: 23752 - DNA, 20 bp, Artificial Sequence
  Antisense compound
ttgcgatcctgttcagcagc

SEQ ID NO: 23753 - DNA, 20 bp, Artificial Sequence
  Antisense compound
gttgcgatcctgttcagcag

SEQ ID NO: 23754 - DNA, 20 bp, Artificial Sequence
  Antisense compound
tgttgcgatcctgttcagca

SEQ ID NO: 23755 - DNA, 20 bp, Artificial Sequence
  Antisense compound
gtgttgcgatcctgttcagc

SEQ ID NO: 23756 - DNA, 20 bp, Artificial Sequence
  Antisense compound
tgtgttgcgatcctgttcag

SEQ ID NO: 23757 - DNA, 20 bp, Artificial Sequence
  Antisense compound
gtgtgttgcgatcctgttca

SEQ ID NO: 23758 - DNA, 20 bp, Artificial Sequence
  Antisense compound
cgtgtgttgcgatcctgttc

SEQ ID NO: 23759 - DNA, 20 bp, Artificial Sequence
  Antisense compound
acgtgtgttgcgatcctgtt

SEQ ID NO: 23760 - DNA, 20 bp, Artificial Sequence
  Antisense compound
cacgtgtgttgcgatcctgt

SEQ ID NO: 23761 - DNA, 20 bp, Artificial Sequence
  Antisense compound
tcacgtgtgttgcgatcctg

SEQ ID NO: 23762 - DNA, 20 bp, Artificial Sequence
  Antisense compound
ttcacgtgtgttgcgatcct

SEQ ID NO: 23763 - DNA, 20 bp, Artificial Sequence
  Antisense compound
cttcacgtgtgttgcgatcc

SEQ ID NO: 23764 - DNA, 20 bp, Artificial Sequence
  Antisense compound
acttcacgtgtgttgcgatc

SEQ ID NO: 23765 - DNA, 20 bp, Artificial Sequence
  Antisense compound
cacttcacgtgtgttgcgat

SEQ ID NO: 23766 - DNA, 20 bp, Artificial Sequence
  Antisense compound
acacttcacgtgtgttgcga

SEQ ID NO: 23767 - DNA, 20 bp, Artificial Sequence
  Antisense compound
aacacttcacgtgtgttgcg

SEQ ID NO: 23768 - DNA, 20 bp, Artificial Sequence
  Antisense compound
gaacacttcacgtgtgttgc

SEQ ID NO: 23769 - DNA, 20 bp, Artificial Sequence
  Antisense compound
cgaacacttcacgtgtgttg

SEQ ID NO: 23770 - DNA, 20 bp, Artificial Sequence
  Antisense compound
gcgaacacttcacgtgtgtt

SEQ ID NO: 23771 - DNA, 20 bp, Artificial Sequence
  Antisense compound
agcgaacacttcacgtgtgt

SEQ ID NO: 23772 - DNA, 20 bp, Artificial Sequence
  Antisense compound
gagcgaacacttcacgtgtg

SEQ ID NO: 23773 - DNA, 20 bp, Artificial Sequence
  Antisense compound
tgagcgaacacttcacgtgt

SEQ ID NO: 23774 - DNA, 20 bp, Artificial Sequence
  Antisense compound
ttgagcgaacacttcacgtg

SEQ ID NO: 23775 - DNA, 20 bp, Artificial Sequence
  Antisense compound
cttgagcgaacacttcacgt

SEQ ID NO: 23776 - DNA, 20 bp, Artificial Sequence
  Antisense compound
acttgagcgaacacttcacg

SEQ ID NO: 23777 - DNA, 20 bp, Artificial Sequence
  Antisense compound
gacttgagcgaacacttcac

SEQ ID NO: 23778 - DNA, 20 bp, Artificial Sequence
  Antisense compound
tgacttgagcgaacacttca

SEQ ID NO: 23779 - DNA, 20 bp, Artificial Sequence
  Antisense compound
ttgacttgagcgaacacttc

SEQ ID NO: 23780 - DNA, 20 bp, Artificial Sequence
  Antisense compound
tttgacttgagcgaacactt

SEQ ID NO: 23781 - DNA, 20 bp, Artificial Sequence
  Antisense compound
gtttgacttgagcgaacact

SEQ ID NO: 23782 - DNA, 20 bp, Artificial Sequence
  Antisense compound
tgtttgacttgagcgaacac

SEQ ID NO: 23783 - DNA, 20 bp, Artificial Sequence
  Antisense compound
ttgtttgacttgagcgaaca

SEQ ID NO: 23784 - DNA, 20 bp, Artificial Sequence
  Antisense compound
tttgtttgacttgagcgaac

SEQ ID NO: 23785 - DNA, 20 bp, Artificial Sequence
  Antisense compound
atttgtttgacttgagcgaa

SEQ ID NO: 23786 - DNA, 20 bp, Artificial Sequence
  Antisense compound
catttgtttgacttgagcga

SEQ ID NO: 23787 - DNA, 20 bp, Artificial Sequence
  Antisense compound
acatttgtttgacttgagcg

SEQ ID NO: 23788 - DNA, 20 bp, Artificial Sequence
  Antisense compound
tacatttgtttgacttgagc

SEQ ID NO: 23789 - DNA, 20 bp, Artificial Sequence
  Antisense compound
gtacatttgtttgacttgag

SEQ ID NO: 23790 - DNA, 20 bp, Artificial Sequence
  Antisense compound
tgtacatttgtttgacttga

SEQ ID NO: 23791 - DNA, 20 bp, Artificial Sequence
  Antisense compound
ttgtacatttgtttgacttg

SEQ ID NO: 23792 - DNA, 20 bp, Artificial Sequence
  Antisense compound
tttgtacatttgtttgactt

SEQ ID NO: 23793 - DNA, 20 bp, Artificial Sequence
  Antisense compound
ttttgtacatttgtttgact

SEQ ID NO: 23794 - DNA, 20 bp, Artificial Sequence
  Antisense compound
gttttgtacatttgtttgac

SEQ ID NO: 23795 - DNA, 20 bp, Artificial Sequence
  Antisense compound
ggttttgtacatttgtttga

SEQ ID NO: 23796 - DNA, 20 bp, Artificial Sequence
  Antisense compound
gggttttgtacatttgtttg

SEQ ID NO: 23797 - DNA, 20 bp, Artificial Sequence
  Antisense compound
ggggttttgtacatttgttt

SEQ ID NO: 23798 - DNA, 20 bp, Artificial Sequence
  Antisense compound
tggggttttgtacatttgtt

SEQ ID NO: 23799 - DNA, 20 bp, Artificial Sequence
  Antisense compound
ttggggttttgtacatttgt

SEQ ID NO: 23800 - DNA, 20 bp, Artificial Sequence
  Antisense compound
gttggggttttgtacatttg

SEQ ID NO: 23801 - DNA, 20 bp, Artificial Sequence
  Antisense compound
agttggggttttgtacattt

SEQ ID NO: 23802 - DNA, 20 bp, Artificial Sequence
  Antisense compound
aagttggggttttgtacatt

SEQ ID NO: 23803 - DNA, 20 bp, Artificial Sequence
  Antisense compound
aaagttggggttttgtacat

SEQ ID NO: 23804 - DNA, 20 bp, Artificial Sequence
  Antisense compound
caaagttggggttttgtaca

SEQ ID NO: 23805 - DNA, 20 bp, Artificial Sequence
  Antisense compound
tcaaagttggggttttgtac

SEQ ID NO: 23806 - DNA, 20 bp, Artificial Sequence
  Antisense compound
ttcaaagttggggttttgta

SEQ ID NO: 23807 - DNA, 20 bp, Artificial Sequence
  Antisense compound
tttcaaagttggggttttgt

SEQ ID NO: 23808 - DNA, 20 bp, Artificial Sequence
  Antisense compound
atttcaaagttggggttttg

SEQ ID NO: 23809 - DNA, 20 bp, Artificial Sequence
  Antisense compound
tatttcaaagttggggtttt

SEQ ID NO: 23810 - DNA, 20 bp, Artificial Sequence
  Antisense compound
atatttcaaagttggggttt

SEQ ID NO: 23811 - DNA, 20 bp, Artificial Sequence
  Antisense compound
aatatttcaaagttggggtt

SEQ ID NO: 23812 - DNA, 20 bp, Artificial Sequence
  Antisense compound
aaatatttcaaagttggggt

SEQ ID NO: 23813 - DNA, 20 bp, Artificial Sequence
  Antisense compound
aaaatatttcaaagttgggg

SEQ ID NO: 23814 - DNA, 20 bp, Artificial Sequence
  Antisense compound
caaaatatttcaaagttggg

SEQ ID NO: 23815 - DNA, 20 bp, Artificial Sequence
  Antisense compound
ccaaaatatttcaaagttgg

SEQ ID NO: 23816 - DNA, 20 bp, Artificial Sequence
  Antisense compound
accaaaatatttcaaagttg

SEQ ID NO: 23817 - DNA, 20 bp, Artificial Sequence
  Antisense compound
caccaaaatatttcaaagtt

SEQ ID NO: 23818 - DNA, 20 bp, Artificial Sequence
  Antisense compound
ccaccaaaatatttcaaagt

SEQ ID NO: 23819 - DNA, 20 bp, Artificial Sequence
  Antisense compound
accaccaaaatatttcaaag

SEQ ID NO: 23820 - DNA, 20 bp, Artificial Sequence
  Antisense compound
aaccaccaaaatatttcaaa

SEQ ID NO: 23821 - DNA, 20 bp, Artificial Sequence
  Antisense compound
aaaccaccaaaatatttcaa

SEQ ID NO: 23822 - DNA, 20 bp, Artificial Sequence
  Antisense compound
aaaaccaccaaaatatttca

SEQ ID NO: 23823 - DNA, 20 bp, Artificial Sequence
  Antisense compound
taaaaccaccaaaatatttc

SEQ ID NO: 23824 - DNA, 20 bp, Artificial Sequence
  Antisense compound
ttaaaaccaccaaaatattt

SEQ ID NO: 23825 - DNA, 20 bp, Artificial Sequence
  Antisense compound
attaaaaccaccaaaatatt

SEQ ID NO: 23826 - DNA, 20 bp, Artificial Sequence
  Antisense compound
aattaaaaccaccaaaatat

SEQ ID NO: 23827 - DNA, 20 bp, Artificial Sequence
  Antisense compound
aaattaaaaccaccaaaata

SEQ ID NO: 23828 - DNA, 20 bp, Artificial Sequence
  Antisense compound
aaaattaaaaccaccaaaat

SEQ ID NO: 23829 - DNA, 20 bp, Artificial Sequence
  Antisense compound
aaaaattaaaaccaccaaaa

SEQ ID NO: 23830 - DNA, 20 bp, Artificial Sequence
  Antisense compound
gaaaaattaaaaccaccaaa

SEQ ID NO: 23831 - DNA, 20 bp, Artificial Sequence
  Antisense compound
tgaaaaattaaaaccaccaa

SEQ ID NO: 23832 - DNA, 20 bp, Artificial Sequence
  Antisense compound
gtgaaaaattaaaaccacca

SEQ ID NO: 23833 - DNA, 20 bp, Artificial Sequence
  Antisense compound
tgtgaaaaattaaaaccacc

SEQ ID NO: 23834 - DNA, 20 bp, Artificial Sequence
  Antisense compound
ttgtgaaaaattaaaaccac

SEQ ID NO: 23835 - DNA, 20 bp, Artificial Sequence
  Antisense compound
tttgtgaaaaattaaaacca

SEQ ID NO: 23836 - DNA, 20 bp, Artificial Sequence
  Antisense compound
atttgtgaaaaattaaaacc

SEQ ID NO: 23837 - DNA, 20 bp, Artificial Sequence
  Antisense compound
tatttgtgaaaaattaaaac

SEQ ID NO: 23838 - DNA, 20 bp, Artificial Sequence
  Antisense compound
atatttgtgaaaaattaaaa

SEQ ID NO: 23839 - DNA, 20 bp, Artificial Sequence
  Antisense compound
aatatttgtgaaaaattaaa

SEQ ID NO: 23840 - DNA, 20 bp, Artificial Sequence
  Antisense compound
taatatttgtgaaaaattaa

SEQ ID NO: 23841 - DNA, 20 bp, Artificial Sequence
  Antisense compound
gtaatatttgtgaaaaatta

SEQ ID NO: 23842 - DNA, 20 bp, Artificial Sequence
  Antisense compound
ggtaatatttgtgaaaaatt

SEQ ID NO: 23843 - DNA, 20 bp, Artificial Sequence
  Antisense compound
aggtaatatttgtgaaaaat

SEQ ID NO: 23844 - DNA, 20 bp, Artificial Sequence
  Antisense compound
caggtaatatttgtgaaaaa

SEQ ID NO: 23845 - DNA, 20 bp, Artificial Sequence
  Antisense compound
tcaggtaatatttgtgaaaa

SEQ ID NO: 23846 - DNA, 20 bp, Artificial Sequence
  Antisense compound
gtcaggtaatatttgtgaaa

SEQ ID NO: 23847 - DNA, 20 bp, Artificial Sequence
  Antisense compound
ggtcaggtaatatttgtgaa

SEQ ID NO: 23848 - DNA, 20 bp, Artificial Sequence
  Antisense compound
gggtcaggtaatatttgtga

SEQ ID NO: 23849 - DNA, 20 bp, Artificial Sequence
  Antisense compound
agggtcaggtaatatttgtg

SEQ ID NO: 23850 - DNA, 20 bp, Artificial Sequence
  Antisense compound
gagggtcaggtaatatttgt

SEQ ID NO: 23851 - DNA, 20 bp, Artificial Sequence
  Antisense compound
agagggtcaggtaatatttg

SEQ ID NO: 23852 - DNA, 20 bp, Artificial Sequence
  Antisense compound
tagagggtcaggtaatattt

SEQ ID NO: 23853 - DNA, 20 bp, Artificial Sequence
  Antisense compound
ttagagggtcaggtaatatt

SEQ ID NO: 23854 - DNA, 20 bp, Artificial Sequence
  Antisense compound
tttagagggtcaggtaatat

SEQ ID NO: 23855 - DNA, 20 bp, Artificial Sequence
  Antisense compound
ctttagagggtcaggtaata

SEQ ID NO: 23856 - DNA, 20 bp, Artificial Sequence
  Antisense compound
gctttagagggtcaggtaat

SEQ ID NO: 23857 - DNA, 20 bp, Artificial Sequence
  Antisense compound
ggctttagagggtcaggtaa

SEQ ID NO: 23858 - DNA, 20 bp, Artificial Sequence
  Antisense compound
tggctttagagggtcaggta

SEQ ID NO: 23859 - DNA, 20 bp, Artificial Sequence
  Antisense compound
ttggctttagagggtcaggt

SEQ ID NO: 23860 - DNA, 20 bp, Artificial Sequence
  Antisense compound
gttggctttagagggtcagg

SEQ ID NO: 23861 - DNA, 20 bp, Artificial Sequence
  Antisense compound
agttggctttagagggtcag

SEQ ID NO: 23862 - DNA, 20 bp, Artificial Sequence
  Antisense compound
tagttggctttagagggtca

SEQ ID NO: 23863 - DNA, 20 bp, Artificial Sequence
  Antisense compound
ttagttggctttagagggtc

SEQ ID NO: 23864 - DNA, 20 bp, Artificial Sequence
  Antisense compound
cttagttggctttagagggt

SEQ ID NO: 23865 - DNA, 20 bp, Artificial Sequence
  Antisense compound
tcttagttggctttagaggg

SEQ ID NO: 23866 - DNA, 20 bp, Artificial Sequence
  Antisense compound
ctcttagttggctttagagg

SEQ ID NO: 23867 - DNA, 20 bp, Artificial Sequence
  Antisense compound
cctcttagttggctttagag

SEQ ID NO: 23868 - DNA, 20 bp, Artificial Sequence
  Antisense compound
acctcttagttggctttaga

SEQ ID NO: 23869 - DNA, 20 bp, Artificial Sequence
  Antisense compound
gacctcttagttggctttag

SEQ ID NO: 23870 - DNA, 20 bp, Artificial Sequence
  Antisense compound
agacctcttagttggcttta

SEQ ID NO: 23871 - DNA, 20 bp, Artificial Sequence
  Antisense compound
aagacctcttagttggcttt

SEQ ID NO: 23872 - DNA, 20 bp, Artificial Sequence
  Antisense compound
aaagacctcttagttggctt

SEQ ID NO: 23873 - DNA, 20 bp, Artificial Sequence
  Antisense compound
aaaagacctcttagttggct

SEQ ID NO: 23874 - DNA, 20 bp, Artificial Sequence
  Antisense compound
taaaagacctcttagttggc

SEQ ID NO: 23875 - DNA, 20 bp, Artificial Sequence
  Antisense compound
ataaaagacctcttagttgg

SEQ ID NO: 23876 - DNA, 20 bp, Artificial Sequence
  Antisense compound
aataaaagacctcttagttg

SEQ ID NO: 23877 - DNA, 20 bp, Artificial Sequence
  Antisense compound
caataaaagacctcttagtt

SEQ ID NO: 23878 - DNA, 20 bp, Artificial Sequence
  Antisense compound
tcaataaaagacctcttagt

SEQ ID NO: 23879 - DNA, 20 bp, Artificial Sequence
  Antisense compound
ctcaataaaagacctcttag

SEQ ID NO: 23880 - DNA, 20 bp, Artificial Sequence
  Antisense compound
cctcaataaaagacctctta

SEQ ID NO: 23881 - DNA, 20 bp, Artificial Sequence
  Antisense compound
tcctcaataaaagacctctt

SEQ ID NO: 23882 - DNA, 20 bp, Artificial Sequence
  Antisense compound
gtcctcaataaaagacctct

SEQ ID NO: 23883 - DNA, 20 bp, Artificial Sequence
  Antisense compound
agtcctcaataaaagacctc

SEQ ID NO: 23884 - DNA, 20 bp, Artificial Sequence
  Antisense compound
aagtcctcaataaaagacct

SEQ ID NO: 23885 - DNA, 20 bp, Artificial Sequence
  Antisense compound
caagtcctcaataaaagacc

SEQ ID NO: 23886 - DNA, 20 bp, Artificial Sequence
  Antisense compound
gcaagtcctcaataaaagac

SEQ ID NO: 23887 - DNA, 20 bp, Artificial Sequence
  Antisense compound
agcaagtcctcaataaaaga

SEQ ID NO: 23888 - DNA, 20 bp, Artificial Sequence
  Antisense compound
gagcaagtcctcaataaaag

SEQ ID NO: 23889 - DNA, 20 bp, Artificial Sequence
  Antisense compound
agagcaagtcctcaataaaa

SEQ ID NO: 23890 - DNA, 20 bp, Artificial Sequence
  Antisense compound
aagagcaagtcctcaataaa

SEQ ID NO: 23891 - DNA, 20 bp, Artificial Sequence
  Antisense compound
aaagagcaagtcctcaataa

SEQ ID NO: 23892 - DNA, 20 bp, Artificial Sequence
  Antisense compound
taaagagcaagtcctcaata

SEQ ID NO: 23893 - DNA, 20 bp, Artificial Sequence
  Antisense compound
ttaaagagcaagtcctcaat

SEQ ID NO: 23894 - DNA, 20 bp, Artificial Sequence
  Antisense compound
attaaagagcaagtcctcaa

SEQ ID NO: 23895 - DNA, 20 bp, Artificial Sequence
  Antisense compound
tattaaagagcaagtcctca

SEQ ID NO: 23896 - DNA, 20 bp, Artificial Sequence
  Antisense compound
ttattaaagagcaagtcctc

SEQ ID NO: 23897 - DNA, 20 bp, Artificial Sequence
  Antisense compound
cttattaaagagcaagtcct

SEQ ID NO: 23898 - DNA, 20 bp, Artificial Sequence
  Antisense compound
ccttattaaagagcaagtcc

SEQ ID NO: 23899 - DNA, 20 bp, Artificial Sequence
  Antisense compound
accttattaaagagcaagtc

SEQ ID NO: 23900 - DNA, 20 bp, Artificial Sequence
  Antisense compound
caccttattaaagagcaagt

SEQ ID NO: 23901 - DNA, 20 bp, Artificial Sequence
  Antisense compound
tcaccttattaaagagcaag

SEQ ID NO: 23902 - DNA, 20 bp, Artificial Sequence
  Antisense compound
gtcaccttattaaagagcaa

SEQ ID NO: 23903 - DNA, 20 bp, Artificial Sequence
  Antisense compound
tgtcaccttattaaagagca

SEQ ID NO: 23904 - DNA, 20 bp, Artificial Sequence
  Antisense compound
gtgtcaccttattaaagagc

SEQ ID NO: 23905 - DNA, 20 bp, Artificial Sequence
  Antisense compound
agtgtcaccttattaaagag

SEQ ID NO: 23906 - DNA, 20 bp, Artificial Sequence
  Antisense compound
gagtgtcaccttattaaaga

SEQ ID NO: 23907 - DNA, 20 bp, Artificial Sequence
  Antisense compound
cgagtgtcaccttattaaag

SEQ ID NO: 23908 - DNA, 20 bp, Artificial Sequence
  Antisense compound
gcgagtgtcaccttattaaa

SEQ ID NO: 23909 - DNA, 20 bp, Artificial Sequence
  Antisense compound
agcgagtgtcaccttattaa

SEQ ID NO: 23910 - DNA, 20 bp, Artificial Sequence
  Antisense compound
cagcgagtgtcaccttatta

SEQ ID NO: 23911 - DNA, 20 bp, Artificial Sequence
  Antisense compound
tcagcgagtgtcaccttatt

SEQ ID NO: 23912 - DNA, 20 bp, Artificial Sequence
  Antisense compound
atcagcgagtgtcaccttat

SEQ ID NO: 23913 - DNA, 20 bp, Artificial Sequence
  Antisense compound
catcagcgagtgtcacctta

SEQ ID NO: 23914 - DNA, 20 bp, Artificial Sequence
  Antisense compound
gcatcagcgagtgtcacctt

SEQ ID NO: 23915 - DNA, 20 bp, Artificial Sequence
  Antisense compound
agcatcagcgagtgtcacct

SEQ ID NO: 23916 - DNA, 20 bp, Artificial Sequence
  Antisense compound
cagcatcagcgagtgtcacc

SEQ ID NO: 23917 - DNA, 20 bp, Artificial Sequence
  Antisense compound
ccagcatcagcgagtgtcac

SEQ ID NO: 23918 - DNA, 20 bp, Artificial Sequence
  Antisense compound
gccagcatcagcgagtgtca

SEQ ID NO: 23919 - DNA, 20 bp, Artificial Sequence
  Antisense compound
agccagcatcagcgagtgtc

SEQ ID NO: 23920 - DNA, 20 bp, Artificial Sequence
  Antisense compound
aagccagcatcagcgagtgt

SEQ ID NO: 23921 - DNA, 20 bp, Artificial Sequence
  Antisense compound
gaagccagcatcagcgagtg

SEQ ID NO: 23922 - DNA, 20 bp, Artificial Sequence
  Antisense compound
tgaagccagcatcagcgagt

SEQ ID NO: 23923 - DNA, 20 bp, Artificial Sequence
  Antisense compound
atgaagccagcatcagcgag

SEQ ID NO: 23924 - DNA, 20 bp, Artificial Sequence
  Antisense compound
catgaagccagcatcagcga

SEQ ID NO: 23925 - DNA, 20 bp, Artificial Sequence
  Antisense compound
tcatgaagccagcatcagcg

SEQ ID NO: 23926 - DNA, 20 bp, Artificial Sequence
  Antisense compound
ttcatgaagccagcatcagc

SEQ ID NO: 23927 - DNA, 20 bp, Artificial Sequence
  Antisense compound
cttcatgaagccagcatcag

SEQ ID NO: 23928 - DNA, 20 bp, Artificial Sequence
  Antisense compound
gcttcatgaagccagcatca

SEQ ID NO: 23929 - DNA, 20 bp, Artificial Sequence
  Antisense compound
tgcttcatgaagccagcatc

SEQ ID NO: 23930 - DNA, 20 bp, Artificial Sequence
  Antisense compound
ttgcttcatgaagccagcat

SEQ ID NO: 23931 - DNA, 20 bp, Artificial Sequence
  Antisense compound
attgcttcatgaagccagca

SEQ ID NO: 23932 - DNA, 20 bp, Artificial Sequence
  Antisense compound
tattgcttcatgaagccagc

SEQ ID NO: 23933 - DNA, 20 bp, Artificial Sequence
  Antisense compound
atattgcttcatgaagccag

SEQ ID NO: 23934 - DNA, 20 bp, Artificial Sequence
  Antisense compound
catattgcttcatgaagcca

SEQ ID NO: 23935 - DNA, 20 bp, Artificial Sequence
  Antisense compound
ccatattgcttcatgaagcc

SEQ ID NO: 23936 - DNA, 20 bp, Artificial Sequence
  Antisense compound
gccatattgcttcatgaagc

SEQ ID NO: 23937 - DNA, 20 bp, Artificial Sequence
  Antisense compound
cgccatattgcttcatgaag

SEQ ID NO: 23938 - DNA, 20 bp, Artificial Sequence
  Antisense compound
tcgccatattgcttcatgaa

SEQ ID NO: 23939 - DNA, 20 bp, Artificial Sequence
  Antisense compound
ttcgccatattgcttcatga

SEQ ID NO: 23940 - DNA, 20 bp, Artificial Sequence
  Antisense compound
attcgccatattgcttcatg

SEQ ID NO: 23941 - DNA, 20 bp, Artificial Sequence
  Antisense compound
cattcgccatattgcttcat

SEQ ID NO: 23942 - DNA, 20 bp, Artificial Sequence
  Antisense compound
gcattcgccatattgcttca

SEQ ID NO: 23943 - DNA, 20 bp, Artificial Sequence
  Antisense compound
ggcattcgccatattgcttc

SEQ ID NO: 23944 - DNA, 20 bp, Artificial Sequence
  Antisense compound
aggcattcgccatattgctt

SEQ ID NO: 23945 - DNA, 20 bp, Artificial Sequence
  Antisense compound
taggcattcgccatattgct

SEQ ID NO: 23946 - DNA, 20 bp, Artificial Sequence
  Antisense compound
ctaggcattcgccatattgc

SEQ ID NO: 23947 - DNA, 20 bp, Artificial Sequence
  Antisense compound
cctaggcattcgccatattg

SEQ ID NO: 23948 - DNA, 20 bp, Artificial Sequence
  Antisense compound
acctaggcattcgccatatt

SEQ ID NO: 23949 - DNA, 20 bp, Artificial Sequence
  Antisense compound
cacctaggcattcgccatat

SEQ ID NO: 23950 - DNA, 20 bp, Artificial Sequence
  Antisense compound
tcacctaggcattcgccata

SEQ ID NO: 23951 - DNA, 20 bp, Artificial Sequence
  Antisense compound
atcacctaggcattcgccat

SEQ ID NO: 23952 - DNA, 20 bp, Artificial Sequence
  Antisense compound
tatcacctaggcattcgcca

SEQ ID NO: 23953 - DNA, 20 bp, Artificial Sequence
  Antisense compound
atatcacctaggcattcgcc

SEQ ID NO: 23954 - DNA, 20 bp, Artificial Sequence
  Antisense compound
aatatcacctaggcattcgc

SEQ ID NO: 23955 - DNA, 20 bp, Artificial Sequence
  Antisense compound
taatatcacctaggcattcg

SEQ ID NO: 23956 - DNA, 20 bp, Artificial Sequence
  Antisense compound
ttaatatcacctaggcattc

SEQ ID NO: 23957 - DNA, 20 bp, Artificial Sequence
  Antisense compound
attaatatcacctaggcatt

SEQ ID NO: 23958 - DNA, 20 bp, Artificial Sequence
  Antisense compound
cattaatatcacctaggcat

SEQ ID NO: 23959 - DNA, 20 bp, Artificial Sequence
  Antisense compound
gcattaatatcacctaggca

SEQ ID NO: 23960 - DNA, 20 bp, Artificial Sequence
  Antisense compound
agcattaatatcacctaggc

SEQ ID NO: 23961 - DNA, 20 bp, Artificial Sequence
  Antisense compound
tagcattaatatcacctagg

SEQ ID NO: 23962 - DNA, 20 bp, Artificial Sequence
  Antisense compound
ctagcattaatatcacctag

SEQ ID NO: 23963 - DNA, 20 bp, Artificial Sequence
  Antisense compound
tctagcattaatatcaccta

SEQ ID NO: 23964 - DNA, 20 bp, Artificial Sequence
  Antisense compound
ctctagcattaatatcacct

SEQ ID NO: 23965 - DNA, 20 bp, Artificial Sequence
  Antisense compound
tctctagcattaatatcacc

SEQ ID NO: 23966 - DNA, 20 bp, Artificial Sequence
  Antisense compound
atctctagcattaatatcac

SEQ ID NO: 23967 - DNA, 20 bp, Artificial Sequence
  Antisense compound
gatctctagcattaatatca

SEQ ID NO: 23968 - DNA, 20 bp, Artificial Sequence
  Antisense compound
agatctctagcattaatatc

SEQ ID NO: 23969 - DNA, 20 bp, Artificial Sequence
  Antisense compound
gagatctctagcattaatat

SEQ ID NO: 23970 - DNA, 20 bp, Artificial Sequence
  Antisense compound
tgagatctctagcattaata

SEQ ID NO: 23971 - DNA, 20 bp, Artificial Sequence
  Antisense compound
atgagatctctagcattaat

SEQ ID NO: 23972 - DNA, 20 bp, Artificial Sequence
  Antisense compound
aatgagatctctagcattaa

SEQ ID NO: 23973 - DNA, 20 bp, Artificial Sequence
  Antisense compound
aaatgagatctctagcatta

SEQ ID NO: 23974 - DNA, 20 bp, Artificial Sequence
  Antisense compound
caaatgagatctctagcatt

SEQ ID NO: 23975 - DNA, 20 bp, Artificial Sequence
  Antisense compound
acaaatgagatctctagcat

SEQ ID NO: 23976 - DNA, 20 bp, Artificial Sequence
  Antisense compound
cacaaatgagatctctagca

SEQ ID NO: 23977 - DNA, 20 bp, Artificial Sequence
  Antisense compound
gcacaaatgagatctctagc

SEQ ID NO: 23978 - DNA, 20 bp, Artificial Sequence
  Antisense compound
cgcacaaatgagatctctag

SEQ ID NO: 23979 - DNA, 20 bp, Artificial Sequence
  Antisense compound
gcgcacaaatgagatctcta

SEQ ID NO: 23980 - DNA, 20 bp, Artificial Sequence
  Antisense compound
tgcgcacaaatgagatctct

SEQ ID NO: 23981 - DNA, 20 bp, Artificial Sequence
  Antisense compound
ctgcgcacaaatgagatctc

SEQ ID NO: 23982 - DNA, 20 bp, Artificial Sequence
  Antisense compound
tctgcgcacaaatgagatct

SEQ ID NO: 23983 - DNA, 20 bp, Artificial Sequence
  Antisense compound
ttctgcgcacaaatgagatc

SEQ ID NO: 23984 - DNA, 20 bp, Artificial Sequence
  Antisense compound
cttctgcgcacaaatgagat

SEQ ID NO: 23985 - DNA, 20 bp, Artificial Sequence
  Antisense compound
acttctgcgcacaaatgaga

SEQ ID NO: 23986 - DNA, 20 bp, Artificial Sequence
  Antisense compound
aacttctgcgcacaaatgag

SEQ ID NO: 23987 - DNA, 20 bp, Artificial Sequence
  Antisense compound
gaacttctgcgcacaaatga

SEQ ID NO: 23988 - DNA, 20 bp, Artificial Sequence
  Antisense compound
tgaacttctgcgcacaaatg

SEQ ID NO: 23989 - DNA, 20 bp, Artificial Sequence
  Antisense compound
ttgaacttctgcgcacaaat

SEQ ID NO: 23990 - DNA, 20 bp, Artificial Sequence
  Antisense compound
attgaacttctgcgcacaaa

SEQ ID NO: 23991 - DNA, 20 bp, Artificial Sequence
  Antisense compound
cattgaacttctgcgcacaa

SEQ ID NO: 23992 - DNA, 20 bp, Artificial Sequence
  Antisense compound
ccattgaacttctgcgcaca

SEQ ID NO: 23993 - DNA, 20 bp, Artificial Sequence
  Antisense compound
tccattgaacttctgcgcac

SEQ ID NO: 23994 - DNA, 20 bp, Artificial Sequence
  Antisense compound
gtccattgaacttctgcgca

SEQ ID NO: 23995 - DNA, 20 bp, Artificial Sequence
  Antisense compound
agtccattgaacttctgcgc

SEQ ID NO: 23996 - DNA, 20 bp, Artificial Sequence
  Antisense compound
aagtccattgaacttctgcg

SEQ ID NO: 23997 - DNA, 20 bp, Artificial Sequence
  Antisense compound
taagtccattgaacttctgc

SEQ ID NO: 23998 - DNA, 20 bp, Artificial Sequence
  Antisense compound
gtaagtccattgaacttctg

SEQ ID NO: 23999 - DNA, 20 bp, Artificial Sequence
  Antisense compound
tgtaagtccattgaacttct

SEQ ID NO: 24000 - DNA, 20 bp, Artificial Sequence
  Antisense compound
ctgtaagtccattgaacttc

SEQ ID NO: 24001 - DNA, 20 bp, Artificial Sequence
  Antisense compound
actgtaagtccattgaactt

SEQ ID NO: 24002 - DNA, 20 bp, Artificial Sequence
  Antisense compound
cactgtaagtccattgaact

SEQ ID NO: 24003 - DNA, 20 bp, Artificial Sequence
  Antisense compound
acactgtaagtccattgaac

SEQ ID NO: 24004 - DNA, 20 bp, Artificial Sequence
  Antisense compound
aacactgtaagtccattgaa

SEQ ID NO: 24005 - DNA, 20 bp, Artificial Sequence
  Antisense compound
caacactgtaagtccattga

SEQ ID NO: 24006 - DNA, 20 bp, Artificial Sequence
  Antisense compound
gcaacactgtaagtccattg

SEQ ID NO: 24007 - DNA, 20 bp, Artificial Sequence
  Antisense compound
ggcaacactgtaagtccatt

SEQ ID NO: 24008 - DNA, 20 bp, Artificial Sequence
  Antisense compound
tggcaacactgtaagtccat

SEQ ID NO: 24009 - DNA, 20 bp, Artificial Sequence
  Antisense compound
gtggcaacactgtaagtcca

SEQ ID NO: 24010 - DNA, 20 bp, Artificial Sequence
  Antisense compound
ggtggcaacactgtaagtcc

SEQ ID NO: 24011 - DNA, 20 bp, Artificial Sequence
  Antisense compound
aggtggcaacactgtaagtc

SEQ ID NO: 24012 - DNA, 20 bp, Artificial Sequence
  Antisense compound
gaggtggcaacactgtaagt

SEQ ID NO: 24013 - DNA, 20 bp, Artificial Sequence
  Antisense compound
agaggtggcaacactgtaag

SEQ ID NO: 24014 - DNA, 20 bp, Artificial Sequence
  Antisense compound
cagaggtggcaacactgtaa

SEQ ID NO: 24015 - DNA, 20 bp, Artificial Sequence
  Antisense compound
gcagaggtggcaacactgta

SEQ ID NO: 24016 - DNA, 20 bp, Artificial Sequence
  Antisense compound
agcagaggtggcaacactgt

SEQ ID NO: 24017 - DNA, 20 bp, Artificial Sequence
  Antisense compound
gagcagaggtggcaacactg

SEQ ID NO: 24018 - DNA, 20 bp, Artificial Sequence
  Antisense compound
tgagcagaggtggcaacact

SEQ ID NO: 24019 - DNA, 20 bp, Artificial Sequence
  Antisense compound
gtgagcagaggtggcaacac

SEQ ID NO: 24020 - DNA, 20 bp, Artificial Sequence
  Antisense compound
agtgagcagaggtggcaaca

SEQ ID NO: 24021 - DNA, 20 bp, Artificial Sequence
  Antisense compound
cagtgagcagaggtggcaac

SEQ ID NO: 24022 - DNA, 20 bp, Artificial Sequence
  Antisense compound
tcagtgagcagaggtggcaa

SEQ ID NO: 24023 - DNA, 20 bp, Artificial Sequence
  Antisense compound
atcagtgagcagaggtggca

SEQ ID NO: 24024 - DNA, 20 bp, Artificial Sequence
  Antisense compound
catcagtgagcagaggtggc

SEQ ID NO: 24025 - DNA, 20 bp, Artificial Sequence
  Antisense compound
tcatcagtgagcagaggtgg

SEQ ID NO: 24026 - DNA, 20 bp, Artificial Sequence
  Antisense compound
atcatcagtgagcagaggtg

SEQ ID NO: 24027 - DNA, 20 bp, Artificial Sequence
  Antisense compound
tatcatcagtgagcagaggt

SEQ ID NO: 24028 - DNA, 20 bp, Artificial Sequence
  Antisense compound
atatcatcagtgagcagagg

SEQ ID NO: 24029 - DNA, 20 bp, Artificial Sequence
  Antisense compound
catatcatcagtgagcagag

SEQ ID NO: 24030 - DNA, 20 bp, Artificial Sequence
  Antisense compound
tcatatcatcagtgagcaga

SEQ ID NO: 24031 - DNA, 20 bp, Artificial Sequence
  Antisense compound
atcatatcatcagtgagcag

SEQ ID NO: 24032 - DNA, 20 bp, Artificial Sequence
  Antisense compound
aatcatatcatcagtgagca

SEQ ID NO: 24033 - DNA, 20 bp, Artificial Sequence
  Antisense compound
caatcatatcatcagtgagc

SEQ ID NO: 24034 - DNA, 20 bp, Artificial Sequence
  Antisense compound
gcaatcatatcatcagtgag

SEQ ID NO: 24035 - DNA, 20 bp, Artificial Sequence
  Antisense compound
agcaatcatatcatcagtga

SEQ ID NO: 24036 - DNA, 20 bp, Artificial Sequence
  Antisense compound
cagcaatcatatcatcagtg

SEQ ID NO: 24037 - DNA, 20 bp, Artificial Sequence
  Antisense compound
gcagcaatcatatcatcagt

SEQ ID NO: 24038 - DNA, 20 bp, Artificial Sequence
  Antisense compound
ggcagcaatcatatcatcag

SEQ ID NO: 24039 - DNA, 20 bp, Artificial Sequence
  Antisense compound
aggcagcaatcatatcatca

SEQ ID NO: 24040 - DNA, 20 bp, Artificial Sequence
  Antisense compound
taggcagcaatcatatcatc

SEQ ID NO: 24041 - DNA, 20 bp, Artificial Sequence
  Antisense compound
gtaggcagcaatcatatcat

SEQ ID NO: 24042 - DNA, 20 bp, Artificial Sequence
  Antisense compound
tgtaggcagcaatcatatca

SEQ ID NO: 24043 - DNA, 20 bp, Artificial Sequence
  Antisense compound
gtgtaggcagcaatcatatc

SEQ ID NO: 24044 - DNA, 20 bp, Artificial Sequence
  Antisense compound
agtgtaggcagcaatcatat

SEQ ID NO: 24045 - DNA, 20 bp, Artificial Sequence
  Antisense compound
cagtgtaggcagcaatcata

SEQ ID NO: 24046 - DNA, 20 bp, Artificial Sequence
  Antisense compound
gcagtgtaggcagcaatcat

SEQ ID NO: 24047 - DNA, 20 bp, Artificial Sequence
  Antisense compound
agcagtgtaggcagcaatca

SEQ ID NO: 24048 - DNA, 20 bp, Artificial Sequence
  Antisense compound
cagcagtgtaggcagcaatc

SEQ ID NO: 24049 - DNA, 20 bp, Artificial Sequence
  Antisense compound
gcagcagtgtaggcagcaat

SEQ ID NO: 24050 - DNA, 20 bp, Artificial Sequence
  Antisense compound
agcagcagtgtaggcagcaa

SEQ ID NO: 24051 - DNA, 20 bp, Artificial Sequence
  Antisense compound
gagcagcagtgtaggcagca

SEQ ID NO: 24052 - DNA, 20 bp, Artificial Sequence
  Antisense compound
agagcagcagtgtaggcagc

SEQ ID NO: 24053 - DNA, 20 bp, Artificial Sequence
  Antisense compound
tagagcagcagtgtaggcag

SEQ ID NO: 24054 - DNA, 20 bp, Artificial Sequence
  Antisense compound
ctagagcagcagtgtaggca

SEQ ID NO: 24055 - DNA, 20 bp, Artificial Sequence
  Antisense compound
actagagcagcagtgtaggc

SEQ ID NO: 24056 - DNA, 20 bp, Artificial Sequence
  Antisense compound
aactagagcagcagtgtagg

SEQ ID NO: 24057 - DNA, 20 bp, Artificial Sequence
  Antisense compound
taactagagcagcagtgtag

SEQ ID NO: 24058 - DNA, 20 bp, Artificial Sequence
  Antisense compound
ctaactagagcagcagtgta

SEQ ID NO: 24059 - DNA, 20 bp, Artificial Sequence
  Antisense compound
actaactagagcagcagtgt

SEQ ID NO: 24060 - DNA, 20 bp, Artificial Sequence
  Antisense compound
cactaactagagcagcagtg

SEQ ID NO: 24061 - DNA, 20 bp, Artificial Sequence
  Antisense compound
ccactaactagagcagcagt

SEQ ID NO: 24062 - DNA, 20 bp, Artificial Sequence
  Antisense compound
accactaactagagcagcag

SEQ ID NO: 24063 - DNA, 20 bp, Artificial Sequence
  Antisense compound
taccactaactagagcagca

SEQ ID NO: 24064 - DNA, 20 bp, Artificial Sequence
  Antisense compound
gtaccactaactagagcagc

SEQ ID NO: 24065 - DNA, 20 bp, Artificial Sequence
  Antisense compound
agtaccactaactagagcag

SEQ ID NO: 24066 - DNA, 20 bp, Artificial Sequence
  Antisense compound
cagtaccactaactagagca

SEQ ID NO: 24067 - DNA, 20 bp, Artificial Sequence
  Antisense compound
gcagtaccactaactagagc

SEQ ID NO: 24068 - DNA, 20 bp, Artificial Sequence
  Antisense compound
ggcagtaccactaactagag

SEQ ID NO: 24069 - DNA, 20 bp, Artificial Sequence
  Antisense compound
tggcagtaccactaactaga

SEQ ID NO: 24070 - DNA, 20 bp, Artificial Sequence
  Antisense compound
gtggcagtaccactaactag

SEQ ID NO: 24071 - DNA, 20 bp, Artificial Sequence
  Antisense compound
agtggcagtaccactaacta

SEQ ID NO: 24072 - DNA, 20 bp, Artificial Sequence
  Antisense compound
cagtggcagtaccactaact

SEQ ID NO: 24073 - DNA, 20 bp, Artificial Sequence
  Antisense compound
gcagtggcagtaccactaac

SEQ ID NO: 24074 - DNA, 20 bp, Artificial Sequence
  Antisense compound
agcagtggcagtaccactaa

SEQ ID NO: 24075 - DNA, 20 bp, Artificial Sequence
  Antisense compound
cagcagtggcagtaccacta

SEQ ID NO: 24076 - DNA, 20 bp, Artificial Sequence
  Antisense compound
ccagcagtggcagtaccact

SEQ ID NO: 24077 - DNA, 20 bp, Artificial Sequence
  Antisense compound
tccagcagtggcagtaccac

SEQ ID NO: 24078 - DNA, 20 bp, Artificial Sequence
  Antisense compound
atccagcagtggcagtacca

SEQ ID NO: 24079 - DNA, 20 bp, Artificial Sequence
  Antisense compound
catccagcagtggcagtacc

SEQ ID NO: 24080 - DNA, 20 bp, Artificial Sequence
  Antisense compound
ccatccagcagtggcagtac

SEQ ID NO: 24081 - DNA, 20 bp, Artificial Sequence
  Antisense compound
tccatccagcagtggcagta

SEQ ID NO: 24082 - DNA, 20 bp, Artificial Sequence
  Antisense compound
gtccatccagcagtggcagt

SEQ ID NO: 24083 - DNA, 20 bp, Artificial Sequence
  Antisense compound
tgtccatccagcagtggcag

SEQ ID NO: 24084 - DNA, 20 bp, Artificial Sequence
  Antisense compound
atgtccatccagcagtggca

SEQ ID NO: 24085 - DNA, 20 bp, Artificial Sequence
  Antisense compound
aatgtccatccagcagtggc

SEQ ID NO: 24086 - DNA, 20 bp, Artificial Sequence
  Antisense compound
aaatgtccatccagcagtgg

SEQ ID NO: 24087 - DNA, 20 bp, Artificial Sequence
  Antisense compound
caaatgtccatccagcagtg

SEQ ID NO: 24088 - DNA, 20 bp, Artificial Sequence
  Antisense compound
ccaaatgtccatccagcagt

SEQ ID NO: 24089 - DNA, 20 bp, Artificial Sequence
  Antisense compound
accaaatgtccatccagcag

SEQ ID NO: 24090 - DNA, 20 bp, Artificial Sequence
  Antisense compound
caccaaatgtccatccagca

SEQ ID NO: 24091 - DNA, 20 bp, Artificial Sequence
  Antisense compound
gcaccaaatgtccatccagc

SEQ ID NO: 24092 - DNA, 20 bp, Artificial Sequence
  Antisense compound
agcaccaaatgtccatccag

SEQ ID NO: 24093 - DNA, 20 bp, Artificial Sequence
  Antisense compound
cagcaccaaatgtccatcca

SEQ ID NO: 24094 - DNA, 20 bp, Artificial Sequence
  Antisense compound
ccagcaccaaatgtccatcc

SEQ ID NO: 24095 - DNA, 20 bp, Artificial Sequence
  Antisense compound
gccagcaccaaatgtccatc

SEQ ID NO: 24096 - DNA, 20 bp, Artificial Sequence
  Antisense compound
cgccagcaccaaatgtccat

SEQ ID NO: 24097 - DNA, 20 bp, Artificial Sequence
  Antisense compound
gcgccagcaccaaatgtcca

SEQ ID NO: 24098 - DNA, 20 bp, Artificial Sequence
  Antisense compound
agcgccagcaccaaatgtcc

SEQ ID NO: 24099 - DNA, 20 bp, Artificial Sequence
  Antisense compound
cagcgccagcaccaaatgtc

SEQ ID NO: 24100 - DNA, 20 bp, Artificial Sequence
  Antisense compound
gcagcgccagcaccaaatgt

SEQ ID NO: 24101 - DNA, 20 bp, Artificial Sequence
  Antisense compound
agcagcgccagcaccaaatg

SEQ ID NO: 24102 - DNA, 20 bp, Artificial Sequence
  Antisense compound
gagcagcgccagcaccaaat

SEQ ID NO: 24103 - DNA, 20 bp, Artificial Sequence
  Antisense compound
agagcagcgccagcaccaaa

SEQ ID NO: 24104 - DNA, 20 bp, Artificial Sequence
  Antisense compound
aagagcagcgccagcaccaa

SEQ ID NO: 24105 - DNA, 20 bp, Artificial Sequence
  Antisense compound
gaagagcagcgccagcacca

SEQ ID NO: 24106 - DNA, 20 bp, Artificial Sequence
  Antisense compound
tgaagagcagcgccagcacc

SEQ ID NO: 24107 - DNA, 20 bp, Artificial Sequence
  Antisense compound
ttgaagagcagcgccagcac

SEQ ID NO: 24108 - DNA, 20 bp, Artificial Sequence
  Antisense compound
tttgaagagcagcgccagca

SEQ ID NO: 24109 - DNA, 20 bp, Artificial Sequence
  Antisense compound
atttgaagagcagcgccagc

SEQ ID NO: 24110 - DNA, 20 bp, Artificial Sequence
  Antisense compound
tatttgaagagcagcgccag

SEQ ID NO: 24111 - DNA, 20 bp, Artificial Sequence
  Antisense compound
gtatttgaagagcagcgcca

SEQ ID NO: 24112 - DNA, 20 bp, Artificial Sequence
  Antisense compound
ggtatttgaagagcagcgcc

SEQ ID NO: 24113 - DNA, 20 bp, Artificial Sequence
  Antisense compound
aggtatttgaagagcagcgc

SEQ ID NO: 24114 - DNA, 20 bp, Artificial Sequence
  Antisense compound
aaggtatttgaagagcagcg

SEQ ID NO: 24115 - DNA, 20 bp, Artificial Sequence
  Antisense compound
aaaggtatttgaagagcagc

SEQ ID NO: 24116 - DNA, 20 bp, Artificial Sequence
  Antisense compound
aaaaggtatttgaagagcag

SEQ ID NO: 24117 - DNA, 20 bp, Artificial Sequence
  Antisense compound
caaaaggtatttgaagagca

SEQ ID NO: 24118 - DNA, 20 bp, Artificial Sequence
  Antisense compound
gcaaaaggtatttgaagagc

SEQ ID NO: 24119 - DNA, 20 bp, Artificial Sequence
  Antisense compound
agcaaaaggtatttgaagag

SEQ ID NO: 24120 - DNA, 20 bp, Artificial Sequence
  Antisense compound
tagcaaaaggtatttgaaga

SEQ ID NO: 24121 - DNA, 20 bp, Artificial Sequence
  Antisense compound
atagcaaaaggtatttgaag

SEQ ID NO: 24122 - DNA, 20 bp, Artificial Sequence
  Antisense compound
catagcaaaaggtatttgaa

SEQ ID NO: 24123 - DNA, 20 bp, Artificial Sequence
  Antisense compound
gcatagcaaaaggtatttga

SEQ ID NO: 24124 - DNA, 20 bp, Artificial Sequence
  Antisense compound
tgcatagcaaaaggtatttg

SEQ ID NO: 24125 - DNA, 20 bp, Artificial Sequence
  Antisense compound
ttgcatagcaaaaggtattt

SEQ ID NO: 24126 - DNA, 20 bp, Artificial Sequence
  Antisense compound
tttgcatagcaaaaggtatt

SEQ ID NO: 24127 - DNA, 20 bp, Artificial Sequence
  Antisense compound
atttgcatagcaaaaggtat

SEQ ID NO: 24128 - DNA, 20 bp, Artificial Sequence
  Antisense compound
catttgcatagcaaaaggta

SEQ ID NO: 24129 - DNA, 20 bp, Artificial Sequence
  Antisense compound
ccatttgcatagcaaaaggt

SEQ ID NO: 24130 - DNA, 20 bp, Artificial Sequence
  Antisense compound
gccatttgcatagcaaaagg

SEQ ID NO: 24131 - DNA, 20 bp, Artificial Sequence
  Antisense compound
tgccatttgcatagcaaaag

SEQ ID NO: 24132 - DNA, 20 bp, Artificial Sequence
  Antisense compound
atgccatttgcatagcaaaa

SEQ ID NO: 24133 - DNA, 20 bp, Artificial Sequence
  Antisense compound
tatgccatttgcatagcaaa

SEQ ID NO: 24134 - DNA, 20 bp, Artificial Sequence
  Antisense compound
atatgccatttgcatagcaa

SEQ ID NO: 24135 - DNA, 20 bp, Artificial Sequence
  Antisense compound
tatatgccatttgcatagca

SEQ ID NO: 24136 - DNA, 20 bp, Artificial Sequence
  Antisense compound
ctatatgccatttgcatagc

SEQ ID NO: 24137 - DNA, 20 bp, Artificial Sequence
  Antisense compound
cctatatgccatttgcatag

SEQ ID NO: 24138 - DNA, 20 bp, Artificial Sequence
  Antisense compound
acctatatgccatttgcata

SEQ ID NO: 24139 - DNA, 20 bp, Artificial Sequence
  Antisense compound
aacctatatgccatttgcat

SEQ ID NO: 24140 - DNA, 20 bp, Artificial Sequence
  Antisense compound
gaacctatatgccatttgca

SEQ ID NO: 24141 - DNA, 20 bp, Artificial Sequence
  Antisense compound
tgaacctatatgccatttgc

SEQ ID NO: 24142 - DNA, 20 bp, Artificial Sequence
  Antisense compound
ttgaacctatatgccatttg

SEQ ID NO: 24143 - DNA, 20 bp, Artificial Sequence
  Antisense compound
attgaacctatatgccattt

SEQ ID NO: 24144 - DNA, 20 bp, Artificial Sequence
  Antisense compound
cattgaacctatatgccatt

SEQ ID NO: 24145 - DNA, 20 bp, Artificial Sequence
  Antisense compound
ccattgaacctatatgccat

SEQ ID NO: 24146 - DNA, 20 bp, Artificial Sequence
  Antisense compound
gccattgaacctatatgcca

SEQ ID NO: 24147 - DNA, 20 bp, Artificial Sequence
  Antisense compound
tgccattgaacctatatgcc

SEQ ID NO: 24148 - DNA, 20 bp, Artificial Sequence
  Antisense compound
atgccattgaacctatatgc

SEQ ID NO: 24149 - DNA, 20 bp, Artificial Sequence
  Antisense compound
aatgccattgaacctatatg

SEQ ID NO: 24150 - DNA, 20 bp, Artificial Sequence
  Antisense compound
caatgccattgaacctatat

SEQ ID NO: 24151 - DNA, 20 bp, Artificial Sequence
  Antisense compound
ccaatgccattgaacctata

SEQ ID NO: 24152 - DNA, 20 bp, Artificial Sequence
  Antisense compound
tccaatgccattgaacctat

SEQ ID NO: 24153 - DNA, 20 bp, Artificial Sequence
  Antisense compound
ctccaatgccattgaaccta

SEQ ID NO: 24154 - DNA, 20 bp, Artificial Sequence
  Antisense compound
actccaatgccattgaacct

SEQ ID NO: 24155 - DNA, 20 bp, Artificial Sequence
  Antisense compound
aactccaatgccattgaacc

SEQ ID NO: 24156 - DNA, 20 bp, Artificial Sequence
  Antisense compound
taactccaatgccattgaac

SEQ ID NO: 24157 - DNA, 20 bp, Artificial Sequence
  Antisense compound
gtaactccaatgccattgaa

SEQ ID NO: 24158 - DNA, 20 bp, Artificial Sequence
  Antisense compound
ggtaactccaatgccattga

SEQ ID NO: 24159 - DNA, 20 bp, Artificial Sequence
  Antisense compound
gggtaactccaatgccattg

SEQ ID NO: 24160 - DNA, 20 bp, Artificial Sequence
  Antisense compound
tgggtaactccaatgccatt

SEQ ID NO: 24161 - DNA, 20 bp, Artificial Sequence
  Antisense compound
ttgggtaactccaatgccat

SEQ ID NO: 24162 - DNA, 20 bp, Artificial Sequence
  Antisense compound
tttgggtaactccaatgcca

SEQ ID NO: 24163 - DNA, 20 bp, Artificial Sequence
  Antisense compound
ttttgggtaactccaatgcc

SEQ ID NO: 24164 - DNA, 20 bp, Artificial Sequence
  Antisense compound
attttgggtaactccaatgc

SEQ ID NO: 24165 - DNA, 20 bp, Artificial Sequence
  Antisense compound
cattttgggtaactccaatg

SEQ ID NO: 24166 - DNA, 20 bp, Artificial Sequence
  Antisense compound
acattttgggtaactccaat

SEQ ID NO: 24167 - DNA, 20 bp, Artificial Sequence
  Antisense compound
aacattttgggtaactccaa

SEQ ID NO: 24168 - DNA, 20 bp, Artificial Sequence
  Antisense compound
gaacattttgggtaactcca

SEQ ID NO: 24169 - DNA, 20 bp, Artificial Sequence
  Antisense compound
agaacattttgggtaactcc

SEQ ID NO: 24170 - DNA, 20 bp, Artificial Sequence
  Antisense compound
gagaacattttgggtaactc

SEQ ID NO: 24171 - DNA, 20 bp, Artificial Sequence
  Antisense compound
agagaacattttgggtaact

SEQ ID NO: 24172 - DNA, 20 bp, Artificial Sequence
  Antisense compound
tagagaacattttgggtaac

SEQ ID NO: 24173 - DNA, 20 bp, Artificial Sequence
  Antisense compound
atagagaacattttgggtaa

SEQ ID NO: 24174 - DNA, 20 bp, Artificial Sequence
  Antisense compound
catagagaacattttgggta

SEQ ID NO: 24175 - DNA, 20 bp, Artificial Sequence
  Antisense compound
tcatagagaacattttgggt

SEQ ID NO: 24176 - DNA, 20 bp, Artificial Sequence
  Antisense compound
ctcatagagaacattttggg

SEQ ID NO: 24177 - DNA, 20 bp, Artificial Sequence
  Antisense compound
tctcatagagaacattttgg

SEQ ID NO: 24178 - DNA, 20 bp, Artificial Sequence
  Antisense compound
ttctcatagagaacattttg

SEQ ID NO: 24179 - DNA, 20 bp, Artificial Sequence
  Antisense compound
gttctcatagagaacatttt

SEQ ID NO: 24180 - DNA, 20 bp, Artificial Sequence
  Antisense compound
ggttctcatagagaacattt

SEQ ID NO: 24181 - DNA, 20 bp, Artificial Sequence
  Antisense compound
tggttctcatagagaacatt

SEQ ID NO: 24182 - DNA, 20 bp, Artificial Sequence
  Antisense compound
ttggttctcatagagaacat

SEQ ID NO: 24183 - DNA, 20 bp, Artificial Sequence
  Antisense compound
tttggttctcatagagaaca

SEQ ID NO: 24184 - DNA, 20 bp, Artificial Sequence
  Antisense compound
ttttggttctcatagagaac

SEQ ID NO: 24185 - DNA, 20 bp, Artificial Sequence
  Antisense compound
tttttggttctcatagagaa

SEQ ID NO: 24186 - DNA, 20 bp, Artificial Sequence
  Antisense compound
gtttttggttctcatagaga

SEQ ID NO: 24187 - DNA, 20 bp, Artificial Sequence
  Antisense compound
tgtttttggttctcatagag

SEQ ID NO: 24188 - DNA, 20 bp, Artificial Sequence
  Antisense compound
ttgtttttggttctcataga

SEQ ID NO: 24189 - DNA, 20 bp, Artificial Sequence
  Antisense compound
tttgtttttggttctcatag

SEQ ID NO: 24190 - DNA, 20 bp, Artificial Sequence
  Antisense compound
atttgtttttggttctcata

SEQ ID NO: 24191 - DNA, 20 bp, Artificial Sequence
  Antisense compound
gatttgtttttggttctcat

SEQ ID NO: 24192 - DNA, 20 bp, Artificial Sequence
  Antisense compound
cgatttgtttttggttctca

SEQ ID NO: 24193 - DNA, 20 bp, Artificial Sequence
  Antisense compound
gcgatttgtttttggttctc

SEQ ID NO: 24194 - DNA, 20 bp, Artificial Sequence
  Antisense compound
ggcgatttgtttttggttct

SEQ ID NO: 24195 - DNA, 20 bp, Artificial Sequence
  Antisense compound
tggcgatttgtttttggttc

SEQ ID NO: 24196 - DNA, 20 bp, Artificial Sequence
  Antisense compound
ttggcgatttgtttttggtt

SEQ ID NO: 24197 - DNA, 20 bp, Artificial Sequence
  Antisense compound
gttggcgatttgtttttggt

SEQ ID NO: 24198 - DNA, 20 bp, Artificial Sequence
  Antisense compound
ggttggcgatttgtttttgg

SEQ ID NO: 24199 - DNA, 20 bp, Artificial Sequence
  Antisense compound
tggttggcgatttgtttttg

SEQ ID NO: 24200 - DNA, 20 bp, Artificial Sequence
  Antisense compound
ttggttggcgatttgttttt

SEQ ID NO: 24201 - DNA, 20 bp, Artificial Sequence
  Antisense compound
attggttggcgatttgtttt

SEQ ID NO: 24202 - DNA, 20 bp, Artificial Sequence
  Antisense compound
aattggttggcgatttgttt

SEQ ID NO: 24203 - DNA, 20 bp, Artificial Sequence
  Antisense compound
aaattggttggcgatttgtt

SEQ ID NO: 24204 - DNA, 20 bp, Artificial Sequence
  Antisense compound
taaattggttggcgatttgt

SEQ ID NO: 24205 - DNA, 20 bp, Artificial Sequence
  Antisense compound
ttaaattggttggcgatttg

SEQ ID NO: 24206 - DNA, 20 bp, Artificial Sequence
  Antisense compound
gttaaattggttggcgattt

SEQ ID NO: 24207 - DNA, 20 bp, Artificial Sequence
  Antisense compound
tgttaaattggttggcgatt

SEQ ID NO: 24208 - DNA, 20 bp, Artificial Sequence
  Antisense compound
ttgttaaattggttggcgat

SEQ ID NO: 24209 - DNA, 20 bp, Artificial Sequence
  Antisense compound
cttgttaaattggttggcga

SEQ ID NO: 24210 - DNA, 20 bp, Artificial Sequence
  Antisense compound
ccttgttaaattggttggcg

SEQ ID NO: 24211 - DNA, 20 bp, Artificial Sequence
  Antisense compound
gccttgttaaattggttggc

SEQ ID NO: 24212 - DNA, 20 bp, Artificial Sequence
  Antisense compound
cgccttgttaaattggttgg

SEQ ID NO: 24213 - DNA, 20 bp, Artificial Sequence
  Antisense compound
tcgccttgttaaattggttg

SEQ ID NO: 24214 - DNA, 20 bp, Artificial Sequence
  Antisense compound
atcgccttgttaaattggtt

SEQ ID NO: 24215 - DNA, 20 bp, Artificial Sequence
  Antisense compound
aatcgccttgttaaattggt

SEQ ID NO: 24216 - DNA, 20 bp, Artificial Sequence
  Antisense compound
taatcgccttgttaaattgg

SEQ ID NO: 24217 - DNA, 20 bp, Artificial Sequence
  Antisense compound
ctaatcgccttgttaaattg

SEQ ID NO: 24218 - DNA, 20 bp, Artificial Sequence
  Antisense compound
actaatcgccttgttaaatt

SEQ ID NO: 24219 - DNA, 20 bp, Artificial Sequence
  Antisense compound
gactaatcgccttgttaaat

SEQ ID NO: 24220 - DNA, 20 bp, Artificial Sequence
  Antisense compound
tgactaatcgccttgttaaa

SEQ ID NO: 24221 - DNA, 20 bp, Artificial Sequence
  Antisense compound
ttgactaatcgccttgttaa

SEQ ID NO: 24222 - DNA, 20 bp, Artificial Sequence
  Antisense compound
tttgactaatcgccttgtta

SEQ ID NO: 24223 - DNA, 20 bp, Artificial Sequence
  Antisense compound
atttgactaatcgccttgtt

SEQ ID NO: 24224 - DNA, 20 bp, Artificial Sequence
  Antisense compound
aatttgactaatcgccttgt

SEQ ID NO: 24225 - DNA, 20 bp, Artificial Sequence
  Antisense compound
gaatttgactaatcgccttg

SEQ ID NO: 24226 - DNA, 20 bp, Artificial Sequence
  Antisense compound
tgaatttgactaatcgcctt

SEQ ID NO: 24227 - DNA, 20 bp, Artificial Sequence
  Antisense compound
ttgaatttgactaatcgcct

SEQ ID NO: 24228 - DNA, 20 bp, Artificial Sequence
  Antisense compound
cttgaatttgactaatcgcc

SEQ ID NO: 24229 - DNA, 20 bp, Artificial Sequence
  Antisense compound
tcttgaatttgactaatcgc

SEQ ID NO: 24230 - DNA, 20 bp, Artificial Sequence
  Antisense compound
ttcttgaatttgactaatcg

SEQ ID NO: 24231 - DNA, 20 bp, Artificial Sequence
  Antisense compound
attcttgaatttgactaatc

SEQ ID NO: 24232 - DNA, 20 bp, Artificial Sequence
  Antisense compound
gattcttgaatttgactaat

SEQ ID NO: 24233 - DNA, 20 bp, Artificial Sequence
  Antisense compound
tgattcttgaatttgactaa

SEQ ID NO: 24234 - DNA, 20 bp, Artificial Sequence
  Antisense compound
gtgattcttgaatttgacta

SEQ ID NO: 24235 - DNA, 20 bp, Artificial Sequence
  Antisense compound
agtgattcttgaatttgact

SEQ ID NO: 24236 - DNA, 20 bp, Artificial Sequence
  Antisense compound
aagtgattcttgaatttgac

SEQ ID NO: 24237 - DNA, 20 bp, Artificial Sequence
  Antisense compound
taagtgattcttgaatttga

SEQ ID NO: 24238 - DNA, 20 bp, Artificial Sequence
  Antisense compound
gtaagtgattcttgaatttg

SEQ ID NO: 24239 - DNA, 20 bp, Artificial Sequence
  Antisense compound
tgtaagtgattcttgaattt

SEQ ID NO: 24240 - DNA, 20 bp, Artificial Sequence
  Antisense compound
ttgtaagtgattcttgaatt

SEQ ID NO: 24241 - DNA, 20 bp, Artificial Sequence
  Antisense compound
gttgtaagtgattcttgaat

SEQ ID NO: 24242 - DNA, 20 bp, Artificial Sequence
  Antisense compound
tgttgtaagtgattcttgaa

SEQ ID NO: 24243 - DNA, 20 bp, Artificial Sequence
  Antisense compound
ttgttgtaagtgattcttga

SEQ ID NO: 24244 - DNA, 20 bp, Artificial Sequence
  Antisense compound
gttgttgtaagtgattcttg

SEQ ID NO: 24245 - DNA, 20 bp, Artificial Sequence
  Antisense compound
tgttgttgtaagtgattctt

SEQ ID NO: 24246 - DNA, 20 bp, Artificial Sequence
  Antisense compound
atgttgttgtaagtgattct

SEQ ID NO: 24247 - DNA, 20 bp, Artificial Sequence
  Antisense compound
gatgttgttgtaagtgattc

SEQ ID NO: 24248 - DNA, 20 bp, Artificial Sequence
  Antisense compound
tgatgttgttgtaagtgatt

SEQ ID NO: 24249 - DNA, 20 bp, Artificial Sequence
  Antisense compound
ttgatgttgttgtaagtgat

SEQ ID NO: 24250 - DNA, 20 bp, Artificial Sequence
  Antisense compound
gttgatgttgttgtaagtga

SEQ ID NO: 24251 - DNA, 20 bp, Artificial Sequence
  Antisense compound
agttgatgttgttgtaagtg

SEQ ID NO: 24252 - DNA, 20 bp, Artificial Sequence
  Antisense compound
cagttgatgttgttgtaagt

SEQ ID NO: 24253 - DNA, 20 bp, Artificial Sequence
  Antisense compound
gcagttgatgttgttgtaag

SEQ ID NO: 24254 - DNA, 20 bp, Artificial Sequence
  Antisense compound
tgcagttgatgttgttgtaa

SEQ ID NO: 24255 - DNA, 20 bp, Artificial Sequence
  Antisense compound
atgcagttgatgttgttgta

SEQ ID NO: 24256 - DNA, 20 bp, Artificial Sequence
  Antisense compound
aatgcagttgatgttgttgt

SEQ ID NO: 24257 - DNA, 20 bp, Artificial Sequence
  Antisense compound
caatgcagttgatgttgttg

SEQ ID NO: 24258 - DNA, 20 bp, Artificial Sequence
  Antisense compound
ccaatgcagttgatgttgtt

SEQ ID NO: 24259 - DNA, 20 bp, Artificial Sequence
  Antisense compound
cccaatgcagttgatgttgt

SEQ ID NO: 24260 - DNA, 20 bp, Artificial Sequence
  Antisense compound
gcccaatgcagttgatgttg

SEQ ID NO: 24261 - DNA, 20 bp, Artificial Sequence
  Antisense compound
tgcccaatgcagttgatgtt

SEQ ID NO: 24262 - DNA, 20 bp, Artificial Sequence
  Antisense compound
ttgcccaatgcagttgatgt

SEQ ID NO: 24263 - DNA, 20 bp, Artificial Sequence
  Antisense compound
cttgcccaatgcagttgatg

SEQ ID NO: 24264 - DNA, 20 bp, Artificial Sequence
  Antisense compound
gcttgcccaatgcagttgat

SEQ ID NO: 24265 - DNA, 20 bp, Artificial Sequence
  Antisense compound
agcttgcccaatgcagttga

SEQ ID NO: 24266 - DNA, 20 bp, Artificial Sequence
  Antisense compound
cagcttgcccaatgcagttg

SEQ ID NO: 24267 - DNA, 20 bp, Artificial Sequence
  Antisense compound
gcagcttgcccaatgcagtt

SEQ ID NO: 24268 - DNA, 20 bp, Artificial Sequence
  Antisense compound
tgcagcttgcccaatgcagt

SEQ ID NO: 24269 - DNA, 20 bp, Artificial Sequence
  Antisense compound
ttgcagcttgcccaatgcag

SEQ ID NO: 24270 - DNA, 20 bp, Artificial Sequence
  Antisense compound
cttgcagcttgcccaatgca

SEQ ID NO: 24271 - DNA, 20 bp, Artificial Sequence
  Antisense compound
tcttgcagcttgcccaatgc

SEQ ID NO: 24272 - DNA, 20 bp, Artificial Sequence
  Antisense compound
gtcttgcagcttgcccaatg

SEQ ID NO: 24273 - DNA, 20 bp, Artificial Sequence
  Antisense compound
cgtcttgcagcttgcccaat

SEQ ID NO: 24274 - DNA, 20 bp, Artificial Sequence
  Antisense compound
acgtcttgcagcttgcccaa

SEQ ID NO: 24275 - DNA, 20 bp, Artificial Sequence
  Antisense compound
aacgtcttgcagcttgccca

SEQ ID NO: 24276 - DNA, 20 bp, Artificial Sequence
  Antisense compound
caacgtcttgcagcttgccc

SEQ ID NO: 24277 - DNA, 20 bp, Artificial Sequence
  Antisense compound
acaacgtcttgcagcttgcc

SEQ ID NO: 24278 - DNA, 20 bp, Artificial Sequence
  Antisense compound
aacaacgtcttgcagcttgc

SEQ ID NO: 24279 - DNA, 20 bp, Artificial Sequence
  Antisense compound
taacaacgtcttgcagcttg

SEQ ID NO: 24280 - DNA, 20 bp, Artificial Sequence
  Antisense compound
ttaacaacgtcttgcagctt

SEQ ID NO: 24281 - DNA, 20 bp, Artificial Sequence
  Antisense compound
gttaacaacgtcttgcagct

SEQ ID NO: 24282 - DNA, 20 bp, Artificial Sequence
  Antisense compound
ggttaacaacgtcttgcagc

SEQ ID NO: 24283 - DNA, 20 bp, Artificial Sequence
  Antisense compound
tggttaacaacgtcttgcag

SEQ ID NO: 24284 - DNA, 20 bp, Artificial Sequence
  Antisense compound
ctggttaacaacgtcttgca

SEQ ID NO: 24285 - DNA, 20 bp, Artificial Sequence
  Antisense compound
tctggttaacaacgtcttgc

SEQ ID NO: 24286 - DNA, 20 bp, Artificial Sequence
  Antisense compound
ttctggttaacaacgtcttg

SEQ ID NO: 24287 - DNA, 20 bp, Artificial Sequence
  Antisense compound
attctggttaacaacgtctt

SEQ ID NO: 24288 - DNA, 20 bp, Artificial Sequence
  Antisense compound
cattctggttaacaacgtct

SEQ ID NO: 24289 - DNA, 20 bp, Artificial Sequence
  Antisense compound
gcattctggttaacaacgtc

SEQ ID NO: 24290 - DNA, 20 bp, Artificial Sequence
  Antisense compound
agcattctggttaacaacgt

SEQ ID NO: 24291 - DNA, 20 bp, Artificial Sequence
  Antisense compound
gagcattctggttaacaacg

SEQ ID NO: 24292 - DNA, 20 bp, Artificial Sequence
  Antisense compound
tgagcattctggttaacaac

SEQ ID NO: 24293 - DNA, 20 bp, Artificial Sequence
  Antisense compound
ttgagcattctggttaacaa

SEQ ID NO: 24294 - DNA, 20 bp, Artificial Sequence
  Antisense compound
cttgagcattctggttaaca

SEQ ID NO: 24295 - DNA, 20 bp, Artificial Sequence
  Antisense compound
gcttgagcattctggttaac

SEQ ID NO: 24296 - DNA, 20 bp, Artificial Sequence
  Antisense compound
tgcttgagcattctggttaa

SEQ ID NO: 24297 - DNA, 20 bp, Artificial Sequence
  Antisense compound
atgcttgagcattctggtta

SEQ ID NO: 24298 - DNA, 20 bp, Artificial Sequence
  Antisense compound
aatgcttgagcattctggtt

SEQ ID NO: 24299 - DNA, 20 bp, Artificial Sequence
  Antisense compound
taatgcttgagcattctggt

SEQ ID NO: 24300 - DNA, 20 bp, Artificial Sequence
  Antisense compound
ttaatgcttgagcattctgg

SEQ ID NO: 24301 - DNA, 20 bp, Artificial Sequence
  Antisense compound
tttaatgcttgagcattctg

SEQ ID NO: 24302 - DNA, 20 bp, Artificial Sequence
  Antisense compound
gtttaatgcttgagcattct

SEQ ID NO: 24303 - DNA, 20 bp, Artificial Sequence
  Antisense compound
tgtttaatgcttgagcattc

SEQ ID NO: 24304 - DNA, 20 bp, Artificial Sequence
  Antisense compound
gtgtttaatgcttgagcatt

SEQ ID NO: 24305 - DNA, 20 bp, Artificial Sequence
  Antisense compound
tgtgtttaatgcttgagcat

SEQ ID NO: 24306 - DNA, 20 bp, Artificial Sequence
  Antisense compound
gtgtgtttaatgcttgagca

SEQ ID NO: 24307 - DNA, 20 bp, Artificial Sequence
  Antisense compound
agtgtgtttaatgcttgagc

SEQ ID NO: 24308 - DNA, 20 bp, Artificial Sequence
  Antisense compound
aagtgtgtttaatgcttgag

SEQ ID NO: 24309 - DNA, 20 bp, Artificial Sequence
  Antisense compound
caagtgtgtttaatgcttga

SEQ ID NO: 24310 - DNA, 20 bp, Artificial Sequence
  Antisense compound
acaagtgtgtttaatgcttg

SEQ ID NO: 24311 - DNA, 20 bp, Artificial Sequence
  Antisense compound
aacaagtgtgtttaatgctt

SEQ ID NO: 24312 - DNA, 20 bp, Artificial Sequence
  Antisense compound
taacaagtgtgtttaatgct

SEQ ID NO: 24313 - DNA, 20 bp, Artificial Sequence
  Antisense compound
ttaacaagtgtgtttaatgc

SEQ ID NO: 24314 - DNA, 20 bp, Artificial Sequence
  Antisense compound
tttaacaagtgtgtttaatg

SEQ ID NO: 24315 - DNA, 20 bp, Artificial Sequence
  Antisense compound
gtttaacaagtgtgtttaat

SEQ ID NO: 24316 - DNA, 20 bp, Artificial Sequence
  Antisense compound
tgtttaacaagtgtgtttaa

SEQ ID NO: 24317 - DNA, 20 bp, Artificial Sequence
  Antisense compound
ttgtttaacaagtgtgttta

SEQ ID NO: 24318 - DNA, 20 bp, Artificial Sequence
  Antisense compound
gttgtttaacaagtgtgttt

SEQ ID NO: 24319 - DNA, 20 bp, Artificial Sequence
  Antisense compound
agttgtttaacaagtgtgtt

SEQ ID NO: 24320 - DNA, 20 bp, Artificial Sequence
  Antisense compound
aagttgtttaacaagtgtgt

SEQ ID NO: 24321 - DNA, 20 bp, Artificial Sequence
  Antisense compound
taagttgtttaacaagtgtg

SEQ ID NO: 24322 - DNA, 20 bp, Artificial Sequence
  Antisense compound
ctaagttgtttaacaagtgt

SEQ ID NO: 24323 - DNA, 20 bp, Artificial Sequence
  Antisense compound
gctaagttgtttaacaagtg

SEQ ID NO: 24324 - DNA, 20 bp, Artificial Sequence
  Antisense compound
agctaagttgtttaacaagt

SEQ ID NO: 24325 - DNA, 20 bp, Artificial Sequence
  Antisense compound
gagctaagttgtttaacaag

SEQ ID NO: 24326 - DNA, 20 bp, Artificial Sequence
  Antisense compound
agagctaagttgtttaacaa

SEQ ID NO: 24327 - DNA, 20 bp, Artificial Sequence
  Antisense compound
tagagctaagttgtttaaca

SEQ ID NO: 24328 - DNA, 20 bp, Artificial Sequence
  Antisense compound
ttagagctaagttgtttaac

SEQ ID NO: 24329 - DNA, 20 bp, Artificial Sequence
  Antisense compound
attagagctaagttgtttaa

SEQ ID NO: 24330 - DNA, 20 bp, Artificial Sequence
  Antisense compound
aattagagctaagttgttta

SEQ ID NO: 24331 - DNA, 20 bp, Artificial Sequence
  Antisense compound
aaattagagctaagttgttt

SEQ ID NO: 24332 - DNA, 20 bp, Artificial Sequence
  Antisense compound
aaaattagagctaagttgtt

SEQ ID NO: 24333 - DNA, 20 bp, Artificial Sequence
  Antisense compound
caaaattagagctaagttgt

SEQ ID NO: 24334 - DNA, 20 bp, Artificial Sequence
  Antisense compound
ccaaaattagagctaagttg

SEQ ID NO: 24335 - DNA, 20 bp, Artificial Sequence
  Antisense compound
accaaaattagagctaagtt

SEQ ID NO: 24336 - DNA, 20 bp, Artificial Sequence
  Antisense compound
caccaaaattagagctaagt

SEQ ID NO: 24337 - DNA, 20 bp, Artificial Sequence
  Antisense compound
gcaccaaaattagagctaag

SEQ ID NO: 24338 - DNA, 20 bp, Artificial Sequence
  Antisense compound
tgcaccaaaattagagctaa

SEQ ID NO: 24339 - DNA, 20 bp, Artificial Sequence
  Antisense compound
ttgcaccaaaattagagcta

SEQ ID NO: 24340 - DNA, 20 bp, Artificial Sequence
  Antisense compound
attgcaccaaaattagagct

SEQ ID NO: 24341 - DNA, 20 bp, Artificial Sequence
  Antisense compound
aattgcaccaaaattagagc

SEQ ID NO: 24342 - DNA, 20 bp, Artificial Sequence
  Antisense compound
aaattgcaccaaaattagag

SEQ ID NO: 24343 - DNA, 20 bp, Artificial Sequence
  Antisense compound
gaaattgcaccaaaattaga

SEQ ID NO: 24344 - DNA, 20 bp, Artificial Sequence
  Antisense compound
tgaaattgcaccaaaattag

SEQ ID NO: 24345 - DNA, 20 bp, Artificial Sequence
  Antisense compound
ttgaaattgcaccaaaatta

SEQ ID NO: 24346 - DNA, 20 bp, Artificial Sequence
  Antisense compound
cttgaaattgcaccaaaatt

SEQ ID NO: 24347 - DNA, 20 bp, Artificial Sequence
  Antisense compound
acttgaaattgcaccaaaat

SEQ ID NO: 24348 - DNA, 20 bp, Artificial Sequence
  Antisense compound
cacttgaaattgcaccaaaa

SEQ ID NO: 24349 - DNA, 20 bp, Artificial Sequence
  Antisense compound
acacttgaaattgcaccaaa

SEQ ID NO: 24350 - DNA, 20 bp, Artificial Sequence
  Antisense compound
cacacttgaaattgcaccaa

SEQ ID NO: 24351 - DNA, 20 bp, Artificial Sequence
  Antisense compound
gcacacttgaaattgcacca

SEQ ID NO: 24352 - DNA, 20 bp, Artificial Sequence
  Antisense compound
agcacacttgaaattgcacc

SEQ ID NO: 24353 - DNA, 20 bp, Artificial Sequence
  Antisense compound
tagcacacttgaaattgcac

SEQ ID NO: 24354 - DNA, 20 bp, Artificial Sequence
  Antisense compound
ttagcacacttgaaattgca

SEQ ID NO: 24355 - DNA, 20 bp, Artificial Sequence
  Antisense compound
tttagcacacttgaaattgc

SEQ ID NO: 24356 - DNA, 20 bp, Artificial Sequence
  Antisense compound
atttagcacacttgaaattg

SEQ ID NO: 24357 - DNA, 20 bp, Artificial Sequence
  Antisense compound
catttagcacacttgaaatt

SEQ ID NO: 24358 - DNA, 20 bp, Artificial Sequence
  Antisense compound
tcatttagcacacttgaaat

SEQ ID NO: 24359 - DNA, 20 bp, Artificial Sequence
  Antisense compound
atcatttagcacacttgaaa

SEQ ID NO: 24360 - DNA, 20 bp, Artificial Sequence
  Antisense compound
tatcatttagcacacttgaa

SEQ ID NO: 24361 - DNA, 20 bp, Artificial Sequence
  Antisense compound
atatcatttagcacacttga

SEQ ID NO: 24362 - DNA, 20 bp, Artificial Sequence
  Antisense compound
gatatcatttagcacacttg

SEQ ID NO: 24363 - DNA, 20 bp, Artificial Sequence
  Antisense compound
ggatatcatttagcacactt

SEQ ID NO: 24364 - DNA, 20 bp, Artificial Sequence
  Antisense compound
aggatatcatttagcacact

SEQ ID NO: 24365 - DNA, 20 bp, Artificial Sequence
  Antisense compound
aaggatatcatttagcacac

SEQ ID NO: 24366 - DNA, 20 bp, Artificial Sequence
  Antisense compound
aaaggatatcatttagcaca

SEQ ID NO: 24367 - DNA, 20 bp, Artificial Sequence
  Antisense compound
gaaaggatatcatttagcac

SEQ ID NO: 24368 - DNA, 20 bp, Artificial Sequence
  Antisense compound
cgaaaggatatcatttagca

SEQ ID NO: 24369 - DNA, 20 bp, Artificial Sequence
  Antisense compound
gcgaaaggatatcatttagc

SEQ ID NO: 24370 - DNA, 20 bp, Artificial Sequence
  Antisense compound
cgcgaaaggatatcatttag

SEQ ID NO: 24371 - DNA, 20 bp, Artificial Sequence
  Antisense compound
tcgcgaaaggatatcattta

SEQ ID NO: 24372 - DNA, 20 bp, Artificial Sequence
  Antisense compound
gtcgcgaaaggatatcattt

SEQ ID NO: 24373 - DNA, 20 bp, Artificial Sequence
  Antisense compound
agtcgcgaaaggatatcatt

SEQ ID NO: 24374 - DNA, 20 bp, Artificial Sequence
  Antisense compound
aagtcgcgaaaggatatcat

SEQ ID NO: 24375 - DNA, 20 bp, Artificial Sequence
  Antisense compound
caagtcgcgaaaggatatca

SEQ ID NO: 24376 - DNA, 20 bp, Artificial Sequence
  Antisense compound
tcaagtcgcgaaaggatatc

SEQ ID NO: 24377 - DNA, 20 bp, Artificial Sequence
  Antisense compound
atcaagtcgcgaaaggatat

SEQ ID NO: 24378 - DNA, 20 bp, Artificial Sequence
  Antisense compound
tatcaagtcgcgaaaggata

SEQ ID NO: 24379 - DNA, 20 bp, Artificial Sequence
  Antisense compound
ttatcaagtcgcgaaaggat

SEQ ID NO: 24380 - DNA, 20 bp, Artificial Sequence
  Antisense compound
tttatcaagtcgcgaaagga

SEQ ID NO: 24381 - DNA, 20 bp, Artificial Sequence
  Antisense compound
ctttatcaagtcgcgaaagg

SEQ ID NO: 24382 - DNA, 20 bp, Artificial Sequence
  Antisense compound
actttatcaagtcgcgaaag

SEQ ID NO: 24383 - DNA, 20 bp, Artificial Sequence
  Antisense compound
gactttatcaagtcgcgaaa

SEQ ID NO: 24384 - DNA, 20 bp, Artificial Sequence
  Antisense compound
cgactttatcaagtcgcgaa

SEQ ID NO: 24385 - DNA, 20 bp, Artificial Sequence
  Antisense compound
tcgactttatcaagtcgcga

SEQ ID NO: 24386 - DNA, 20 bp, Artificial Sequence
  Antisense compound
ctcgactttatcaagtcgcg

SEQ ID NO: 24387 - DNA, 20 bp, Artificial Sequence
  Antisense compound
cctcgactttatcaagtcgc

SEQ ID NO: 24388 - DNA, 20 bp, Artificial Sequence
  Antisense compound
gcctcgactttatcaagtcg

SEQ ID NO: 24389 - DNA, 20 bp, Artificial Sequence
  Antisense compound
cgcctcgactttatcaagtc

SEQ ID NO: 24390 - DNA, 20 bp, Artificial Sequence
  Antisense compound
ccgcctcgactttatcaagt

SEQ ID NO: 24391 - DNA, 20 bp, Artificial Sequence
  Antisense compound
tccgcctcgactttatcaag

SEQ ID NO: 24392 - DNA, 20 bp, Artificial Sequence
  Antisense compound
ctccgcctcgactttatcaa

SEQ ID NO: 24393 - DNA, 20 bp, Artificial Sequence
  Antisense compound
cctccgcctcgactttatca

SEQ ID NO: 24394 - DNA, 20 bp, Artificial Sequence
  Antisense compound
acctccgcctcgactttatc

SEQ ID NO: 24395 - DNA, 20 bp, Artificial Sequence
  Antisense compound
tacctccgcctcgactttat

SEQ ID NO: 24396 - DNA, 20 bp, Artificial Sequence
  Antisense compound
gtacctccgcctcgacttta

SEQ ID NO: 24397 - DNA, 20 bp, Artificial Sequence
  Antisense compound
tgtacctccgcctcgacttt

SEQ ID NO: 24398 - DNA, 20 bp, Artificial Sequence
  Antisense compound
ttgtacctccgcctcgactt

SEQ ID NO: 24399 - DNA, 20 bp, Artificial Sequence
  Antisense compound
tttgtacctccgcctcgact

SEQ ID NO: 24400 - DNA, 20 bp, Artificial Sequence
  Antisense compound
atttgtacctccgcctcgac

SEQ ID NO: 24401 - DNA, 20 bp, Artificial Sequence
  Antisense compound
aatttgtacctccgcctcga

SEQ ID NO: 24402 - DNA, 20 bp, Artificial Sequence
  Antisense compound
caatttgtacctccgcctcg

SEQ ID NO: 24403 - DNA, 20 bp, Artificial Sequence
  Antisense compound
tcaatttgtacctccgcctc

SEQ ID NO: 24404 - DNA, 20 bp, Artificial Sequence
  Antisense compound
gtcaatttgtacctccgcct

SEQ ID NO: 24405 - DNA, 20 bp, Artificial Sequence
  Antisense compound
tgtcaatttgtacctccgcc

SEQ ID NO: 24406 - DNA, 20 bp, Artificial Sequence
  Antisense compound
ctgtcaatttgtacctccgc

SEQ ID NO: 24407 - DNA, 20 bp, Artificial Sequence
  Antisense compound
cctgtcaatttgtacctccg

SEQ ID NO: 24408 - DNA, 20 bp, Artificial Sequence
  Antisense compound
acctgtcaatttgtacctcc

SEQ ID NO: 24409 - DNA, 20 bp, Artificial Sequence
  Antisense compound
aacctgtcaatttgtacctc

SEQ ID NO: 24410 - DNA, 20 bp, Artificial Sequence
  Antisense compound
taacctgtcaatttgtacct

SEQ ID NO: 24411 - DNA, 20 bp, Artificial Sequence
  Antisense compound
ttaacctgtcaatttgtacc

SEQ ID NO: 24412 - DNA, 20 bp, Artificial Sequence
  Antisense compound
attaacctgtcaatttgtac

SEQ ID NO: 24413 - DNA, 20 bp, Artificial Sequence
  Antisense compound
aattaacctgtcaatttgta

SEQ ID NO: 24414 - DNA, 20 bp, Artificial Sequence
  Antisense compound
taattaacctgtcaatttgt

SEQ ID NO: 24415 - DNA, 20 bp, Artificial Sequence
  Antisense compound
gtaattaacctgtcaatttg

SEQ ID NO: 24416 - DNA, 20 bp, Artificial Sequence
  Antisense compound
tgtaattaacctgtcaattt

SEQ ID NO: 24417 - DNA, 20 bp, Artificial Sequence
  Antisense compound
ctgtaattaacctgtcaatt

SEQ ID NO: 24418 - DNA, 20 bp, Artificial Sequence
  Antisense compound
cctgtaattaacctgtcaat

SEQ ID NO: 24419 - DNA, 20 bp, Artificial Sequence
  Antisense compound
gcctgtaattaacctgtcaa

SEQ ID NO: 24420 - DNA, 20 bp, Artificial Sequence
  Antisense compound
tgcctgtaattaacctgtca

SEQ ID NO: 24421 - DNA, 20 bp, Artificial Sequence
  Antisense compound
ctgcctgtaattaacctgtc

SEQ ID NO: 24422 - DNA, 20 bp, Artificial Sequence
  Antisense compound
tctgcctgtaattaacctgt

SEQ ID NO: 24423 - DNA, 20 bp, Artificial Sequence
  Antisense compound
gtctgcctgtaattaacctg

SEQ ID NO: 24424 - DNA, 20 bp, Artificial Sequence
  Antisense compound
agtctgcctgtaattaacct

SEQ ID NO: 24425 - DNA, 20 bp, Artificial Sequence
  Antisense compound
aagtctgcctgtaattaacc

SEQ ID NO: 24426 - DNA, 20 bp, Artificial Sequence
  Antisense compound
gaagtctgcctgtaattaac

SEQ ID NO: 24427 - DNA, 20 bp, Artificial Sequence
  Antisense compound
tgaagtctgcctgtaattaa

SEQ ID NO: 24428 - DNA, 20 bp, Artificial Sequence
  Antisense compound
ttgaagtctgcctgtaatta

SEQ ID NO: 24429 - DNA, 20 bp, Artificial Sequence
  Antisense compound
tttgaagtctgcctgtaatt

SEQ ID NO: 24430 - DNA, 20 bp, Artificial Sequence
  Antisense compound
ctttgaagtctgcctgtaat

SEQ ID NO: 24431 - DNA, 20 bp, Artificial Sequence
  Antisense compound
gctttgaagtctgcctgtaa

SEQ ID NO: 24432 - DNA, 20 bp, Artificial Sequence
  Antisense compound
ggctttgaagtctgcctgta

SEQ ID NO: 24433 - DNA, 20 bp, Artificial Sequence
  Antisense compound
aggctttgaagtctgcctgt

SEQ ID NO: 24434 - DNA, 20 bp, Artificial Sequence
  Antisense compound
aaggctttgaagtctgcctg

SEQ ID NO: 24435 - DNA, 20 bp, Artificial Sequence
  Antisense compound
gaaggctttgaagtctgcct

SEQ ID NO: 24436 - DNA, 20 bp, Artificial Sequence
  Antisense compound
tgaaggctttgaagtctgcc

SEQ ID NO: 24437 - DNA, 20 bp, Artificial Sequence
  Antisense compound
ttgaaggctttgaagtctgc

SEQ ID NO: 24438 - DNA, 20 bp, Artificial Sequence
  Antisense compound
tttgaaggctttgaagtctg

SEQ ID NO: 24439 - DNA, 20 bp, Artificial Sequence
  Antisense compound
gtttgaaggctttgaagtct

SEQ ID NO: 24440 - DNA, 20 bp, Artificial Sequence
  Antisense compound
ggtttgaaggctttgaagtc

SEQ ID NO: 24441 - DNA, 20 bp, Artificial Sequence
  Antisense compound
aggtttgaaggctttgaagt

SEQ ID NO: 24442 - DNA, 20 bp, Artificial Sequence
  Antisense compound
taggtttgaaggctttgaag

SEQ ID NO: 24443 - DNA, 20 bp, Artificial Sequence
  Antisense compound
ataggtttgaaggctttgaa

SEQ ID NO: 24444 - DNA, 20 bp, Artificial Sequence
  Antisense compound
cataggtttgaaggctttga

SEQ ID NO: 24445 - DNA, 20 bp, Artificial Sequence
  Antisense compound
acataggtttgaaggctttg

SEQ ID NO: 24446 - DNA, 20 bp, Artificial Sequence
  Antisense compound
tacataggtttgaaggcttt

SEQ ID NO: 24447 - DNA, 20 bp, Artificial Sequence
  Antisense compound
ttacataggtttgaaggctt

SEQ ID NO: 24448 - DNA, 20 bp, Artificial Sequence
  Antisense compound
gttacataggtttgaaggct

SEQ ID NO: 24449 - DNA, 20 bp, Artificial Sequence
  Antisense compound
tgttacataggtttgaaggc

SEQ ID NO: 24450 - DNA, 20 bp, Artificial Sequence
  Antisense compound
gtgttacataggtttgaagg

SEQ ID NO: 24451 - DNA, 20 bp, Artificial Sequence
  Antisense compound
tgtgttacataggtttgaag

SEQ ID NO: 24452 - DNA, 20 bp, Artificial Sequence
  Antisense compound
ttgtgttacataggtttgaa

SEQ ID NO: 24453 - DNA, 20 bp, Artificial Sequence
  Antisense compound
gttgtgttacataggtttga

SEQ ID NO: 24454 - DNA, 20 bp, Artificial Sequence
  Antisense compound
tgttgtgttacataggtttg

SEQ ID NO: 24455 - DNA, 20 bp, Artificial Sequence
  Antisense compound
ttgttgtgttacataggttt

SEQ ID NO: 24456 - DNA, 20 bp, Artificial Sequence
  Antisense compound
gttgttgtgttacataggtt

SEQ ID NO: 24457 - DNA, 20 bp, Artificial Sequence
  Antisense compound
agttgttgtgttacataggt

SEQ ID NO: 24458 - DNA, 20 bp, Artificial Sequence
  Antisense compound
tagttgttgtgttacatagg

SEQ ID NO: 24459 - DNA, 20 bp, Artificial Sequence
  Antisense compound
ttagttgttgtgttacatag

SEQ ID NO: 24460 - DNA, 20 bp, Artificial Sequence
  Antisense compound
attagttgttgtgttacata

SEQ ID NO: 24461 - DNA, 20 bp, Artificial Sequence
  Antisense compound
gattagttgttgtgttacat

SEQ ID NO: 24462 - DNA, 20 bp, Artificial Sequence
  Antisense compound
tgattagttgttgtgttaca

SEQ ID NO: 24463 - DNA, 20 bp, Artificial Sequence
  Antisense compound
ctgattagttgttgtgttac

SEQ ID NO: 24464 - DNA, 20 bp, Artificial Sequence
  Antisense compound
cctgattagttgttgtgtta

SEQ ID NO: 24465 - DNA, 20 bp, Artificial Sequence
  Antisense compound
ccctgattagttgttgtgtt

SEQ ID NO: 24466 - DNA, 20 bp, Artificial Sequence
  Antisense compound
gccctgattagttgttgtgt

SEQ ID NO: 24467 - DNA, 20 bp, Artificial Sequence
  Antisense compound
agccctgattagttgttgtg

SEQ ID NO: 24468 - DNA, 20 bp, Artificial Sequence
  Antisense compound
cagccctgattagttgttgt

SEQ ID NO: 24469 - DNA, 20 bp, Artificial Sequence
  Antisense compound
gcagccctgattagttgttg

SEQ ID NO: 24470 - DNA, 20 bp, Artificial Sequence
  Antisense compound
agcagccctgattagttgtt

SEQ ID NO: 24471 - DNA, 20 bp, Artificial Sequence
  Antisense compound
cagcagccctgattagttgt

SEQ ID NO: 24472 - DNA, 20 bp, Artificial Sequence
  Antisense compound
tcagcagccctgattagttg

SEQ ID NO: 24473 - DNA, 20 bp, Artificial Sequence
  Antisense compound
ttcagcagccctgattagtt

SEQ ID NO: 24474 - DNA, 20 bp, Artificial Sequence
  Antisense compound
tttcagcagccctgattagt

SEQ ID NO: 24475 - DNA, 20 bp, Artificial Sequence
  Antisense compound
atttcagcagccctgattag

SEQ ID NO: 24476 - DNA, 20 bp, Artificial Sequence
  Antisense compound
gatttcagcagccctgatta

SEQ ID NO: 24477 - DNA, 20 bp, Artificial Sequence
  Antisense compound
tgatttcagcagccctgatt

SEQ ID NO: 24478 - DNA, 20 bp, Artificial Sequence
  Antisense compound
ctgatttcagcagccctgat

SEQ ID NO: 24479 - DNA, 20 bp, Artificial Sequence
  Antisense compound
cctgatttcagcagccctga

SEQ ID NO: 24480 - DNA, 20 bp, Artificial Sequence
  Antisense compound
ccctgatttcagcagccctg

SEQ ID NO: 24481 - DNA, 20 bp, Artificial Sequence
  Antisense compound
gccctgatttcagcagccct

SEQ ID NO: 24482 - DNA, 20 bp, Artificial Sequence
  Antisense compound
agccctgatttcagcagccc

SEQ ID NO: 24483 - DNA, 20 bp, Artificial Sequence
  Antisense compound
aagccctgatttcagcagcc

SEQ ID NO: 24484 - DNA, 20 bp, Artificial Sequence
  Antisense compound
gaagccctgatttcagcagc

SEQ ID NO: 24485 - DNA, 20 bp, Artificial Sequence
  Antisense compound
agaagccctgatttcagcag

SEQ ID NO: 24486 - DNA, 20 bp, Artificial Sequence
  Antisense compound
cagaagccctgatttcagca

SEQ ID NO: 24487 - DNA, 20 bp, Artificial Sequence
  Antisense compound
gcagaagccctgatttcagc

SEQ ID NO: 24488 - DNA, 20 bp, Artificial Sequence
  Antisense compound
agcagaagccctgatttcag

SEQ ID NO: 24489 - DNA, 20 bp, Artificial Sequence
  Antisense compound
tagcagaagccctgatttca

SEQ ID NO: 24490 - DNA, 20 bp, Artificial Sequence
  Antisense compound
ttagcagaagccctgatttc

SEQ ID NO: 24491 - DNA, 20 bp, Artificial Sequence
  Antisense compound
attagcagaagccctgattt

SEQ ID NO: 24492 - DNA, 20 bp, Artificial Sequence
  Antisense compound
gattagcagaagccctgatt

SEQ ID NO: 24493 - DNA, 20 bp, Artificial Sequence
  Antisense compound
agattagcagaagccctgat

SEQ ID NO: 24494 - DNA, 20 bp, Artificial Sequence
  Antisense compound
aagattagcagaagccctga

SEQ ID NO: 24495 - DNA, 20 bp, Artificial Sequence
  Antisense compound
caagattagcagaagccctg

SEQ ID NO: 24496 - DNA, 20 bp, Artificial Sequence
  Antisense compound
gcaagattagcagaagccct

SEQ ID NO: 24497 - DNA, 20 bp, Artificial Sequence
  Antisense compound
agcaagattagcagaagccc

SEQ ID NO: 24498 - DNA, 20 bp, Artificial Sequence
  Antisense compound
cagcaagattagcagaagcc

SEQ ID NO: 24499 - DNA, 20 bp, Artificial Sequence
  Antisense compound
gcagcaagattagcagaagc

SEQ ID NO: 24500 - DNA, 20 bp, Artificial Sequence
  Antisense compound
agcagcaagattagcagaag

SEQ ID NO: 24501 - DNA, 20 bp, Artificial Sequence
  Antisense compound
tagcagcaagattagcagaa

SEQ ID NO: 24502 - DNA, 20 bp, Artificial Sequence
  Antisense compound
gtagcagcaagattagcaga

SEQ ID NO: 24503 - DNA, 20 bp, Artificial Sequence
  Antisense compound
agtagcagcaagattagcag

SEQ ID NO: 24504 - DNA, 20 bp, Artificial Sequence
  Antisense compound
tagtagcagcaagattagca

SEQ ID NO: 24505 - DNA, 20 bp, Artificial Sequence
  Antisense compound
ttagtagcagcaagattagc

SEQ ID NO: 24506 - DNA, 20 bp, Artificial Sequence
  Antisense compound
tttagtagcagcaagattag

SEQ ID NO: 24507 - DNA, 20 bp, Artificial Sequence
  Antisense compound
ttttagtagcagcaagatta

SEQ ID NO: 24508 - DNA, 20 bp, Artificial Sequence
  Antisense compound
attttagtagcagcaagatt

SEQ ID NO: 24509 - DNA, 20 bp, Artificial Sequence
  Antisense compound
cattttagtagcagcaagat

SEQ ID NO: 24510 - DNA, 20 bp, Artificial Sequence
  Antisense compound
acattttagtagcagcaaga

SEQ ID NO: 24511 - DNA, 20 bp, Artificial Sequence
  Antisense compound
gacattttagtagcagcaag

SEQ ID NO: 24512 - DNA, 20 bp, Artificial Sequence
  Antisense compound
agacattttagtagcagcaa

SEQ ID NO: 24513 - DNA, 20 bp, Artificial Sequence
  Antisense compound
cagacattttagtagcagca

SEQ ID NO: 24514 - DNA, 20 bp, Artificial Sequence
  Antisense compound
tcagacattttagtagcagc

SEQ ID NO: 24515 - DNA, 20 bp, Artificial Sequence
  Antisense compound
ctcagacattttagtagcag

SEQ ID NO: 24516 - DNA, 20 bp, Artificial Sequence
  Antisense compound
actcagacattttagtagca

SEQ ID NO: 24517 - DNA, 20 bp, Artificial Sequence
  Antisense compound
cactcagacattttagtagc

SEQ ID NO: 24518 - DNA, 20 bp, Artificial Sequence
  Antisense compound
acactcagacattttagtag

SEQ ID NO: 24519 - DNA, 20 bp, Artificial Sequence
  Antisense compound
cacactcagacattttagta

SEQ ID NO: 24520 - DNA, 20 bp, Artificial Sequence
  Antisense compound
acacactcagacattttagt

SEQ ID NO: 24521 - DNA, 20 bp, Artificial Sequence
  Antisense compound
aacacactcagacattttag

SEQ ID NO: 24522 - DNA, 20 bp, Artificial Sequence
  Antisense compound
gaacacactcagacatttta

SEQ ID NO: 24523 - DNA, 20 bp, Artificial Sequence
  Antisense compound
agaacacactcagacatttt

SEQ ID NO: 24524 - DNA, 20 bp, Artificial Sequence
  Antisense compound
aagaacacactcagacattt

SEQ ID NO: 24525 - DNA, 20 bp, Artificial Sequence
  Antisense compound
caagaacacactcagacatt

SEQ ID NO: 24526 - DNA, 20 bp, Artificial Sequence
  Antisense compound
ccaagaacacactcagacat

SEQ ID NO: 24527 - DNA, 20 bp, Artificial Sequence
  Antisense compound
tccaagaacacactcagaca

SEQ ID NO: 24528 - DNA, 20 bp, Artificial Sequence
  Antisense compound
gtccaagaacacactcagac

SEQ ID NO: 24529 - DNA, 20 bp, Artificial Sequence
  Antisense compound
tgtccaagaacacactcaga

SEQ ID NO: 24530 - DNA, 20 bp, Artificial Sequence
  Antisense compound
ttgtccaagaacacactcag

SEQ ID NO: 24531 - DNA, 20 bp, Artificial Sequence
  Antisense compound
attgtccaagaacacactca

SEQ ID NO: 24532 - DNA, 20 bp, Artificial Sequence
  Antisense compound
gattgtccaagaacacactc

SEQ ID NO: 24533 - DNA, 20 bp, Artificial Sequence
  Antisense compound
tgattgtccaagaacacact

SEQ ID NO: 24534 - DNA, 20 bp, Artificial Sequence
  Antisense compound
ttgattgtccaagaacacac

SEQ ID NO: 24535 - DNA, 20 bp, Artificial Sequence
  Antisense compound
tttgattgtccaagaacaca

SEQ ID NO: 24536 - DNA, 20 bp, Artificial Sequence
  Antisense compound
ttttgattgtccaagaacac

SEQ ID NO: 24537 - DNA, 20 bp, Artificial Sequence
  Antisense compound
tttttgattgtccaagaaca

SEQ ID NO: 24538 - DNA, 20 bp, Artificial Sequence
  Antisense compound
ctttttgattgtccaagaac

SEQ ID NO: 24539 - DNA, 20 bp, Artificial Sequence
  Antisense compound
tctttttgattgtccaagaa

SEQ ID NO: 24540 - DNA, 20 bp, Artificial Sequence
  Antisense compound
ctctttttgattgtccaaga

SEQ ID NO: 24541 - DNA, 20 bp, Artificial Sequence
  Antisense compound
actctttttgattgtccaag

SEQ ID NO: 24542 - DNA, 20 bp, Artificial Sequence
  Antisense compound
aactctttttgattgtccaa

SEQ ID NO: 24543 - DNA, 20 bp, Artificial Sequence
  Antisense compound
caactctttttgattgtcca

SEQ ID NO: 24544 - DNA, 20 bp, Artificial Sequence
  Antisense compound
tcaactctttttgattgtcc

SEQ ID NO: 24545 - DNA, 20 bp, Artificial Sequence
  Antisense compound
gtcaactctttttgattgtc

SEQ ID NO: 24546 - DNA, 20 bp, Artificial Sequence
  Antisense compound
agtcaactctttttgattgt

SEQ ID NO: 24547 - DNA, 20 bp, Artificial Sequence
  Antisense compound
aagtcaactctttttgattg

SEQ ID NO: 24548 - DNA, 20 bp, Artificial Sequence
  Antisense compound
aaagtcaactctttttgatt

SEQ ID NO: 24549 - DNA, 20 bp, Artificial Sequence
  Antisense compound
aaaagtcaactctttttgat

SEQ ID NO: 24550 - DNA, 20 bp, Artificial Sequence
  Antisense compound
caaaagtcaactctttttga

SEQ ID NO: 24551 - DNA, 20 bp, Artificial Sequence
  Antisense compound
acaaaagtcaactctttttg

SEQ ID NO: 24552 - DNA, 20 bp, Artificial Sequence
  Antisense compound
cacaaaagtcaactcttttt

SEQ ID NO: 24553 - DNA, 20 bp, Artificial Sequence
  Antisense compound
ccacaaaagtcaactctttt

SEQ ID NO: 24554 - DNA, 20 bp, Artificial Sequence
  Antisense compound
tccacaaaagtcaactcttt

SEQ ID NO: 24555 - DNA, 20 bp, Artificial Sequence
  Antisense compound
ttccacaaaagtcaactctt

SEQ ID NO: 24556 - DNA, 20 bp, Artificial Sequence
  Antisense compound
tttccacaaaagtcaactct

SEQ ID NO: 24557 - DNA, 20 bp, Artificial Sequence
  Antisense compound
ctttccacaaaagtcaactc

SEQ ID NO: 24558 - DNA, 20 bp, Artificial Sequence
  Antisense compound
cctttccacaaaagtcaact

SEQ ID NO: 24559 - DNA, 20 bp, Artificial Sequence
  Antisense compound
ccctttccacaaaagtcaac

SEQ ID NO: 24560 - DNA, 20 bp, Artificial Sequence
  Antisense compound
gccctttccacaaaagtcaa

SEQ ID NO: 24561 - DNA, 20 bp, Artificial Sequence
  Antisense compound
agccctttccacaaaagtca

SEQ ID NO: 24562 - DNA, 20 bp, Artificial Sequence
  Antisense compound
tagccctttccacaaaagtc

SEQ ID NO: 24563 - DNA, 20 bp, Artificial Sequence
  Antisense compound
gtagccctttccacaaaagt

SEQ ID NO: 24564 - DNA, 20 bp, Artificial Sequence
  Antisense compound
ggtagccctttccacaaaag

SEQ ID NO: 24565 - DNA, 20 bp, Artificial Sequence
  Antisense compound
tggtagccctttccacaaaa

SEQ ID NO: 24566 - DNA, 20 bp, Artificial Sequence
  Antisense compound
gtggtagccctttccacaaa

SEQ ID NO: 24567 - DNA, 20 bp, Artificial Sequence
  Antisense compound
ggtggtagccctttccacaa

SEQ ID NO: 24568 - DNA, 20 bp, Artificial Sequence
  Antisense compound
aggtggtagccctttccaca

SEQ ID NO: 24569 - DNA, 20 bp, Artificial Sequence
  Antisense compound
aaggtggtagccctttccac

SEQ ID NO: 24570 - DNA, 20 bp, Artificial Sequence
  Antisense compound
taaggtggtagccctttcca

SEQ ID NO: 24571 - DNA, 20 bp, Artificial Sequence
  Antisense compound
ataaggtggtagccctttcc

SEQ ID NO: 24572 - DNA, 20 bp, Artificial Sequence
  Antisense compound
cataaggtggtagccctttc

SEQ ID NO: 24573 - DNA, 20 bp, Artificial Sequence
  Antisense compound
acataaggtggtagcccttt

SEQ ID NO: 24574 - DNA, 20 bp, Artificial Sequence
  Antisense compound
gacataaggtggtagccctt

SEQ ID NO: 24575 - DNA, 20 bp, Artificial Sequence
  Antisense compound
ggacataaggtggtagccct

SEQ ID NO: 24576 - DNA, 20 bp, Artificial Sequence
  Antisense compound
aggacataaggtggtagccc

SEQ ID NO: 24577 - DNA, 20 bp, Artificial Sequence
  Antisense compound
aaggacataaggtggtagcc

SEQ ID NO: 24578 - DNA, 20 bp, Artificial Sequence
  Antisense compound
gaaggacataaggtggtagc

SEQ ID NO: 24579 - DNA, 20 bp, Artificial Sequence
  Antisense compound
ggaaggacataaggtggtag

SEQ ID NO: 24580 - DNA, 20 bp, Artificial Sequence
  Antisense compound
gggaaggacataaggtggta

SEQ ID NO: 24581 - DNA, 20 bp, Artificial Sequence
  Antisense compound
tgggaaggacataaggtggt

SEQ ID NO: 24582 - DNA, 20 bp, Artificial Sequence
  Antisense compound
gtgggaaggacataaggtgg

SEQ ID NO: 24583 - DNA, 20 bp, Artificial Sequence
  Antisense compound
tgtgggaaggacataaggtg

SEQ ID NO: 24584 - DNA, 20 bp, Artificial Sequence
  Antisense compound
ttgtgggaaggacataaggt

SEQ ID NO: 24585 - DNA, 20 bp, Artificial Sequence
  Antisense compound
cttgtgggaaggacataagg

SEQ ID NO: 24586 - DNA, 20 bp, Artificial Sequence
  Antisense compound
gcttgtgggaaggacataag

SEQ ID NO: 24587 - DNA, 20 bp, Artificial Sequence
  Antisense compound
tgcttgtgggaaggacataa

SEQ ID NO: 24588 - DNA, 20 bp, Artificial Sequence
  Antisense compound
ctgcttgtgggaaggacata

SEQ ID NO: 24589 - DNA, 20 bp, Artificial Sequence
  Antisense compound
gctgcttgtgggaaggacat

SEQ ID NO: 24590 - DNA, 20 bp, Artificial Sequence
  Antisense compound
ggctgcttgtgggaaggaca

SEQ ID NO: 24591 - DNA, 20 bp, Artificial Sequence
  Antisense compound
gggctgcttgtgggaaggac

SEQ ID NO: 24592 - DNA, 20 bp, Artificial Sequence
  Antisense compound
ggggctgcttgtgggaagga

SEQ ID NO: 24593 - DNA, 20 bp, Artificial Sequence
  Antisense compound
cggggctgcttgtgggaagg

SEQ ID NO: 24594 - DNA, 20 bp, Artificial Sequence
  Antisense compound
gcggggctgcttgtgggaag

SEQ ID NO: 24595 - DNA, 20 bp, Artificial Sequence
  Antisense compound
tgcggggctgcttgtgggaa

SEQ ID NO: 24596 - DNA, 20 bp, Artificial Sequence
  Antisense compound
atgcggggctgcttgtggga

SEQ ID NO: 24597 - DNA, 20 bp, Artificial Sequence
  Antisense compound
catgcggggctgcttgtggg

SEQ ID NO: 24598 - DNA, 20 bp, Artificial Sequence
  Antisense compound
ccatgcggggctgcttgtgg

SEQ ID NO: 24599 - DNA, 20 bp, Artificial Sequence
  Antisense compound
accatgcggggctgcttgtg

SEQ ID NO: 24600 - DNA, 20 bp, Artificial Sequence
  Antisense compound
caccatgcggggctgcttgt

SEQ ID NO: 24601 - DNA, 20 bp, Artificial Sequence
  Antisense compound
acaccatgcggggctgcttg

SEQ ID NO: 24602 - DNA, 20 bp, Artificial Sequence
  Antisense compound
aacaccatgcggggctgctt

SEQ ID NO: 24603 - DNA, 20 bp, Artificial Sequence
  Antisense compound
caacaccatgcggggctgct

SEQ ID NO: 24604 - DNA, 20 bp, Artificial Sequence
  Antisense compound
acaacaccatgcggggctgc

SEQ ID NO: 24605 - DNA, 20 bp, Artificial Sequence
  Antisense compound
gacaacaccatgcggggctg

SEQ ID NO: 24606 - DNA, 20 bp, Artificial Sequence
  Antisense compound
agacaacaccatgcggggct

SEQ ID NO: 24607 - DNA, 20 bp, Artificial Sequence
  Antisense compound
aagacaacaccatgcggggc

SEQ ID NO: 24608 - DNA, 20 bp, Artificial Sequence
  Antisense compound
gaagacaacaccatgcgggg

SEQ ID NO: 24609 - DNA, 20 bp, Artificial Sequence
  Antisense compound
ggaagacaacaccatgcggg

SEQ ID NO: 24610 - DNA, 20 bp, Artificial Sequence
  Antisense compound
aggaagacaacaccatgcgg

SEQ ID NO: 24611 - DNA, 20 bp, Artificial Sequence
  Antisense compound
taggaagacaacaccatgcg

SEQ ID NO: 24612 - DNA, 20 bp, Artificial Sequence
  Antisense compound
gtaggaagacaacaccatgc

SEQ ID NO: 24613 - DNA, 20 bp, Artificial Sequence
  Antisense compound
tgtaggaagacaacaccatg

SEQ ID NO: 24614 - DNA, 20 bp, Artificial Sequence
  Antisense compound
atgtaggaagacaacaccat

SEQ ID NO: 24615 - DNA, 20 bp, Artificial Sequence
  Antisense compound
catgtaggaagacaacacca

SEQ ID NO: 24616 - DNA, 20 bp, Artificial Sequence
  Antisense compound
acatgtaggaagacaacacc

SEQ ID NO: 24617 - DNA, 20 bp, Artificial Sequence
  Antisense compound
gacatgtaggaagacaacac

SEQ ID NO: 24618 - DNA, 20 bp, Artificial Sequence
  Antisense compound
tgacatgtaggaagacaaca

SEQ ID NO: 24619 - DNA, 20 bp, Artificial Sequence
  Antisense compound
gtgacatgtaggaagacaac

SEQ ID NO: 24620 - DNA, 20 bp, Artificial Sequence
  Antisense compound
cgtgacatgtaggaagacaa

SEQ ID NO: 24621 - DNA, 20 bp, Artificial Sequence
  Antisense compound
acgtgacatgtaggaagaca

SEQ ID NO: 24622 - DNA, 20 bp, Artificial Sequence
  Antisense compound
tacgtgacatgtaggaagac

SEQ ID NO: 24623 - DNA, 20 bp, Artificial Sequence
  Antisense compound
atacgtgacatgtaggaaga

SEQ ID NO: 24624 - DNA, 20 bp, Artificial Sequence
  Antisense compound
catacgtgacatgtaggaag

SEQ ID NO: 24625 - DNA, 20 bp, Artificial Sequence
  Antisense compound
acatacgtgacatgtaggaa

SEQ ID NO: 24626 - DNA, 20 bp, Artificial Sequence
  Antisense compound
cacatacgtgacatgtagga

SEQ ID NO: 24627 - DNA, 20 bp, Artificial Sequence
  Antisense compound
gcacatacgtgacatgtagg

SEQ ID NO: 24628 - DNA, 20 bp, Artificial Sequence
  Antisense compound
ggcacatacgtgacatgtag

SEQ ID NO: 24629 - DNA, 20 bp, Artificial Sequence
  Antisense compound
tggcacatacgtgacatgta

SEQ ID NO: 24630 - DNA, 20 bp, Artificial Sequence
  Antisense compound
atggcacatacgtgacatgt

SEQ ID NO: 24631 - DNA, 20 bp, Artificial Sequence
  Antisense compound
gatggcacatacgtgacatg

SEQ ID NO: 24632 - DNA, 20 bp, Artificial Sequence
  Antisense compound
ggatggcacatacgtgacat

SEQ ID NO: 24633 - DNA, 20 bp, Artificial Sequence
  Antisense compound
gggatggcacatacgtgaca

SEQ ID NO: 24634 - DNA, 20 bp, Artificial Sequence
  Antisense compound
tgggatggcacatacgtgac

SEQ ID NO: 24635 - DNA, 20 bp, Artificial Sequence
  Antisense compound
ctgggatggcacatacgtga

SEQ ID NO: 24636 - DNA, 20 bp, Artificial Sequence
  Antisense compound
cctgggatggcacatacgtg

SEQ ID NO: 24637 - DNA, 20 bp, Artificial Sequence
  Antisense compound
tcctgggatggcacatacgt

SEQ ID NO: 24638 - DNA, 20 bp, Artificial Sequence
  Antisense compound
ctcctgggatggcacatacg

SEQ ID NO: 24639 - DNA, 20 bp, Artificial Sequence
  Antisense compound
tctcctgggatggcacatac

SEQ ID NO: 24640 - DNA, 20 bp, Artificial Sequence
  Antisense compound
ctctcctgggatggcacata

SEQ ID NO: 24641 - DNA, 20 bp, Artificial Sequence
  Antisense compound
cctctcctgggatggcacat

SEQ ID NO: 24642 - DNA, 20 bp, Artificial Sequence
  Antisense compound
tcctctcctgggatggcaca

SEQ ID NO: 24643 - DNA, 20 bp, Artificial Sequence
  Antisense compound
ttcctctcctgggatggcac

SEQ ID NO: 24644 - DNA, 20 bp, Artificial Sequence
  Antisense compound
gttcctctcctgggatggca

SEQ ID NO: 24645 - DNA, 20 bp, Artificial Sequence
  Antisense compound
agttcctctcctgggatggc

SEQ ID NO: 24646 - DNA, 20 bp, Artificial Sequence
  Antisense compound
aagttcctctcctgggatgg

SEQ ID NO: 24647 - DNA, 20 bp, Artificial Sequence
  Antisense compound
gaagttcctctcctgggatg

SEQ ID NO: 24648 - DNA, 20 bp, Artificial Sequence
  Antisense compound
tgaagttcctctcctgggat

SEQ ID NO: 24649 - DNA, 20 bp, Artificial Sequence
  Antisense compound
gtgaagttcctctcctggga

SEQ ID NO: 24650 - DNA, 20 bp, Artificial Sequence
  Antisense compound
ggtgaagttcctctcctggg

SEQ ID NO: 24651 - DNA, 20 bp, Artificial Sequence
  Antisense compound
tggtgaagttcctctcctgg

SEQ ID NO: 24652 - DNA, 20 bp, Artificial Sequence
  Antisense compound
gtggtgaagttcctctcctg

SEQ ID NO: 24653 - DNA, 20 bp, Artificial Sequence
  Antisense compound
tgtggtgaagttcctctcct

SEQ ID NO: 24654 - DNA, 20 bp, Artificial Sequence
  Antisense compound
ctgtggtgaagttcctctcc

SEQ ID NO: 24655 - DNA, 20 bp, Artificial Sequence
  Antisense compound
gctgtggtgaagttcctctc

SEQ ID NO: 24656 - DNA, 20 bp, Artificial Sequence
  Antisense compound
cgctgtggtgaagttcctct

SEQ ID NO: 24657 - DNA, 20 bp, Artificial Sequence
  Antisense compound
gcgctgtggtgaagttcctc

SEQ ID NO: 24658 - DNA, 20 bp, Artificial Sequence
  Antisense compound
ggcgctgtggtgaagttcct

SEQ ID NO: 24659 - DNA, 20 bp, Artificial Sequence
  Antisense compound
tggcgctgtggtgaagttcc

SEQ ID NO: 24660 - DNA, 20 bp, Artificial Sequence
  Antisense compound
ctggcgctgtggtgaagttc

SEQ ID NO: 24661 - DNA, 20 bp, Artificial Sequence
  Antisense compound
gctggcgctgtggtgaagtt

SEQ ID NO: 24662 - DNA, 20 bp, Artificial Sequence
  Antisense compound
tgctggcgctgtggtgaagt

SEQ ID NO: 24663 - DNA, 20 bp, Artificial Sequence
  Antisense compound
ttgctggcgctgtggtgaag

SEQ ID NO: 24664 - DNA, 20 bp, Artificial Sequence
  Antisense compound
attgctggcgctgtggtgaa

SEQ ID NO: 24665 - DNA, 20 bp, Artificial Sequence
  Antisense compound
aattgctggcgctgtggtga

SEQ ID NO: 24666 - DNA, 20 bp, Artificial Sequence
  Antisense compound
aaattgctggcgctgtggtg

SEQ ID NO: 24667 - DNA, 20 bp, Artificial Sequence
  Antisense compound
caaattgctggcgctgtggt

SEQ ID NO: 24668 - DNA, 20 bp, Artificial Sequence
  Antisense compound
acaaattgctggcgctgtgg

SEQ ID NO: 24669 - DNA, 20 bp, Artificial Sequence
  Antisense compound
gacaaattgctggcgctgtg

SEQ ID NO: 24670 - DNA, 20 bp, Artificial Sequence
  Antisense compound
tgacaaattgctggcgctgt

SEQ ID NO: 24671 - DNA, 20 bp, Artificial Sequence
  Antisense compound
atgacaaattgctggcgctg

SEQ ID NO: 24672 - DNA, 20 bp, Artificial Sequence
  Antisense compound
catgacaaattgctggcgct

SEQ ID NO: 24673 - DNA, 20 bp, Artificial Sequence
  Antisense compound
tcatgacaaattgctggcgc

SEQ ID NO: 24674 - DNA, 20 bp, Artificial Sequence
  Antisense compound
ttcatgacaaattgctggcg

SEQ ID NO: 24675 - DNA, 20 bp, Artificial Sequence
  Antisense compound
cttcatgacaaattgctggc

SEQ ID NO: 24676 - DNA, 20 bp, Artificial Sequence
  Antisense compound
ccttcatgacaaattgctgg

SEQ ID NO: 24677 - DNA, 20 bp, Artificial Sequence
  Antisense compound
gccttcatgacaaattgctg

SEQ ID NO: 24678 - DNA, 20 bp, Artificial Sequence
  Antisense compound
tgccttcatgacaaattgct

SEQ ID NO: 24679 - DNA, 20 bp, Artificial Sequence
  Antisense compound
ttgccttcatgacaaattgc

SEQ ID NO: 24680 - DNA, 20 bp, Artificial Sequence
  Antisense compound
tttgccttcatgacaaattg

SEQ ID NO: 24681 - DNA, 20 bp, Artificial Sequence
  Antisense compound
ctttgccttcatgacaaatt

SEQ ID NO: 24682 - DNA, 20 bp, Artificial Sequence
  Antisense compound
gctttgccttcatgacaaat

SEQ ID NO: 24683 - DNA, 20 bp, Artificial Sequence
  Antisense compound
tgctttgccttcatgacaaa

SEQ ID NO: 24684 - DNA, 20 bp, Artificial Sequence
  Antisense compound
atgctttgccttcatgacaa

SEQ ID NO: 24685 - DNA, 20 bp, Artificial Sequence
  Antisense compound
tatgctttgccttcatgaca

SEQ ID NO: 24686 - DNA, 20 bp, Artificial Sequence
  Antisense compound
gtatgctttgccttcatgac

SEQ ID NO: 24687 - DNA, 20 bp, Artificial Sequence
  Antisense compound
agtatgctttgccttcatga

SEQ ID NO: 24688 - DNA, 20 bp, Artificial Sequence
  Antisense compound
aagtatgctttgccttcatg

SEQ ID NO: 24689 - DNA, 20 bp, Artificial Sequence
  Antisense compound
gaagtatgctttgccttcat

SEQ ID NO: 24690 - DNA, 20 bp, Artificial Sequence
  Antisense compound
ggaagtatgctttgccttca

SEQ ID NO: 24691 - DNA, 20 bp, Artificial Sequence
  Antisense compound
gggaagtatgctttgccttc

SEQ ID NO: 24692 - DNA, 20 bp, Artificial Sequence
  Antisense compound
agggaagtatgctttgcctt

SEQ ID NO: 24693 - DNA, 20 bp, Artificial Sequence
  Antisense compound
gagggaagtatgctttgcct

SEQ ID NO: 24694 - DNA, 20 bp, Artificial Sequence
  Antisense compound
cgagggaagtatgctttgcc

SEQ ID NO: 24695 - DNA, 20 bp, Artificial Sequence
  Antisense compound
acgagggaagtatgctttgc

SEQ ID NO: 24696 - DNA, 20 bp, Artificial Sequence
  Antisense compound
cacgagggaagtatgctttg

SEQ ID NO: 24697 - DNA, 20 bp, Artificial Sequence
  Antisense compound
tcacgagggaagtatgcttt

SEQ ID NO: 24698 - DNA, 20 bp, Artificial Sequence
  Antisense compound
ttcacgagggaagtatgctt

SEQ ID NO: 24699 - DNA, 20 bp, Artificial Sequence
  Antisense compound
cttcacgagggaagtatgct

SEQ ID NO: 24700 - DNA, 20 bp, Artificial Sequence
  Antisense compound
ccttcacgagggaagtatgc

SEQ ID NO: 24701 - DNA, 20 bp, Artificial Sequence
  Antisense compound
accttcacgagggaagtatg

SEQ ID NO: 24702 - DNA, 20 bp, Artificial Sequence
  Antisense compound
caccttcacgagggaagtat

SEQ ID NO: 24703 - DNA, 20 bp, Artificial Sequence
  Antisense compound
acaccttcacgagggaagta

SEQ ID NO: 24704 - DNA, 20 bp, Artificial Sequence
  Antisense compound
aacaccttcacgagggaagt

SEQ ID NO: 24705 - DNA, 20 bp, Artificial Sequence
  Antisense compound
aaacaccttcacgagggaag

SEQ ID NO: 24706 - DNA, 20 bp, Artificial Sequence
  Antisense compound
aaaacaccttcacgagggaa

SEQ ID NO: 24707 - DNA, 20 bp, Artificial Sequence
  Antisense compound
aaaaacaccttcacgaggga

SEQ ID NO: 24708 - DNA, 20 bp, Artificial Sequence
  Antisense compound
caaaaacaccttcacgaggg

SEQ ID NO: 24709 - DNA, 20 bp, Artificial Sequence
  Antisense compound
acaaaaacaccttcacgagg

SEQ ID NO: 24710 - DNA, 20 bp, Artificial Sequence
  Antisense compound
cacaaaaacaccttcacgag

SEQ ID NO: 24711 - DNA, 20 bp, Artificial Sequence
  Antisense compound
acacaaaaacaccttcacga

SEQ ID NO: 24712 - DNA, 20 bp, Artificial Sequence
  Antisense compound
aacacaaaaacaccttcacg

SEQ ID NO: 24713 - DNA, 20 bp, Artificial Sequence
  Antisense compound
aaacacaaaaacaccttcac

SEQ ID NO: 24714 - DNA, 20 bp, Artificial Sequence
  Antisense compound
taaacacaaaaacaccttca

SEQ ID NO: 24715 - DNA, 20 bp, Artificial Sequence
  Antisense compound
ttaaacacaaaaacaccttc

SEQ ID NO: 24716 - DNA, 20 bp, Artificial Sequence
  Antisense compound
attaaacacaaaaacacctt

SEQ ID NO: 24717 - DNA, 20 bp, Artificial Sequence
  Antisense compound
cattaaacacaaaaacacct

SEQ ID NO: 24718 - DNA, 20 bp, Artificial Sequence
  Antisense compound
ccattaaacacaaaaacacc

SEQ ID NO: 24719 - DNA, 20 bp, Artificial Sequence
  Antisense compound
gccattaaacacaaaaacac

SEQ ID NO: 24720 - DNA, 20 bp, Artificial Sequence
  Antisense compound
tgccattaaacacaaaaaca

SEQ ID NO: 24721 - DNA, 20 bp, Artificial Sequence
  Antisense compound
gtgccattaaacacaaaaac

SEQ ID NO: 24722 - DNA, 20 bp, Artificial Sequence
  Antisense compound
agtgccattaaacacaaaaa

SEQ ID NO: 24723 - DNA, 20 bp, Artificial Sequence
  Antisense compound
aagtgccattaaacacaaaa

SEQ ID NO: 24724 - DNA, 20 bp, Artificial Sequence
  Antisense compound
gaagtgccattaaacacaaa

SEQ ID NO: 24725 - DNA, 20 bp, Artificial Sequence
  Antisense compound
agaagtgccattaaacacaa

SEQ ID NO: 24726 - DNA, 20 bp, Artificial Sequence
  Antisense compound
aagaagtgccattaaacaca

SEQ ID NO: 24727 - DNA, 20 bp, Artificial Sequence
  Antisense compound
caagaagtgccattaaacac

SEQ ID NO: 24728 - DNA, 20 bp, Artificial Sequence
  Antisense compound
ccaagaagtgccattaaaca

SEQ ID NO: 24729 - DNA, 20 bp, Artificial Sequence
  Antisense compound
accaagaagtgccattaaac

SEQ ID NO: 24730 - DNA, 20 bp, Artificial Sequence
  Antisense compound
aaccaagaagtgccattaaa

SEQ ID NO: 24731 - DNA, 20 bp, Artificial Sequence
  Antisense compound
aaaccaagaagtgccattaa

SEQ ID NO: 24732 - DNA, 20 bp, Artificial Sequence
  Antisense compound
taaaccaagaagtgccatta

SEQ ID NO: 24733 - DNA, 20 bp, Artificial Sequence
  Antisense compound
ataaaccaagaagtgccatt

SEQ ID NO: 24734 - DNA, 20 bp, Artificial Sequence
  Antisense compound
aataaaccaagaagtgccat

SEQ ID NO: 24735 - DNA, 20 bp, Artificial Sequence
  Antisense compound
taataaaccaagaagtgcca

SEQ ID NO: 24736 - DNA, 20 bp, Artificial Sequence
  Antisense compound
gtaataaaccaagaagtgcc

SEQ ID NO: 24737 - DNA, 20 bp, Artificial Sequence
  Antisense compound
tgtaataaaccaagaagtgc

SEQ ID NO: 24738 - DNA, 20 bp, Artificial Sequence
  Antisense compound
gtgtaataaaccaagaagtg

SEQ ID NO: 24739 - DNA, 20 bp, Artificial Sequence
  Antisense compound
tgtgtaataaaccaagaagt

SEQ ID NO: 24740 - DNA, 20 bp, Artificial Sequence
  Antisense compound
ctgtgtaataaaccaagaag

SEQ ID NO: 24741 - DNA, 20 bp, Artificial Sequence
  Antisense compound
tctgtgtaataaaccaagaa

SEQ ID NO: 24742 - DNA, 20 bp, Artificial Sequence
  Antisense compound
ctctgtgtaataaaccaaga

SEQ ID NO: 24743 - DNA, 20 bp, Artificial Sequence
  Antisense compound
cctctgtgtaataaaccaag

SEQ ID NO: 24744 - DNA, 20 bp, Artificial Sequence
  Antisense compound
tcctctgtgtaataaaccaa

SEQ ID NO: 24745 - DNA, 20 bp, Artificial Sequence
  Antisense compound
ttcctctgtgtaataaacca

SEQ ID NO: 24746 - DNA, 20 bp, Artificial Sequence
  Antisense compound
gttcctctgtgtaataaacc

SEQ ID NO: 24747 - DNA, 20 bp, Artificial Sequence
  Antisense compound
agttcctctgtgtaataaac

SEQ ID NO: 24748 - DNA, 20 bp, Artificial Sequence
  Antisense compound
aagttcctctgtgtaataaa

SEQ ID NO: 24749 - DNA, 20 bp, Artificial Sequence
  Antisense compound
gaagttcctctgtgtaataa

SEQ ID NO: 24750 - DNA, 20 bp, Artificial Sequence
  Antisense compound
agaagttcctctgtgtaata

SEQ ID NO: 24751 - DNA, 20 bp, Artificial Sequence
  Antisense compound
aagaagttcctctgtgtaat

SEQ ID NO: 24752 - DNA, 20 bp, Artificial Sequence
  Antisense compound
aaagaagttcctctgtgtaa

SEQ ID NO: 24753 - DNA, 20 bp, Artificial Sequence
  Antisense compound
aaaagaagttcctctgtgta

SEQ ID NO: 24754 - DNA, 20 bp, Artificial Sequence
  Antisense compound
gaaaagaagttcctctgtgt

SEQ ID NO: 24755 - DNA, 20 bp, Artificial Sequence
  Antisense compound
agaaaagaagttcctctgtg

SEQ ID NO: 24756 - DNA, 20 bp, Artificial Sequence
  Antisense compound
gagaaaagaagttcctctgt

SEQ ID NO: 24757 - DNA, 20 bp, Artificial Sequence
  Antisense compound
ggagaaaagaagttcctctg

SEQ ID NO: 24758 - DNA, 20 bp, Artificial Sequence
  Antisense compound
tggagaaaagaagttcctct

SEQ ID NO: 24759 - DNA, 20 bp, Artificial Sequence
  Antisense compound
gtggagaaaagaagttcctc

SEQ ID NO: 24760 - DNA, 20 bp, Artificial Sequence
  Antisense compound
tgtggagaaaagaagttcct

SEQ ID NO: 24761 - DNA, 20 bp, Artificial Sequence
  Antisense compound
ttgtggagaaaagaagttcc

SEQ ID NO: 24762 - DNA, 20 bp, Artificial Sequence
  Antisense compound
tttgtggagaaaagaagttc

SEQ ID NO: 24763 - DNA, 20 bp, Artificial Sequence
  Antisense compound
atttgtggagaaaagaagtt

SEQ ID NO: 24764 - DNA, 20 bp, Artificial Sequence
  Antisense compound
tatttgtggagaaaagaagt

SEQ ID NO: 24765 - DNA, 20 bp, Artificial Sequence
  Antisense compound
ttatttgtggagaaaagaag

SEQ ID NO: 24766 - DNA, 20 bp, Artificial Sequence
  Antisense compound
attatttgtggagaaaagaa

SEQ ID NO: 24767 - DNA, 20 bp, Artificial Sequence
  Antisense compound
aattatttgtggagaaaaga

SEQ ID NO: 24768 - DNA, 20 bp, Artificial Sequence
  Antisense compound
taattatttgtggagaaaag

SEQ ID NO: 24769 - DNA, 20 bp, Artificial Sequence
  Antisense compound
gtaattatttgtggagaaaa

SEQ ID NO: 24770 - DNA, 20 bp, Artificial Sequence
  Antisense compound
agtaattatttgtggagaaa

SEQ ID NO: 24771 - DNA, 20 bp, Artificial Sequence
  Antisense compound
tagtaattatttgtggagaa

SEQ ID NO: 24772 - DNA, 20 bp, Artificial Sequence
  Antisense compound
gtagtaattatttgtggaga

SEQ ID NO: 24773 - DNA, 20 bp, Artificial Sequence
  Antisense compound
tgtagtaattatttgtggag

SEQ ID NO: 24774 - DNA, 20 bp, Artificial Sequence
  Antisense compound
ctgtagtaattatttgtgga

SEQ ID NO: 24775 - DNA, 20 bp, Artificial Sequence
  Antisense compound
tctgtagtaattatttgtgg

SEQ ID NO: 24776 - DNA, 20 bp, Artificial Sequence
  Antisense compound
gtctgtagtaattatttgtg

SEQ ID NO: 24777 - DNA, 20 bp, Artificial Sequence
  Antisense compound
tgtctgtagtaattatttgt

SEQ ID NO: 24778 - DNA, 20 bp, Artificial Sequence
  Antisense compound
ttgtctgtagtaattatttg

SEQ ID NO: 24779 - DNA, 20 bp, Artificial Sequence
  Antisense compound
attgtctgtagtaattattt

SEQ ID NO: 24780 - DNA, 20 bp, Artificial Sequence
  Antisense compound
tattgtctgtagtaattatt

SEQ ID NO: 24781 - DNA, 20 bp, Artificial Sequence
  Antisense compound
gtattgtctgtagtaattat

SEQ ID NO: 24782 - DNA, 20 bp, Artificial Sequence
  Antisense compound
tgtattgtctgtagtaatta

SEQ ID NO: 24783 - DNA, 20 bp, Artificial Sequence
  Antisense compound
atgtattgtctgtagtaatt

SEQ ID NO: 24784 - DNA, 20 bp, Artificial Sequence
  Antisense compound
aatgtattgtctgtagtaat

SEQ ID NO: 24785 - DNA, 20 bp, Artificial Sequence
  Antisense compound
aaatgtattgtctgtagtaa

SEQ ID NO: 24786 - DNA, 20 bp, Artificial Sequence
  Antisense compound
caaatgtattgtctgtagta

SEQ ID NO: 24787 - DNA, 20 bp, Artificial Sequence
  Antisense compound
acaaatgtattgtctgtagt

SEQ ID NO: 24788 - DNA, 20 bp, Artificial Sequence
  Antisense compound
gacaaatgtattgtctgtag

SEQ ID NO: 24789 - DNA, 20 bp, Artificial Sequence
  Antisense compound
agacaaatgtattgtctgta

SEQ ID NO: 24790 - DNA, 20 bp, Artificial Sequence
  Antisense compound
gagacaaatgtattgtctgt

SEQ ID NO: 24791 - DNA, 20 bp, Artificial Sequence
  Antisense compound
tgagacaaatgtattgtctg

SEQ ID NO: 24792 - DNA, 20 bp, Artificial Sequence
  Antisense compound
ctgagacaaatgtattgtct

SEQ ID NO: 24793 - DNA, 20 bp, Artificial Sequence
  Antisense compound
cctgagacaaatgtattgtc

SEQ ID NO: 24794 - DNA, 20 bp, Artificial Sequence
  Antisense compound
tcctgagacaaatgtattgt

SEQ ID NO: 24795 - DNA, 20 bp, Artificial Sequence
  Antisense compound
ttcctgagacaaatgtattg

SEQ ID NO: 24796 - DNA, 20 bp, Artificial Sequence
  Antisense compound
tttcctgagacaaatgtatt

SEQ ID NO: 24797 - DNA, 20 bp, Artificial Sequence
  Antisense compound
atttcctgagacaaatgtat

SEQ ID NO: 24798 - DNA, 20 bp, Artificial Sequence
  Antisense compound
aatttcctgagacaaatgta

SEQ ID NO: 24799 - DNA, 20 bp, Artificial Sequence
  Antisense compound
caatttcctgagacaaatgt

SEQ ID NO: 24800 - DNA, 20 bp, Artificial Sequence
  Antisense compound
acaatttcctgagacaaatg

SEQ ID NO: 24801 - DNA, 20 bp, Artificial Sequence
  Antisense compound
cacaatttcctgagacaaat

SEQ ID NO: 24802 - DNA, 20 bp, Artificial Sequence
  Antisense compound
tcacaatttcctgagacaaa

SEQ ID NO: 24803 - DNA, 20 bp, Artificial Sequence
  Antisense compound
atcacaatttcctgagacaa

SEQ ID NO: 24804 - DNA, 20 bp, Artificial Sequence
  Antisense compound
catcacaatttcctgagaca

SEQ ID NO: 24805 - DNA, 20 bp, Artificial Sequence
  Antisense compound
acatcacaatttcctgagac

SEQ ID NO: 24806 - DNA, 20 bp, Artificial Sequence
  Antisense compound
gacatcacaatttcctgaga

SEQ ID NO: 24807 - DNA, 20 bp, Artificial Sequence
  Antisense compound
cgacatcacaatttcctgag

SEQ ID NO: 24808 - DNA, 20 bp, Artificial Sequence
  Antisense compound
acgacatcacaatttcctga

SEQ ID NO: 24809 - DNA, 20 bp, Artificial Sequence
  Antisense compound
aacgacatcacaatttcctg

SEQ ID NO: 24810 - DNA, 20 bp, Artificial Sequence
  Antisense compound
taacgacatcacaatttcct

SEQ ID NO: 24811 - DNA, 20 bp, Artificial Sequence
  Antisense compound
ataacgacatcacaatttcc

SEQ ID NO: 24812 - DNA, 20 bp, Artificial Sequence
  Antisense compound
aataacgacatcacaatttc

SEQ ID NO: 24813 - DNA, 20 bp, Artificial Sequence
  Antisense compound
caataacgacatcacaattt

SEQ ID NO: 24814 - DNA, 20 bp, Artificial Sequence
  Antisense compound
ccaataacgacatcacaatt

SEQ ID NO: 24815 - DNA, 20 bp, Artificial Sequence
  Antisense compound
gccaataacgacatcacaat

SEQ ID NO: 24816 - DNA, 20 bp, Artificial Sequence
  Antisense compound
tgccaataacgacatcacaa

SEQ ID NO: 24817 - DNA, 20 bp, Artificial Sequence
  Antisense compound
atgccaataacgacatcaca

SEQ ID NO: 24818 - DNA, 20 bp, Artificial Sequence
  Antisense compound
gatgccaataacgacatcac

SEQ ID NO: 24819 - DNA, 20 bp, Artificial Sequence
  Antisense compound
tgatgccaataacgacatca

SEQ ID NO: 24820 - DNA, 20 bp, Artificial Sequence
  Antisense compound
atgatgccaataacgacatc

SEQ ID NO: 24821 - DNA, 20 bp, Artificial Sequence
  Antisense compound
aatgatgccaataacgacat

SEQ ID NO: 24822 - DNA, 20 bp, Artificial Sequence
  Antisense compound
taatgatgccaataacgaca

SEQ ID NO: 24823 - DNA, 20 bp, Artificial Sequence
  Antisense compound
ttaatgatgccaataacgac

SEQ ID NO: 24824 - DNA, 20 bp, Artificial Sequence
  Antisense compound
gttaatgatgccaataacga

SEQ ID NO: 24825 - DNA, 20 bp, Artificial Sequence
  Antisense compound
tgttaatgatgccaataacg

SEQ ID NO: 24826 - DNA, 20 bp, Artificial Sequence
  Antisense compound
ttgttaatgatgccaataac

SEQ ID NO: 24827 - DNA, 20 bp, Artificial Sequence
  Antisense compound
gttgttaatgatgccaataa

SEQ ID NO: 24828 - DNA, 20 bp, Artificial Sequence
  Antisense compound
tgttgttaatgatgccaata

SEQ ID NO: 24829 - DNA, 20 bp, Artificial Sequence
  Antisense compound
gtgttgttaatgatgccaat

SEQ ID NO: 24830 - DNA, 20 bp, Artificial Sequence
  Antisense compound
tgtgttgttaatgatgccaa

SEQ ID NO: 24831 - DNA, 20 bp, Artificial Sequence
  Antisense compound
ctgtgttgttaatgatgcca

SEQ ID NO: 24832 - DNA, 20 bp, Artificial Sequence
  Antisense compound
actgtgttgttaatgatgcc

SEQ ID NO: 24833 - DNA, 20 bp, Artificial Sequence
  Antisense compound
aactgtgttgttaatgatgc

SEQ ID NO: 24834 - DNA, 20 bp, Artificial Sequence
  Antisense compound
aaactgtgttgttaatgatg

SEQ ID NO: 24835 - DNA, 20 bp, Artificial Sequence
  Antisense compound
taaactgtgttgttaatgat

SEQ ID NO: 24836 - DNA, 20 bp, Artificial Sequence
  Antisense compound
ataaactgtgttgttaatga

SEQ ID NO: 24837 - DNA, 20 bp, Artificial Sequence
  Antisense compound
cataaactgtgttgttaatg

SEQ ID NO: 24838 - DNA, 20 bp, Artificial Sequence
  Antisense compound
tcataaactgtgttgttaat

SEQ ID NO: 24839 - DNA, 20 bp, Artificial Sequence
  Antisense compound
atcataaactgtgttgttaa

SEQ ID NO: 24840 - DNA, 20 bp, Artificial Sequence
  Antisense compound
gatcataaactgtgttgtta

SEQ ID NO: 24841 - DNA, 20 bp, Artificial Sequence
  Antisense compound
ggatcataaactgtgttgtt

SEQ ID NO: 24842 - DNA, 20 bp, Artificial Sequence
  Antisense compound
aggatcataaactgtgttgt

SEQ ID NO: 24843 - DNA, 20 bp, Artificial Sequence
  Antisense compound
gaggatcataaactgtgttg

SEQ ID NO: 24844 - DNA, 20 bp, Artificial Sequence
  Antisense compound
agaggatcataaactgtgtt

SEQ ID NO: 24845 - DNA, 20 bp, Artificial Sequence
  Antisense compound
cagaggatcataaactgtgt

SEQ ID NO: 24846 - DNA, 20 bp, Artificial Sequence
  Antisense compound
gcagaggatcataaactgtg

SEQ ID NO: 24847 - DNA, 20 bp, Artificial Sequence
  Antisense compound
tgcagaggatcataaactgt

SEQ ID NO: 24848 - DNA, 20 bp, Artificial Sequence
  Antisense compound
ttgcagaggatcataaactg

SEQ ID NO: 24849 - DNA, 20 bp, Artificial Sequence
  Antisense compound
gttgcagaggatcataaact

SEQ ID NO: 24850 - DNA, 20 bp, Artificial Sequence
  Antisense compound
ggttgcagaggatcataaac

SEQ ID NO: 24851 - DNA, 20 bp, Artificial Sequence
  Antisense compound
aggttgcagaggatcataaa

SEQ ID NO: 24852 - DNA, 20 bp, Artificial Sequence
  Antisense compound
caggttgcagaggatcataa

SEQ ID NO: 24853 - DNA, 20 bp, Artificial Sequence
  Antisense compound
tcaggttgcagaggatcata

SEQ ID NO: 24854 - DNA, 20 bp, Artificial Sequence
  Antisense compound
ctcaggttgcagaggatcat

SEQ ID NO: 24855 - DNA, 20 bp, Artificial Sequence
  Antisense compound
gctcaggttgcagaggatca

SEQ ID NO: 24856 - DNA, 20 bp, Artificial Sequence
  Antisense compound
agctcaggttgcagaggatc

SEQ ID NO: 24857 - DNA, 20 bp, Artificial Sequence
  Antisense compound
aagctcaggttgcagaggat

SEQ ID NO: 24858 - DNA, 20 bp, Artificial Sequence
  Antisense compound
caagctcaggttgcagagga

SEQ ID NO: 24859 - DNA, 20 bp, Artificial Sequence
  Antisense compound
tcaagctcaggttgcagagg

SEQ ID NO: 24860 - DNA, 20 bp, Artificial Sequence
  Antisense compound
gtcaagctcaggttgcagag

SEQ ID NO: 24861 - DNA, 20 bp, Artificial Sequence
  Antisense compound
agtcaagctcaggttgcaga

SEQ ID NO: 24862 - DNA, 20 bp, Artificial Sequence
  Antisense compound
gagtcaagctcaggttgcag

SEQ ID NO: 24863 - DNA, 20 bp, Artificial Sequence
  Antisense compound
tgagtcaagctcaggttgca

SEQ ID NO: 24864 - DNA, 20 bp, Artificial Sequence
  Antisense compound
atgagtcaagctcaggttgc

SEQ ID NO: 24865 - DNA, 20 bp, Artificial Sequence
  Antisense compound
aatgagtcaagctcaggttg

SEQ ID NO: 24866 - DNA, 20 bp, Artificial Sequence
  Antisense compound
gaatgagtcaagctcaggtt

SEQ ID NO: 24867 - DNA, 20 bp, Artificial Sequence
  Antisense compound
tgaatgagtcaagctcaggt

SEQ ID NO: 24868 - DNA, 20 bp, Artificial Sequence
  Antisense compound
ttgaatgagtcaagctcagg

SEQ ID NO: 24869 - DNA, 20 bp, Artificial Sequence
  Antisense compound
tttgaatgagtcaagctcag

SEQ ID NO: 24870 - DNA, 20 bp, Artificial Sequence
  Antisense compound
ctttgaatgagtcaagctca

SEQ ID NO: 24871 - DNA, 20 bp, Artificial Sequence
  Antisense compound
tctttgaatgagtcaagctc

SEQ ID NO: 24872 - DNA, 20 bp, Artificial Sequence
  Antisense compound
ttctttgaatgagtcaagct

SEQ ID NO: 24873 - DNA, 20 bp, Artificial Sequence
  Antisense compound
cttctttgaatgagtcaagc

SEQ ID NO: 24874 - DNA, 20 bp, Artificial Sequence
  Antisense compound
tcttctttgaatgagtcaag

SEQ ID NO: 24875 - DNA, 20 bp, Artificial Sequence
  Antisense compound
ctcttctttgaatgagtcaa

SEQ ID NO: 24876 - DNA, 20 bp, Artificial Sequence
  Antisense compound
gctcttctttgaatgagtca

SEQ ID NO: 24877 - DNA, 20 bp, Artificial Sequence
  Antisense compound
agctcttctttgaatgagtc

SEQ ID NO: 24878 - DNA, 20 bp, Artificial Sequence
  Antisense compound
cagctcttctttgaatgagt

SEQ ID NO: 24879 - DNA, 20 bp, Artificial Sequence
  Antisense compound
ccagctcttctttgaatgag

SEQ ID NO: 24880 - DNA, 20 bp, Artificial Sequence
  Antisense compound
tccagctcttctttgaatga

SEQ ID NO: 24881 - DNA, 20 bp, Artificial Sequence
  Antisense compound
gtccagctcttctttgaatg

SEQ ID NO: 24882 - DNA, 20 bp, Artificial Sequence
  Antisense compound
tgtccagctcttctttgaat

SEQ ID NO: 24883 - DNA, 20 bp, Artificial Sequence
  Antisense compound
ttgtccagctcttctttgaa

SEQ ID NO: 24884 - DNA, 20 bp, Artificial Sequence
  Antisense compound
cttgtccagctcttctttga

SEQ ID NO: 24885 - DNA, 20 bp, Artificial Sequence
  Antisense compound
acttgtccagctcttctttg

SEQ ID NO: 24886 - DNA, 20 bp, Artificial Sequence
  Antisense compound
tacttgtccagctcttcttt

SEQ ID NO: 24887 - DNA, 20 bp, Artificial Sequence
  Antisense compound
gtacttgtccagctcttctt

SEQ ID NO: 24888 - DNA, 20 bp, Artificial Sequence
  Antisense compound
agtacttgtccagctcttct

SEQ ID NO: 24889 - DNA, 20 bp, Artificial Sequence
  Antisense compound
aagtacttgtccagctcttc

SEQ ID NO: 24890 - DNA, 20 bp, Artificial Sequence
  Antisense compound
gaagtacttgtccagctctt

SEQ ID NO: 24891 - DNA, 20 bp, Artificial Sequence
  Antisense compound
tgaagtacttgtccagctct

SEQ ID NO: 24892 - DNA, 20 bp, Artificial Sequence
  Antisense compound
ttgaagtacttgtccagctc

SEQ ID NO: 24893 - DNA, 20 bp, Artificial Sequence
  Antisense compound
tttgaagtacttgtccagct

SEQ ID NO: 24894 - DNA, 20 bp, Artificial Sequence
  Antisense compound
ttttgaagtacttgtccagc

SEQ ID NO: 24895 - DNA, 20 bp, Artificial Sequence
  Antisense compound
tttttgaagtacttgtccag

SEQ ID NO: 24896 - DNA, 20 bp, Artificial Sequence
  Antisense compound
atttttgaagtacttgtcca

SEQ ID NO: 24897 - DNA, 20 bp, Artificial Sequence
  Antisense compound
gatttttgaagtacttgtcc

SEQ ID NO: 24898 - DNA, 20 bp, Artificial Sequence
  Antisense compound
tgatttttgaagtacttgtc

SEQ ID NO: 24899 - DNA, 20 bp, Artificial Sequence
  Antisense compound
atgatttttgaagtacttgt

SEQ ID NO: 24900 - DNA, 20 bp, Artificial Sequence
  Antisense compound
tatgatttttgaagtacttg

SEQ ID NO: 24901 - DNA, 20 bp, Artificial Sequence
  Antisense compound
gtatgatttttgaagtactt

SEQ ID NO: 24902 - DNA, 20 bp, Artificial Sequence
  Antisense compound
tgtatgatttttgaagtact

SEQ ID NO: 24903 - DNA, 20 bp, Artificial Sequence
  Antisense compound
atgtatgatttttgaagtac

SEQ ID NO: 24904 - DNA, 20 bp, Artificial Sequence
  Antisense compound
gatgtatgatttttgaagta

SEQ ID NO: 24905 - DNA, 20 bp, Artificial Sequence
  Antisense compound
tgatgtatgatttttgaagt

SEQ ID NO: 24906 - DNA, 20 bp, Artificial Sequence
  Antisense compound
gtgatgtatgatttttgaag

SEQ ID NO: 24907 - DNA, 20 bp, Artificial Sequence
  Antisense compound
ggtgatgtatgatttttgaa

SEQ ID NO: 24908 - DNA, 20 bp, Artificial Sequence
  Antisense compound
tggtgatgtatgatttttga

SEQ ID NO: 24909 - DNA, 20 bp, Artificial Sequence
  Antisense compound
ctggtgatgtatgatttttg

SEQ ID NO: 24910 - DNA, 20 bp, Artificial Sequence
  Antisense compound
tctggtgatgtatgattttt

SEQ ID NO: 24911 - DNA, 20 bp, Artificial Sequence
  Antisense compound
atctggtgatgtatgatttt

SEQ ID NO: 24912 - DNA, 20 bp, Artificial Sequence
  Antisense compound
catctggtgatgtatgattt

SEQ ID NO: 24913 - DNA, 20 bp, Artificial Sequence
  Antisense compound
acatctggtgatgtatgatt

SEQ ID NO: 24914 - DNA, 20 bp, Artificial Sequence
  Antisense compound
aacatctggtgatgtatgat

SEQ ID NO: 24915 - DNA, 20 bp, Artificial Sequence
  Antisense compound
caacatctggtgatgtatga

SEQ ID NO: 24916 - DNA, 20 bp, Artificial Sequence
  Antisense compound
tcaacatctggtgatgtatg

SEQ ID NO: 24917 - DNA, 20 bp, Artificial Sequence
  Antisense compound
atcaacatctggtgatgtat

SEQ ID NO: 24918 - DNA, 20 bp, Artificial Sequence
  Antisense compound
gatcaacatctggtgatgta

SEQ ID NO: 24919 - DNA, 20 bp, Artificial Sequence
  Antisense compound
agatcaacatctggtgatgt

SEQ ID NO: 24920 - DNA, 20 bp, Artificial Sequence
  Antisense compound
aagatcaacatctggtgatg

SEQ ID NO: 24921 - DNA, 20 bp, Artificial Sequence
  Antisense compound
caagatcaacatctggtgat

SEQ ID NO: 24922 - DNA, 20 bp, Artificial Sequence
  Antisense compound
ccaagatcaacatctggtga

SEQ ID NO: 24923 - DNA, 20 bp, Artificial Sequence
  Antisense compound
gccaagatcaacatctggtg

SEQ ID NO: 24924 - DNA, 20 bp, Artificial Sequence
  Antisense compound
cgccaagatcaacatctggt

SEQ ID NO: 24925 - DNA, 20 bp, Artificial Sequence
  Antisense compound
tcgccaagatcaacatctgg

SEQ ID NO: 24926 - DNA, 20 bp, Artificial Sequence
  Antisense compound
gtcgccaagatcaacatctg

SEQ ID NO: 24927 - DNA, 20 bp, Artificial Sequence
  Antisense compound
tgtcgccaagatcaacatct

SEQ ID NO: 24928 - DNA, 20 bp, Artificial Sequence
  Antisense compound
atgtcgccaagatcaacatc

SEQ ID NO: 24929 - DNA, 20 bp, Artificial Sequence
  Antisense compound
aatgtcgccaagatcaacat

SEQ ID NO: 24930 - DNA, 20 bp, Artificial Sequence
  Antisense compound
aaatgtcgccaagatcaaca

SEQ ID NO: 24931 - DNA, 20 bp, Artificial Sequence
  Antisense compound
gaaatgtcgccaagatcaac

SEQ ID NO: 24932 - DNA, 20 bp, Artificial Sequence
  Antisense compound
tgaaatgtcgccaagatcaa

SEQ ID NO: 24933 - DNA, 20 bp, Artificial Sequence
  Antisense compound
ctgaaatgtcgccaagatca

SEQ ID NO: 24934 - DNA, 20 bp, Artificial Sequence
  Antisense compound
cctgaaatgtcgccaagatc

SEQ ID NO: 24935 - DNA, 20 bp, Artificial Sequence
  Antisense compound
gcctgaaatgtcgccaagat

SEQ ID NO: 24936 - DNA, 20 bp, Artificial Sequence
  Antisense compound
tgcctgaaatgtcgccaaga

SEQ ID NO: 24937 - DNA, 20 bp, Artificial Sequence
  Antisense compound
atgcctgaaatgtcgccaag

SEQ ID NO: 24938 - DNA, 20 bp, Artificial Sequence
  Antisense compound
aatgcctgaaatgtcgccaa

SEQ ID NO: 24939 - DNA, 20 bp, Artificial Sequence
  Antisense compound
taatgcctgaaatgtcgcca

SEQ ID NO: 24940 - DNA, 20 bp, Artificial Sequence
  Antisense compound
ttaatgcctgaaatgtcgcc

SEQ ID NO: 24941 - DNA, 20 bp, Artificial Sequence
  Antisense compound
gttaatgcctgaaatgtcgc

SEQ ID NO: 24942 - DNA, 20 bp, Artificial Sequence
  Antisense compound
cgttaatgcctgaaatgtcg

SEQ ID NO: 24943 - DNA, 20 bp, Artificial Sequence
  Antisense compound
gcgttaatgcctgaaatgtc

SEQ ID NO: 24944 - DNA, 20 bp, Artificial Sequence
  Antisense compound
agcgttaatgcctgaaatgt

SEQ ID NO: 24945 - DNA, 20 bp, Artificial Sequence
  Antisense compound
aagcgttaatgcctgaaatg

SEQ ID NO: 24946 - DNA, 20 bp, Artificial Sequence
  Antisense compound
gaagcgttaatgcctgaaat

SEQ ID NO: 24947 - DNA, 20 bp, Artificial Sequence
  Antisense compound
agaagcgttaatgcctgaaa

SEQ ID NO: 24948 - DNA, 20 bp, Artificial Sequence
  Antisense compound
cagaagcgttaatgcctgaa

SEQ ID NO: 24949 - DNA, 20 bp, Artificial Sequence
  Antisense compound
acagaagcgttaatgcctga

SEQ ID NO: 24950 - DNA, 20 bp, Artificial Sequence
  Antisense compound
gacagaagcgttaatgcctg

SEQ ID NO: 24951 - DNA, 20 bp, Artificial Sequence
  Antisense compound
cgacagaagcgttaatgcct

SEQ ID NO: 24952 - DNA, 20 bp, Artificial Sequence
  Antisense compound
acgacagaagcgttaatgcc

SEQ ID NO: 24953 - DNA, 20 bp, Artificial Sequence
  Antisense compound
gacgacagaagcgttaatgc

SEQ ID NO: 24954 - DNA, 20 bp, Artificial Sequence
  Antisense compound
tgacgacagaagcgttaatg

SEQ ID NO: 24955 - DNA, 20 bp, Artificial Sequence
  Antisense compound
ttgacgacagaagcgttaat

SEQ ID NO: 24956 - DNA, 20 bp, Artificial Sequence
  Antisense compound
gttgacgacagaagcgttaa

SEQ ID NO: 24957 - DNA, 20 bp, Artificial Sequence
  Antisense compound
tgttgacgacagaagcgtta

SEQ ID NO: 24958 - DNA, 20 bp, Artificial Sequence
  Antisense compound
atgttgacgacagaagcgtt

SEQ ID NO: 24959 - DNA, 20 bp, Artificial Sequence
  Antisense compound
aatgttgacgacagaagcgt

SEQ ID NO: 24960 - DNA, 20 bp, Artificial Sequence
  Antisense compound
gaatgttgacgacagaagcg

SEQ ID NO: 24961 - DNA, 20 bp, Artificial Sequence
  Antisense compound
tgaatgttgacgacagaagc

SEQ ID NO: 24962 - DNA, 20 bp, Artificial Sequence
  Antisense compound
ttgaatgttgacgacagaag

SEQ ID NO: 24963 - DNA, 20 bp, Artificial Sequence
  Antisense compound
tttgaatgttgacgacagaa

SEQ ID NO: 24964 - DNA, 20 bp, Artificial Sequence
  Antisense compound
ttttgaatgttgacgacaga

SEQ ID NO: 24965 - DNA, 20 bp, Artificial Sequence
  Antisense compound
tttttgaatgttgacgacag

SEQ ID NO: 24966 - DNA, 20 bp, Artificial Sequence
  Antisense compound
ctttttgaatgttgacgaca

SEQ ID NO: 24967 - DNA, 20 bp, Artificial Sequence
  Antisense compound
tctttttgaatgttgacgac

SEQ ID NO: 24968 - DNA, 20 bp, Artificial Sequence
  Antisense compound
ttctttttgaatgttgacga

SEQ ID NO: 24969 - DNA, 20 bp, Artificial Sequence
  Antisense compound
tttctttttgaatgttgacg

SEQ ID NO: 24970 - DNA, 20 bp, Artificial Sequence
  Antisense compound
atttctttttgaatgttgac

SEQ ID NO: 24971 - DNA, 20 bp, Artificial Sequence
  Antisense compound
aatttctttttgaatgttga

SEQ ID NO: 24972 - DNA, 20 bp, Artificial Sequence
  Antisense compound
caatttctttttgaatgttg

SEQ ID NO: 24973 - DNA, 20 bp, Artificial Sequence
  Antisense compound
tcaatttctttttgaatgtt

SEQ ID NO: 24974 - DNA, 20 bp, Artificial Sequence
  Antisense compound
gtcaatttctttttgaatgt

SEQ ID NO: 24975 - DNA, 20 bp, Artificial Sequence
  Antisense compound
ggtcaatttctttttgaatg

SEQ ID NO: 24976 - DNA, 20 bp, Artificial Sequence
  Antisense compound
cggtcaatttctttttgaat

SEQ ID NO: 24977 - DNA, 20 bp, Artificial Sequence
  Antisense compound
gcggtcaatttctttttgaa

SEQ ID NO: 24978 - DNA, 20 bp, Artificial Sequence
  Antisense compound
ggcggtcaatttctttttga

SEQ ID NO: 24979 - DNA, 20 bp, Artificial Sequence
  Antisense compound
aggcggtcaatttctttttg

SEQ ID NO: 24980 - DNA, 20 bp, Artificial Sequence
  Antisense compound
gaggcggtcaatttcttttt

SEQ ID NO: 24981 - DNA, 20 bp, Artificial Sequence
  Antisense compound
tgaggcggtcaatttctttt

SEQ ID NO: 24982 - DNA, 20 bp, Artificial Sequence
  Antisense compound
ttgaggcggtcaatttcttt

SEQ ID NO: 24983 - DNA, 20 bp, Artificial Sequence
  Antisense compound
attgaggcggtcaatttctt

SEQ ID NO: 24984 - DNA, 20 bp, Artificial Sequence
  Antisense compound
cattgaggcggtcaatttct

SEQ ID NO: 24985 - DNA, 20 bp, Artificial Sequence
  Antisense compound
tcattgaggcggtcaatttc

SEQ ID NO: 24986 - DNA, 20 bp, Artificial Sequence
  Antisense compound
ctcattgaggcggtcaattt

SEQ ID NO: 24987 - DNA, 20 bp, Artificial Sequence
  Antisense compound
cctcattgaggcggtcaatt

SEQ ID NO: 24988 - DNA, 20 bp, Artificial Sequence
  Antisense compound
acctcattgaggcggtcaat

SEQ ID NO: 24989 - DNA, 20 bp, Artificial Sequence
  Antisense compound
gacctcattgaggcggtcaa

SEQ ID NO: 24990 - DNA, 20 bp, Artificial Sequence
  Antisense compound
cgacctcattgaggcggtca

SEQ ID NO: 24991 - DNA, 20 bp, Artificial Sequence
  Antisense compound
gcgacctcattgaggcggtc

SEQ ID NO: 24992 - DNA, 20 bp, Artificial Sequence
  Antisense compound
agcgacctcattgaggcggt

SEQ ID NO: 24993 - DNA, 20 bp, Artificial Sequence
  Antisense compound
tagcgacctcattgaggcgg

SEQ ID NO: 24994 - DNA, 20 bp, Artificial Sequence
  Antisense compound
ttagcgacctcattgaggcg

SEQ ID NO: 24995 - DNA, 20 bp, Artificial Sequence
  Antisense compound
tttagcgacctcattgaggc

SEQ ID NO: 24996 - DNA, 20 bp, Artificial Sequence
  Antisense compound
ttttagcgacctcattgagg

SEQ ID NO: 24997 - DNA, 20 bp, Artificial Sequence
  Antisense compound
tttttagcgacctcattgag

SEQ ID NO: 24998 - DNA, 20 bp, Artificial Sequence
  Antisense compound
atttttagcgacctcattga

SEQ ID NO: 24999 - DNA, 20 bp, Artificial Sequence
  Antisense compound
aatttttagcgacctcattg

SEQ ID NO: 25000 - DNA, 20 bp, Artificial Sequence
  Antisense compound
aaatttttagcgacctcatt

SEQ ID NO: 25001 - DNA, 20 bp, Artificial Sequence
  Antisense compound
taaatttttagcgacctcat

SEQ ID NO: 25002 - DNA, 20 bp, Artificial Sequence
  Antisense compound
ttaaatttttagcgacctca

SEQ ID NO: 25003 - DNA, 20 bp, Artificial Sequence
  Antisense compound
tttaaatttttagcgacctc

SEQ ID NO: 25004 - DNA, 20 bp, Artificial Sequence
  Antisense compound
atttaaatttttagcgacct

SEQ ID NO: 25005 - DNA, 20 bp, Artificial Sequence
  Antisense compound
catttaaatttttagcgacc

SEQ ID NO: 25006 - DNA, 20 bp, Artificial Sequence
  Antisense compound
tcatttaaatttttagcgac

SEQ ID NO: 25007 - DNA, 20 bp, Artificial Sequence
  Antisense compound
ttcatttaaatttttagcga

SEQ ID NO: 25008 - DNA, 20 bp, Artificial Sequence
  Antisense compound
attcatttaaatttttagcg

SEQ ID NO: 25009 - DNA, 20 bp, Artificial Sequence
  Antisense compound
gattcatttaaatttttagc

SEQ ID NO: 25010 - DNA, 20 bp, Artificial Sequence
  Antisense compound
tgattcatttaaatttttag

SEQ ID NO: 25011 - DNA, 20 bp, Artificial Sequence
  Antisense compound
gtgattcatttaaattttta

SEQ ID NO: 25012 - DNA, 20 bp, Artificial Sequence
  Antisense compound
agtgattcatttaaattttt

SEQ ID NO: 25013 - DNA, 20 bp, Artificial Sequence
  Antisense compound
gagtgattcatttaaatttt

SEQ ID NO: 25014 - DNA, 20 bp, Artificial Sequence
  Antisense compound
tgagtgattcatttaaattt

SEQ ID NO: 25015 - DNA, 20 bp, Artificial Sequence
  Antisense compound
atgagtgattcatttaaatt

SEQ ID NO: 25016 - DNA, 20 bp, Artificial Sequence
  Antisense compound
aatgagtgattcatttaaat

SEQ ID NO: 25017 - DNA, 20 bp, Artificial Sequence
  Antisense compound
caatgagtgattcatttaaa

SEQ ID NO: 25018 - DNA, 20 bp, Artificial Sequence
  Antisense compound
tcaatgagtgattcatttaa

SEQ ID NO: 25019 - DNA, 20 bp, Artificial Sequence
  Antisense compound
gtcaatgagtgattcattta

SEQ ID NO: 25020 - DNA, 20 bp, Artificial Sequence
  Antisense compound
ggtcaatgagtgattcattt

SEQ ID NO: 25021 - DNA, 20 bp, Artificial Sequence
  Antisense compound
aggtcaatgagtgattcatt

SEQ ID NO: 25022 - DNA, 20 bp, Artificial Sequence
  Antisense compound
aaggtcaatgagtgattcat

SEQ ID NO: 25023 - DNA, 20 bp, Artificial Sequence
  Antisense compound
gaaggtcaatgagtgattca

SEQ ID NO: 25024 - DNA, 20 bp, Artificial Sequence
  Antisense compound
tgaaggtcaatgagtgattc

SEQ ID NO: 25025 - DNA, 20 bp, Artificial Sequence
  Antisense compound
ttgaaggtcaatgagtgatt

SEQ ID NO: 25026 - DNA, 20 bp, Artificial Sequence
  Antisense compound
cttgaaggtcaatgagtgat

SEQ ID NO: 25027 - DNA, 20 bp, Artificial Sequence
  Antisense compound
tcttgaaggtcaatgagtga

SEQ ID NO: 25028 - DNA, 20 bp, Artificial Sequence
  Antisense compound
ttcttgaaggtcaatgagtg

SEQ ID NO: 25029 - DNA, 20 bp, Artificial Sequence
  Antisense compound
attcttgaaggtcaatgagt

SEQ ID NO: 25030 - DNA, 20 bp, Artificial Sequence
  Antisense compound
aattcttgaaggtcaatgag

SEQ ID NO: 25031 - DNA, 20 bp, Artificial Sequence
  Antisense compound
caattcttgaaggtcaatga

SEQ ID NO: 25032 - DNA, 20 bp, Artificial Sequence
  Antisense compound
ccaattcttgaaggtcaatg

SEQ ID NO: 25033 - DNA, 20 bp, Artificial Sequence
  Antisense compound
cccaattcttgaaggtcaat

SEQ ID NO: 25034 - DNA, 20 bp, Artificial Sequence
  Antisense compound
tcccaattcttgaaggtcaa

SEQ ID NO: 25035 - DNA, 20 bp, Artificial Sequence
  Antisense compound
ttcccaattcttgaaggtca

SEQ ID NO: 25036 - DNA, 20 bp, Artificial Sequence
  Antisense compound
tttcccaattcttgaaggtc

SEQ ID NO: 25037 - DNA, 20 bp, Artificial Sequence
  Antisense compound
ttttcccaattcttgaaggt

SEQ ID NO: 25038 - DNA, 20 bp, Artificial Sequence
  Antisense compound
attttcccaattcttgaagg

SEQ ID NO: 25039 - DNA, 20 bp, Artificial Sequence
  Antisense compound
tattttcccaattcttgaag

SEQ ID NO: 25040 - DNA, 20 bp, Artificial Sequence
  Antisense compound
atattttcccaattcttgaa

SEQ ID NO: 25041 - DNA, 20 bp, Artificial Sequence
  Antisense compound
catattttcccaattcttga

SEQ ID NO: 25042 - DNA, 20 bp, Artificial Sequence
  Antisense compound
tcatattttcccaattcttg

SEQ ID NO: 25043 - DNA, 20 bp, Artificial Sequence
  Antisense compound
ctcatattttcccaattctt

SEQ ID NO: 25044 - DNA, 20 bp, Artificial Sequence
  Antisense compound
gctcatattttcccaattct

SEQ ID NO: 25045 - DNA, 20 bp, Artificial Sequence
  Antisense compound
tgctcatattttcccaattc

SEQ ID NO: 25046 - DNA, 20 bp, Artificial Sequence
  Antisense compound
ttgctcatattttcccaatt

SEQ ID NO: 25047 - DNA, 20 bp, Artificial Sequence
  Antisense compound
attgctcatattttcccaat

SEQ ID NO: 25048 - DNA, 20 bp, Artificial Sequence
  Antisense compound
tattgctcatattttcccaa

SEQ ID NO: 25049 - DNA, 20 bp, Artificial Sequence
  Antisense compound
atattgctcatattttccca

SEQ ID NO: 25050 - DNA, 20 bp, Artificial Sequence
  Antisense compound
tatattgctcatattttccc

SEQ ID NO: 25051 - DNA, 20 bp, Artificial Sequence
  Antisense compound
atatattgctcatattttcc

SEQ ID NO: 25052 - DNA, 20 bp, Artificial Sequence
  Antisense compound
aatatattgctcatattttc

SEQ ID NO: 25053 - DNA, 20 bp, Artificial Sequence
  Antisense compound
taatatattgctcatatttt

SEQ ID NO: 25054 - DNA, 20 bp, Artificial Sequence
  Antisense compound
ttaatatattgctcatattt

SEQ ID NO: 25055 - DNA, 20 bp, Artificial Sequence
  Antisense compound
tttaatatattgctcatatt

SEQ ID NO: 25056 - DNA, 20 bp, Artificial Sequence
  Antisense compound
atttaatatattgctcatat

SEQ ID NO: 25057 - DNA, 20 bp, Artificial Sequence
  Antisense compound
catttaatatattgctcata

SEQ ID NO: 25058 - DNA, 20 bp, Artificial Sequence
  Antisense compound
ccatttaatatattgctcat

SEQ ID NO: 25059 - DNA, 20 bp, Artificial Sequence
  Antisense compound
gccatttaatatattgctca

SEQ ID NO: 25060 - DNA, 20 bp, Artificial Sequence
  Antisense compound
ggccatttaatatattgctc

SEQ ID NO: 25061 - DNA, 20 bp, Artificial Sequence
  Antisense compound
aggccatttaatatattgct

SEQ ID NO: 25062 - DNA, 20 bp, Artificial Sequence
  Antisense compound
aaggccatttaatatattgc

SEQ ID NO: 25063 - DNA, 20 bp, Artificial Sequence
  Antisense compound
caaggccatttaatatattg

SEQ ID NO: 25064 - DNA, 20 bp, Artificial Sequence
  Antisense compound
ccaaggccatttaatatatt

SEQ ID NO: 25065 - DNA, 20 bp, Artificial Sequence
  Antisense compound
accaaggccatttaatatat

SEQ ID NO: 25066 - DNA, 20 bp, Artificial Sequence
  Antisense compound
taccaaggccatttaatata

SEQ ID NO: 25067 - DNA, 20 bp, Artificial Sequence
  Antisense compound
ataccaaggccatttaatat

SEQ ID NO: 25068 - DNA, 20 bp, Artificial Sequence
  Antisense compound
cataccaaggccatttaata

SEQ ID NO: 25069 - DNA, 20 bp, Artificial Sequence
  Antisense compound
acataccaaggccatttaat

SEQ ID NO: 25070 - DNA, 20 bp, Artificial Sequence
  Antisense compound
aacataccaaggccatttaa

SEQ ID NO: 25071 - DNA, 20 bp, Artificial Sequence
  Antisense compound
aaacataccaaggccattta

SEQ ID NO: 25072 - DNA, 20 bp, Artificial Sequence
  Antisense compound
caaacataccaaggccattt

SEQ ID NO: 25073 - DNA, 20 bp, Artificial Sequence
  Antisense compound
ccaaacataccaaggccatt

SEQ ID NO: 25074 - DNA, 20 bp, Artificial Sequence
  Antisense compound
gccaaacataccaaggccat

SEQ ID NO: 25075 - DNA, 20 bp, Artificial Sequence
  Antisense compound
agccaaacataccaaggcca

SEQ ID NO: 25076 - DNA, 20 bp, Artificial Sequence
  Antisense compound
gagccaaacataccaaggcc

SEQ ID NO: 25077 - DNA, 20 bp, Artificial Sequence
  Antisense compound
cgagccaaacataccaaggc

SEQ ID NO: 25078 - DNA, 20 bp, Artificial Sequence
  Antisense compound
ccgagccaaacataccaagg

SEQ ID NO: 25079 - DNA, 20 bp, Artificial Sequence
  Antisense compound
gccgagccaaacataccaag

SEQ ID NO: 25080 - DNA, 20 bp, Artificial Sequence
  Antisense compound
agccgagccaaacataccaa

SEQ ID NO: 25081 - DNA, 20 bp, Artificial Sequence
  Antisense compound
aagccgagccaaacatacca

SEQ ID NO: 25082 - DNA, 20 bp, Artificial Sequence
  Antisense compound
gaagccgagccaaacatacc

SEQ ID NO: 25083 - DNA, 20 bp, Artificial Sequence
  Antisense compound
tgaagccgagccaaacatac

SEQ ID NO: 25084 - DNA, 20 bp, Artificial Sequence
  Antisense compound
atgaagccgagccaaacata

SEQ ID NO: 25085 - DNA, 20 bp, Artificial Sequence
  Antisense compound
aatgaagccgagccaaacat

SEQ ID NO: 25086 - DNA, 20 bp, Artificial Sequence
  Antisense compound
caatgaagccgagccaaaca

SEQ ID NO: 25087 - DNA, 20 bp, Artificial Sequence
  Antisense compound
gcaatgaagccgagccaaac

SEQ ID NO: 25088 - DNA, 20 bp, Artificial Sequence
  Antisense compound
agcaatgaagccgagccaaa

SEQ ID NO: 25089 - DNA, 20 bp, Artificial Sequence
  Antisense compound
cagcaatgaagccgagccaa

SEQ ID NO: 25090 - DNA, 20 bp, Artificial Sequence
  Antisense compound
ccagcaatgaagccgagcca

SEQ ID NO: 25091 - DNA, 20 bp, Artificial Sequence
  Antisense compound
tccagcaatgaagccgagcc

SEQ ID NO: 25092 - DNA, 20 bp, Artificial Sequence
  Antisense compound
gtccagcaatgaagccgagc

SEQ ID NO: 25093 - DNA, 20 bp, Artificial Sequence
  Antisense compound
agtccagcaatgaagccgag

SEQ ID NO: 25094 - DNA, 20 bp, Artificial Sequence
  Antisense compound
tagtccagcaatgaagccga

SEQ ID NO: 25095 - DNA, 20 bp, Artificial Sequence
  Antisense compound
ttagtccagcaatgaagccg

SEQ ID NO: 25096 - DNA, 20 bp, Artificial Sequence
  Antisense compound
attagtccagcaatgaagcc

SEQ ID NO: 25097 - DNA, 20 bp, Artificial Sequence
  Antisense compound
aattagtccagcaatgaagc

SEQ ID NO: 25098 - DNA, 20 bp, Artificial Sequence
  Antisense compound
caattagtccagcaatgaag

SEQ ID NO: 25099 - DNA, 20 bp, Artificial Sequence
  Antisense compound
gcaattagtccagcaatgaa

SEQ ID NO: 25100 - DNA, 20 bp, Artificial Sequence
  Antisense compound
ggcaattagtccagcaatga

SEQ ID NO: 25101 - DNA, 20 bp, Artificial Sequence
  Antisense compound
tggcaattagtccagcaatg

SEQ ID NO: 25102 - DNA, 20 bp, Artificial Sequence
  Antisense compound
atggcaattagtccagcaat

SEQ ID NO: 25103 - DNA, 20 bp, Artificial Sequence
  Antisense compound
gatggcaattagtccagcaa

SEQ ID NO: 25104 - DNA, 20 bp, Artificial Sequence
  Antisense compound
cgatggcaattagtccagca

SEQ ID NO: 25105 - DNA, 20 bp, Artificial Sequence
  Antisense compound
acgatggcaattagtccagc

SEQ ID NO: 25106 - DNA, 20 bp, Artificial Sequence
  Antisense compound
gacgatggcaattagtccag

SEQ ID NO: 25107 - DNA, 20 bp, Artificial Sequence
  Antisense compound
tgacgatggcaattagtcca

SEQ ID NO: 25108 - DNA, 20 bp, Artificial Sequence
  Antisense compound
atgacgatggcaattagtcc

SEQ ID NO: 25109 - DNA, 20 bp, Artificial Sequence
  Antisense compound
catgacgatggcaattagtc

SEQ ID NO: 25110 - DNA, 20 bp, Artificial Sequence
  Antisense compound
ccatgacgatggcaattagt

SEQ ID NO: 25111 - DNA, 20 bp, Artificial Sequence
  Antisense compound
accatgacgatggcaattag

SEQ ID NO: 25112 - DNA, 20 bp, Artificial Sequence
  Antisense compound
aaccatgacgatggcaatta

SEQ ID NO: 25113 - DNA, 20 bp, Artificial Sequence
  Antisense compound
taaccatgacgatggcaatt

SEQ ID NO: 25114 - DNA, 20 bp, Artificial Sequence
  Antisense compound
gtaaccatgacgatggcaat

SEQ ID NO: 25115 - DNA, 20 bp, Artificial Sequence
  Antisense compound
tgtaaccatgacgatggcaa

SEQ ID NO: 25116 - DNA, 20 bp, Artificial Sequence
  Antisense compound
ttgtaaccatgacgatggca

SEQ ID NO: 25117 - DNA, 20 bp, Artificial Sequence
  Antisense compound
attgtaaccatgacgatggc

SEQ ID NO: 25118 - DNA, 20 bp, Artificial Sequence
  Antisense compound
gattgtaaccatgacgatgg

SEQ ID NO: 25119 - DNA, 20 bp, Artificial Sequence
  Antisense compound
agattgtaaccatgacgatg

SEQ ID NO: 25120 - DNA, 20 bp, Artificial Sequence
  Antisense compound
aagattgtaaccatgacgat

SEQ ID NO: 25121 - DNA, 20 bp, Artificial Sequence
  Antisense compound
caagattgtaaccatgacga

SEQ ID NO: 25122 - DNA, 20 bp, Artificial Sequence
  Antisense compound
gcaagattgtaaccatgacg

SEQ ID NO: 25123 - DNA, 20 bp, Artificial Sequence
  Antisense compound
agcaagattgtaaccatgac

SEQ ID NO: 25124 - DNA, 20 bp, Artificial Sequence
  Antisense compound
aagcaagattgtaaccatga

SEQ ID NO: 25125 - DNA, 20 bp, Artificial Sequence
  Antisense compound
aaagcaagattgtaaccatg

SEQ ID NO: 25126 - DNA, 20 bp, Artificial Sequence
  Antisense compound
caaagcaagattgtaaccat

SEQ ID NO: 25127 - DNA, 20 bp, Artificial Sequence
  Antisense compound
acaaagcaagattgtaacca

SEQ ID NO: 25128 - DNA, 20 bp, Artificial Sequence
  Antisense compound
aacaaagcaagattgtaacc

SEQ ID NO: 25129 - DNA, 20 bp, Artificial Sequence
  Antisense compound
caacaaagcaagattgtaac

SEQ ID NO: 25130 - DNA, 20 bp, Artificial Sequence
  Antisense compound
gcaacaaagcaagattgtaa

SEQ ID NO: 25131 - DNA, 20 bp, Artificial Sequence
  Antisense compound
tgcaacaaagcaagattgta

SEQ ID NO: 25132 - DNA, 20 bp, Artificial Sequence
  Antisense compound
atgcaacaaagcaagattgt

SEQ ID NO: 25133 - DNA, 20 bp, Artificial Sequence
  Antisense compound
catgcaacaaagcaagattg

SEQ ID NO: 25134 - DNA, 20 bp, Artificial Sequence
  Antisense compound
tcatgcaacaaagcaagatt

SEQ ID NO: 25135 - DNA, 20 bp, Artificial Sequence
  Antisense compound
gtcatgcaacaaagcaagat

SEQ ID NO: 25136 - DNA, 20 bp, Artificial Sequence
  Antisense compound
agtcatgcaacaaagcaaga

SEQ ID NO: 25137 - DNA, 20 bp, Artificial Sequence
  Antisense compound
tagtcatgcaacaaagcaag

SEQ ID NO: 25138 - DNA, 20 bp, Artificial Sequence
  Antisense compound
ctagtcatgcaacaaagcaa

SEQ ID NO: 25139 - DNA, 20 bp, Artificial Sequence
  Antisense compound
actagtcatgcaacaaagca

SEQ ID NO: 25140 - DNA, 20 bp, Artificial Sequence
  Antisense compound
aactagtcatgcaacaaagc

SEQ ID NO: 25141 - DNA, 20 bp, Artificial Sequence
  Antisense compound
caactagtcatgcaacaaag

SEQ ID NO: 25142 - DNA, 20 bp, Artificial Sequence
  Antisense compound
acaactagtcatgcaacaaa

SEQ ID NO: 25143 - DNA, 20 bp, Artificial Sequence
  Antisense compound
aacaactagtcatgcaacaa

SEQ ID NO: 25144 - DNA, 20 bp, Artificial Sequence
  Antisense compound
caacaactagtcatgcaaca

SEQ ID NO: 25145 - DNA, 20 bp, Artificial Sequence
  Antisense compound
gcaacaactagtcatgcaac

SEQ ID NO: 25146 - DNA, 20 bp, Artificial Sequence
  Antisense compound
tgcaacaactagtcatgcaa

SEQ ID NO: 25147 - DNA, 20 bp, Artificial Sequence
  Antisense compound
ctgcaacaactagtcatgca

SEQ ID NO: 25148 - DNA, 20 bp, Artificial Sequence
  Antisense compound
actgcaacaactagtcatgc

SEQ ID NO: 25149 - DNA, 20 bp, Artificial Sequence
  Antisense compound
aactgcaacaactagtcatg

SEQ ID NO: 25150 - DNA, 20 bp, Artificial Sequence
  Antisense compound
caactgcaacaactagtcat

SEQ ID NO: 25151 - DNA, 20 bp, Artificial Sequence
  Antisense compound
gcaactgcaacaactagtca

SEQ ID NO: 25152 - DNA, 20 bp, Artificial Sequence
  Antisense compound
ggcaactgcaacaactagtc

SEQ ID NO: 25153 - DNA, 20 bp, Artificial Sequence
  Antisense compound
aggcaactgcaacaactagt

SEQ ID NO: 25154 - DNA, 20 bp, Artificial Sequence
  Antisense compound
gaggcaactgcaacaactag

SEQ ID NO: 25155 - DNA, 20 bp, Artificial Sequence
  Antisense compound
tgaggcaactgcaacaacta

SEQ ID NO: 25156 - DNA, 20 bp, Artificial Sequence
  Antisense compound
ttgaggcaactgcaacaact

SEQ ID NO: 25157 - DNA, 20 bp, Artificial Sequence
  Antisense compound
cttgaggcaactgcaacaac

SEQ ID NO: 25158 - DNA, 20 bp, Artificial Sequence
  Antisense compound
ccttgaggcaactgcaacaa

SEQ ID NO: 25159 - DNA, 20 bp, Artificial Sequence
  Antisense compound
cccttgaggcaactgcaaca

SEQ ID NO: 25160 - DNA, 20 bp, Artificial Sequence
  Antisense compound
acccttgaggcaactgcaac

SEQ ID NO: 25161 - DNA, 20 bp, Artificial Sequence
  Antisense compound
cacccttgaggcaactgcaa

SEQ ID NO: 25162 - DNA, 20 bp, Artificial Sequence
  Antisense compound
gcacccttgaggcaactgca

SEQ ID NO: 25163 - DNA, 20 bp, Artificial Sequence
  Antisense compound
tgcacccttgaggcaactgc

SEQ ID NO: 25164 - DNA, 20 bp, Artificial Sequence
  Antisense compound
atgcacccttgaggcaactg

SEQ ID NO: 25165 - DNA, 20 bp, Artificial Sequence
  Antisense compound
catgcacccttgaggcaact

SEQ ID NO: 25166 - DNA, 20 bp, Artificial Sequence
  Antisense compound
gcatgcacccttgaggcaac

SEQ ID NO: 25167 - DNA, 20 bp, Artificial Sequence
  Antisense compound
agcatgcacccttgaggcaa

SEQ ID NO: 25168 - DNA, 20 bp, Artificial Sequence
  Antisense compound
gagcatgcacccttgaggca

SEQ ID NO: 25169 - DNA, 20 bp, Artificial Sequence
  Antisense compound
agagcatgcacccttgaggc

SEQ ID NO: 25170 - DNA, 20 bp, Artificial Sequence
  Antisense compound
aagagcatgcacccttgagg

SEQ ID NO: 25171 - DNA, 20 bp, Artificial Sequence
  Antisense compound
caagagcatgcacccttgag

SEQ ID NO: 25172 - DNA, 20 bp, Artificial Sequence
  Antisense compound
acaagagcatgcacccttga

SEQ ID NO: 25173 - DNA, 20 bp, Artificial Sequence
  Antisense compound
cacaagagcatgcacccttg

SEQ ID NO: 25174 - DNA, 20 bp, Artificial Sequence
  Antisense compound
ccacaagagcatgcaccctt

SEQ ID NO: 25175 - DNA, 20 bp, Artificial Sequence
  Antisense compound
accacaagagcatgcaccct

SEQ ID NO: 25176 - DNA, 20 bp, Artificial Sequence
  Antisense compound
aaccacaagagcatgcaccc

SEQ ID NO: 25177 - DNA, 20 bp, Artificial Sequence
  Antisense compound
gaaccacaagagcatgcacc

SEQ ID NO: 25178 - DNA, 20 bp, Artificial Sequence
  Antisense compound
agaaccacaagagcatgcac

SEQ ID NO: 25179 - DNA, 20 bp, Artificial Sequence
  Antisense compound
aagaaccacaagagcatgca

SEQ ID NO: 25180 - DNA, 20 bp, Artificial Sequence
  Antisense compound
caagaaccacaagagcatgc

SEQ ID NO: 25181 - DNA, 20 bp, Artificial Sequence
  Antisense compound
gcaagaaccacaagagcatg

SEQ ID NO: 25182 - DNA, 20 bp, Artificial Sequence
  Antisense compound
agcaagaaccacaagagcat

SEQ ID NO: 25183 - DNA, 20 bp, Artificial Sequence
  Antisense compound
cagcaagaaccacaagagca

SEQ ID NO: 25184 - DNA, 20 bp, Artificial Sequence
  Antisense compound
gcagcaagaaccacaagagc

SEQ ID NO: 25185 - DNA, 20 bp, Artificial Sequence
  Antisense compound
tgcagcaagaaccacaagag

SEQ ID NO: 25186 - DNA, 20 bp, Artificial Sequence
  Antisense compound
ttgcagcaagaaccacaaga

SEQ ID NO: 25187 - DNA, 20 bp, Artificial Sequence
  Antisense compound
cttgcagcaagaaccacaag

SEQ ID NO: 25188 - DNA, 20 bp, Artificial Sequence
  Antisense compound
acttgcagcaagaaccacaa

SEQ ID NO: 25189 - DNA, 20 bp, Artificial Sequence
  Antisense compound
aacttgcagcaagaaccaca

SEQ ID NO: 25190 - DNA, 20 bp, Artificial Sequence
  Antisense compound
aaacttgcagcaagaaccac

SEQ ID NO: 25191 - DNA, 20 bp, Artificial Sequence
  Antisense compound
caaacttgcagcaagaacca

SEQ ID NO: 25192 - DNA, 20 bp, Artificial Sequence
  Antisense compound
tcaaacttgcagcaagaacc

SEQ ID NO: 25193 - DNA, 20 bp, Artificial Sequence
  Antisense compound
atcaaacttgcagcaagaac

SEQ ID NO: 25194 - DNA, 20 bp, Artificial Sequence
  Antisense compound
catcaaacttgcagcaagaa

SEQ ID NO: 25195 - DNA, 20 bp, Artificial Sequence
  Antisense compound
tcatcaaacttgcagcaaga

SEQ ID NO: 25196 - DNA, 20 bp, Artificial Sequence
  Antisense compound
ctcatcaaacttgcagcaag

SEQ ID NO: 25197 - DNA, 20 bp, Artificial Sequence
  Antisense compound
cctcatcaaacttgcagcaa

SEQ ID NO: 25198 - DNA, 20 bp, Artificial Sequence
  Antisense compound
tcctcatcaaacttgcagca

SEQ ID NO: 25199 - DNA, 20 bp, Artificial Sequence
  Antisense compound
atcctcatcaaacttgcagc

SEQ ID NO: 25200 - DNA, 20 bp, Artificial Sequence
  Antisense compound
catcctcatcaaacttgcag

SEQ ID NO: 25201 - DNA, 20 bp, Artificial Sequence
  Antisense compound
tcatcctcatcaaacttgca

SEQ ID NO: 25202 - DNA, 20 bp, Artificial Sequence
  Antisense compound
gtcatcctcatcaaacttgc

SEQ ID NO: 25203 - DNA, 20 bp, Artificial Sequence
  Antisense compound
agtcatcctcatcaaacttg

SEQ ID NO: 25204 - DNA, 20 bp, Artificial Sequence
  Antisense compound
gagtcatcctcatcaaactt

SEQ ID NO: 25205 - DNA, 20 bp, Artificial Sequence
  Antisense compound
agagtcatcctcatcaaact

SEQ ID NO: 25206 - DNA, 20 bp, Artificial Sequence
  Antisense compound
cagagtcatcctcatcaaac

SEQ ID NO: 25207 - DNA, 20 bp, Artificial Sequence
  Antisense compound
tcagagtcatcctcatcaaa

SEQ ID NO: 25208 - DNA, 20 bp, Artificial Sequence
  Antisense compound
ctcagagtcatcctcatcaa

SEQ ID NO: 25209 - DNA, 20 bp, Artificial Sequence
  Antisense compound
gctcagagtcatcctcatca

SEQ ID NO: 25210 - DNA, 20 bp, Artificial Sequence
  Antisense compound
ggctcagagtcatcctcatc

SEQ ID NO: 25211 - DNA, 20 bp, Artificial Sequence
  Antisense compound
tggctcagagtcatcctcat

SEQ ID NO: 25212 - DNA, 20 bp, Artificial Sequence
  Antisense compound
ctggctcagagtcatcctca

SEQ ID NO: 25213 - DNA, 20 bp, Artificial Sequence
  Antisense compound
actggctcagagtcatcctc

SEQ ID NO: 25214 - DNA, 20 bp, Artificial Sequence
  Antisense compound
aactggctcagagtcatcct

SEQ ID NO: 25215 - DNA, 20 bp, Artificial Sequence
  Antisense compound
gaactggctcagagtcatcc

SEQ ID NO: 25216 - DNA, 20 bp, Artificial Sequence
  Antisense compound
agaactggctcagagtcatc

SEQ ID NO: 25217 - DNA, 20 bp, Artificial Sequence
  Antisense compound
gagaactggctcagagtcat

SEQ ID NO: 25218 - DNA, 20 bp, Artificial Sequence
  Antisense compound
tgagaactggctcagagtca

SEQ ID NO: 25219 - DNA, 20 bp, Artificial Sequence
  Antisense compound
ttgagaactggctcagagtc

SEQ ID NO: 25220 - DNA, 20 bp, Artificial Sequence
  Antisense compound
cttgagaactggctcagagt

SEQ ID NO: 25221 - DNA, 20 bp, Artificial Sequence
  Antisense compound
ccttgagaactggctcagag

SEQ ID NO: 25222 - DNA, 20 bp, Artificial Sequence
  Antisense compound
cccttgagaactggctcaga

SEQ ID NO: 25223 - DNA, 20 bp, Artificial Sequence
  Antisense compound
acccttgagaactggctcag

SEQ ID NO: 25224 - DNA, 20 bp, Artificial Sequence
  Antisense compound
cacccttgagaactggctca

SEQ ID NO: 25225 - DNA, 20 bp, Artificial Sequence
  Antisense compound
acacccttgagaactggctc

SEQ ID NO: 25226 - DNA, 20 bp, Artificial Sequence
  Antisense compound
gacacccttgagaactggct

SEQ ID NO: 25227 - DNA, 20 bp, Artificial Sequence
  Antisense compound
tgacacccttgagaactggc

SEQ ID NO: 25228 - DNA, 20 bp, Artificial Sequence
  Antisense compound
ttgacacccttgagaactgg

SEQ ID NO: 25229 - DNA, 20 bp, Artificial Sequence
  Antisense compound
tttgacacccttgagaactg

SEQ ID NO: 25230 - DNA, 20 bp, Artificial Sequence
  Antisense compound
atttgacacccttgagaact

SEQ ID NO: 25231 - DNA, 20 bp, Artificial Sequence
  Antisense compound
aatttgacacccttgagaac

SEQ ID NO: 25232 - DNA, 20 bp, Artificial Sequence
  Antisense compound
taatttgacacccttgagaa

SEQ ID NO: 25233 - DNA, 20 bp, Artificial Sequence
  Antisense compound
gtaatttgacacccttgaga

SEQ ID NO: 25234 - DNA, 20 bp, Artificial Sequence
  Antisense compound
tgtaatttgacacccttgag

SEQ ID NO: 25235 - DNA, 20 bp, Artificial Sequence
  Antisense compound
atgtaatttgacacccttga

SEQ ID NO: 25236 - DNA, 20 bp, Artificial Sequence
  Antisense compound
aatgtaatttgacacccttg

SEQ ID NO: 25237 - DNA, 20 bp, Artificial Sequence
  Antisense compound
taatgtaatttgacaccctt

SEQ ID NO: 25238 - DNA, 20 bp, Artificial Sequence
  Antisense compound
gtaatgtaatttgacaccct

SEQ ID NO: 25239 - DNA, 20 bp, Artificial Sequence
  Antisense compound
tgtaatgtaatttgacaccc

SEQ ID NO: 25240 - DNA, 20 bp, Artificial Sequence
  Antisense compound
gtgtaatgtaatttgacacc

SEQ ID NO: 25241 - DNA, 20 bp, Artificial Sequence
  Antisense compound
tgtgtaatgtaatttgacac

SEQ ID NO: 25242 - DNA, 20 bp, Artificial Sequence
  Antisense compound
atgtgtaatgtaatttgaca

SEQ ID NO: 25243 - DNA, 20 bp, Artificial Sequence
  Antisense compound
tatgtgtaatgtaatttgac

SEQ ID NO: 25244 - DNA, 20 bp, Artificial Sequence
  Antisense compound
ttatgtgtaatgtaatttga

SEQ ID NO: 25245 - DNA, 20 bp, Artificial Sequence
  Antisense compound
tttatgtgtaatgtaatttg

SEQ ID NO: 25246 - DNA, 20 bp, Artificial Sequence
  Antisense compound
gtttatgtgtaatgtaattt

SEQ ID NO: 25247 - DNA, 20 bp, Artificial Sequence
  Antisense compound
cgtttatgtgtaatgtaatt

SEQ ID NO: 25248 - DNA, 20 bp, Artificial Sequence
  Antisense compound
tcgtttatgtgtaatgtaat

SEQ ID NO: 25249 - DNA, 20 bp, Artificial Sequence
  Antisense compound
ttcgtttatgtgtaatgtaa

SEQ ID NO: 25250 - DNA, 20 bp, Artificial Sequence
  Antisense compound
gttcgtttatgtgtaatgta

SEQ ID NO: 25251 - DNA, 20 bp, Artificial Sequence
  Antisense compound
agttcgtttatgtgtaatgt

SEQ ID NO: 25252 - DNA, 20 bp, Artificial Sequence
  Antisense compound
aagttcgtttatgtgtaatg

SEQ ID NO: 25253 - DNA, 20 bp, Artificial Sequence
  Antisense compound
taagttcgtttatgtgtaat

SEQ ID NO: 25254 - DNA, 20 bp, Artificial Sequence
  Antisense compound
ataagttcgtttatgtgtaa

SEQ ID NO: 25255 - DNA, 20 bp, Artificial Sequence
  Antisense compound
cataagttcgtttatgtgta

SEQ ID NO: 25256 - DNA, 20 bp, Artificial Sequence
  Antisense compound
ccataagttcgtttatgtgt

SEQ ID NO: 25257 - DNA, 20 bp, Artificial Sequence
  Antisense compound
tccataagttcgtttatgtg

SEQ ID NO: 25258 - DNA, 20 bp, Artificial Sequence
  Antisense compound
atccataagttcgtttatgt

SEQ ID NO: 25259 - DNA, 20 bp, Artificial Sequence
  Antisense compound
aatccataagttcgtttatg

SEQ ID NO: 25260 - DNA, 20 bp, Artificial Sequence
  Antisense compound
aaatccataagttcgtttat

SEQ ID NO: 25261 - DNA, 20 bp, Artificial Sequence
  Antisense compound
caaatccataagttcgttta

SEQ ID NO: 25262 - DNA, 20 bp, Artificial Sequence
  Antisense compound
acaaatccataagttcgttt

SEQ ID NO: 25263 - DNA, 20 bp, Artificial Sequence
  Antisense compound
aacaaatccataagttcgtt

SEQ ID NO: 25264 - DNA, 20 bp, Artificial Sequence
  Antisense compound
aaacaaatccataagttcgt

SEQ ID NO: 25265 - DNA, 20 bp, Artificial Sequence
  Antisense compound
taaacaaatccataagttcg

SEQ ID NO: 25266 - DNA, 20 bp, Artificial Sequence
  Antisense compound
ataaacaaatccataagttc

SEQ ID NO: 25267 - DNA, 20 bp, Artificial Sequence
  Antisense compound
cataaacaaatccataagtt

SEQ ID NO: 25268 - DNA, 20 bp, Artificial Sequence
  Antisense compound
tcataaacaaatccataagt

SEQ ID NO: 25269 - DNA, 20 bp, Artificial Sequence
  Antisense compound
ctcataaacaaatccataag

SEQ ID NO: 25270 - DNA, 20 bp, Artificial Sequence
  Antisense compound
tctcataaacaaatccataa

SEQ ID NO: 25271 - DNA, 20 bp, Artificial Sequence
  Antisense compound
atctcataaacaaatccata

SEQ ID NO: 25272 - DNA, 20 bp, Artificial Sequence
  Antisense compound
aatctcataaacaaatccat

SEQ ID NO: 25273 - DNA, 20 bp, Artificial Sequence
  Antisense compound
aaatctcataaacaaatcca

SEQ ID NO: 25274 - DNA, 20 bp, Artificial Sequence
  Antisense compound
aaaatctcataaacaaatcc

SEQ ID NO: 25275 - DNA, 20 bp, Artificial Sequence
  Antisense compound
aaaaatctcataaacaaatc

SEQ ID NO: 25276 - DNA, 20 bp, Artificial Sequence
  Antisense compound
aaaaaatctcataaacaaat

SEQ ID NO: 25277 - DNA, 20 bp, Artificial Sequence
  Antisense compound
taaaaaatctcataaacaaa

SEQ ID NO: 25278 - DNA, 20 bp, Artificial Sequence
  Antisense compound
gtaaaaaatctcataaacaa

SEQ ID NO: 25279 - DNA, 20 bp, Artificial Sequence
  Antisense compound
agtaaaaaatctcataaaca

SEQ ID NO: 25280 - DNA, 20 bp, Artificial Sequence
  Antisense compound
gagtaaaaaatctcataaac

SEQ ID NO: 25281 - DNA, 20 bp, Artificial Sequence
  Antisense compound
agagtaaaaaatctcataaa

SEQ ID NO: 25282 - DNA, 20 bp, Artificial Sequence
  Antisense compound
aagagtaaaaaatctcataa

SEQ ID NO: 25283 - DNA, 20 bp, Artificial Sequence
  Antisense compound
caagagtaaaaaatctcata

SEQ ID NO: 25284 - DNA, 20 bp, Artificial Sequence
  Antisense compound
ccaagagtaaaaaatctcat

SEQ ID NO: 25285 - DNA, 20 bp, Artificial Sequence
  Antisense compound
tccaagagtaaaaaatctca

SEQ ID NO: 25286 - DNA, 20 bp, Artificial Sequence
  Antisense compound
atccaagagtaaaaaatctc

SEQ ID NO: 25287 - DNA, 20 bp, Artificial Sequence
  Antisense compound
gatccaagagtaaaaaatct

SEQ ID NO: 25288 - DNA, 20 bp, Artificial Sequence
  Antisense compound
tgatccaagagtaaaaaatc

SEQ ID NO: 25289 - DNA, 20 bp, Artificial Sequence
  Antisense compound
ttgatccaagagtaaaaaat

SEQ ID NO: 25290 - DNA, 20 bp, Artificial Sequence
  Antisense compound
attgatccaagagtaaaaaa

SEQ ID NO: 25291 - DNA, 20 bp, Artificial Sequence
  Antisense compound
aattgatccaagagtaaaaa

SEQ ID NO: 25292 - DNA, 20 bp, Artificial Sequence
  Antisense compound
taattgatccaagagtaaaa

SEQ ID NO: 25293 - DNA, 20 bp, Artificial Sequence
  Antisense compound
gtaattgatccaagagtaaa

SEQ ID NO: 25294 - DNA, 20 bp, Artificial Sequence
  Antisense compound
agtaattgatccaagagtaa

SEQ ID NO: 25295 - DNA, 20 bp, Artificial Sequence
  Antisense compound
cagtaattgatccaagagta

SEQ ID NO: 25296 - DNA, 20 bp, Artificial Sequence
  Antisense compound
gcagtaattgatccaagagt

SEQ ID NO: 25297 - DNA, 20 bp, Artificial Sequence
  Antisense compound
tgcagtaattgatccaagag

SEQ ID NO: 25298 - DNA, 20 bp, Artificial Sequence
  Antisense compound
gtgcagtaattgatccaaga

SEQ ID NO: 25299 - DNA, 20 bp, Artificial Sequence
  Antisense compound
tgtgcagtaattgatccaag

SEQ ID NO: 25300 - DNA, 20 bp, Artificial Sequence
  Antisense compound
ctgtgcagtaattgatccaa

SEQ ID NO: 25301 - DNA, 20 bp, Artificial Sequence
  Antisense compound
gctgtgcagtaattgatcca

SEQ ID NO: 25302 - DNA, 20 bp, Artificial Sequence
  Antisense compound
ggctgtgcagtaattgatcc

SEQ ID NO: 25303 - DNA, 20 bp, Artificial Sequence
  Antisense compound
tggctgtgcagtaattgatc

SEQ ID NO: 25304 - DNA, 20 bp, Artificial Sequence
  Antisense compound
ctggctgtgcagtaattgat

SEQ ID NO: 25305 - DNA, 20 bp, Artificial Sequence
  Antisense compound
actggctgtgcagtaattga

SEQ ID NO: 25306 - DNA, 20 bp, Artificial Sequence
  Antisense compound
tactggctgtgcagtaattg

SEQ ID NO: 25307 - DNA, 20 bp, Artificial Sequence
  Antisense compound
ttactggctgtgcagtaatt

SEQ ID NO: 25308 - DNA, 20 bp, Artificial Sequence
  Antisense compound
tttactggctgtgcagtaat

SEQ ID NO: 25309 - DNA, 20 bp, Artificial Sequence
  Antisense compound
ttttactggctgtgcagtaa

SEQ ID NO: 25310 - DNA, 20 bp, Artificial Sequence
  Antisense compound
tttttactggctgtgcagta

SEQ ID NO: 25311 - DNA, 20 bp, Artificial Sequence
  Antisense compound
atttttactggctgtgcagt

SEQ ID NO: 25312 - DNA, 20 bp, Artificial Sequence
  Antisense compound
aatttttactggctgtgcag

SEQ ID NO: 25313 - DNA, 20 bp, Artificial Sequence
  Antisense compound
caatttttactggctgtgca

SEQ ID NO: 25314 - DNA, 20 bp, Artificial Sequence
  Antisense compound
tcaatttttactggctgtgc

SEQ ID NO: 25315 - DNA, 20 bp, Artificial Sequence
  Antisense compound
gtcaatttttactggctgtg

SEQ ID NO: 25316 - DNA, 20 bp, Artificial Sequence
  Antisense compound
tgtcaatttttactggctgt

SEQ ID NO: 25317 - DNA, 20 bp, Artificial Sequence
  Antisense compound
ttgtcaatttttactggctg

SEQ ID NO: 25318 - DNA, 20 bp, Artificial Sequence
  Antisense compound
attgtcaatttttactggct

SEQ ID NO: 25319 - DNA, 20 bp, Artificial Sequence
  Antisense compound
cattgtcaatttttactggc

SEQ ID NO: 25320 - DNA, 20 bp, Artificial Sequence
  Antisense compound
gcattgtcaatttttactgg

SEQ ID NO: 25321 - DNA, 20 bp, Artificial Sequence
  Antisense compound
agcattgtcaatttttactg

SEQ ID NO: 25322 - DNA, 20 bp, Artificial Sequence
  Antisense compound
aagcattgtcaatttttact

SEQ ID NO: 25323 - DNA, 20 bp, Artificial Sequence
  Antisense compound
gaagcattgtcaatttttac

SEQ ID NO: 25324 - DNA, 20 bp, Artificial Sequence
  Antisense compound
agaagcattgtcaattttta

SEQ ID NO: 25325 - DNA, 20 bp, Artificial Sequence
  Antisense compound
gagaagcattgtcaattttt

SEQ ID NO: 25326 - DNA, 20 bp, Artificial Sequence
  Antisense compound
ggagaagcattgtcaatttt

SEQ ID NO: 25327 - DNA, 20 bp, Artificial Sequence
  Antisense compound
aggagaagcattgtcaattt

SEQ ID NO: 25328 - DNA, 20 bp, Artificial Sequence
  Antisense compound
caggagaagcattgtcaatt

SEQ ID NO: 25329 - DNA, 20 bp, Artificial Sequence
  Antisense compound
gcaggagaagcattgtcaat

SEQ ID NO: 25330 - DNA, 20 bp, Artificial Sequence
  Antisense compound
tgcaggagaagcattgtcaa

SEQ ID NO: 25331 - DNA, 20 bp, Artificial Sequence
  Antisense compound
ttgcaggagaagcattgtca

SEQ ID NO: 25332 - DNA, 20 bp, Artificial Sequence
  Antisense compound
cttgcaggagaagcattgtc

SEQ ID NO: 25333 - DNA, 20 bp, Artificial Sequence
  Antisense compound
acttgcaggagaagcattgt

SEQ ID NO: 25334 - DNA, 20 bp, Artificial Sequence
  Antisense compound
tacttgcaggagaagcattg

SEQ ID NO: 25335 - DNA, 20 bp, Artificial Sequence
  Antisense compound
gtacttgcaggagaagcatt

SEQ ID NO: 25336 - DNA, 20 bp, Artificial Sequence
  Antisense compound
agtacttgcaggagaagcat

SEQ ID NO: 25337 - DNA, 20 bp, Artificial Sequence
  Antisense compound
cagtacttgcaggagaagca

SEQ ID NO: 25338 - DNA, 20 bp, Artificial Sequence
  Antisense compound
acagtacttgcaggagaagc

SEQ ID NO: 25339 - DNA, 20 bp, Artificial Sequence
  Antisense compound
aacagtacttgcaggagaag

SEQ ID NO: 25340 - DNA, 20 bp, Artificial Sequence
  Antisense compound
gaacagtacttgcaggagaa

SEQ ID NO: 25341 - DNA, 20 bp, Artificial Sequence
  Antisense compound
tgaacagtacttgcaggaga

SEQ ID NO: 25342 - DNA, 20 bp, Artificial Sequence
  Antisense compound
atgaacagtacttgcaggag

SEQ ID NO: 25343 - DNA, 20 bp, Artificial Sequence
  Antisense compound
catgaacagtacttgcagga

SEQ ID NO: 25344 - DNA, 20 bp, Artificial Sequence
  Antisense compound
gcatgaacagtacttgcagg

SEQ ID NO: 25345 - DNA, 20 bp, Artificial Sequence
  Antisense compound
agcatgaacagtacttgcag

SEQ ID NO: 25346 - DNA, 20 bp, Artificial Sequence
  Antisense compound
tagcatgaacagtacttgca

SEQ ID NO: 25347 - DNA, 20 bp, Artificial Sequence
  Antisense compound
gtagcatgaacagtacttgc

SEQ ID NO: 25348 - DNA, 20 bp, Artificial Sequence
  Antisense compound
tgtagcatgaacagtacttg

SEQ ID NO: 25349 - DNA, 20 bp, Artificial Sequence
  Antisense compound
ctgtagcatgaacagtactt

SEQ ID NO: 25350 - DNA, 20 bp, Artificial Sequence
  Antisense compound
gctgtagcatgaacagtact

SEQ ID NO: 25351 - DNA, 20 bp, Artificial Sequence
  Antisense compound
tgctgtagcatgaacagtac

SEQ ID NO: 25352 - DNA, 20 bp, Artificial Sequence
  Antisense compound
ttgctgtagcatgaacagta

SEQ ID NO: 25353 - DNA, 20 bp, Artificial Sequence
  Antisense compound
gttgctgtagcatgaacagt

SEQ ID NO: 25354 - DNA, 20 bp, Artificial Sequence
  Antisense compound
cgttgctgtagcatgaacag

SEQ ID NO: 25355 - DNA, 20 bp, Artificial Sequence
  Antisense compound
tcgttgctgtagcatgaaca

SEQ ID NO: 25356 - DNA, 20 bp, Artificial Sequence
  Antisense compound
atcgttgctgtagcatgaac

SEQ ID NO: 25357 - DNA, 20 bp, Artificial Sequence
  Antisense compound
tatcgttgctgtagcatgaa

SEQ ID NO: 25358 - DNA, 20 bp, Artificial Sequence
  Antisense compound
gtatcgttgctgtagcatga

SEQ ID NO: 25359 - DNA, 20 bp, Artificial Sequence
  Antisense compound
ggtatcgttgctgtagcatg

SEQ ID NO: 25360 - DNA, 20 bp, Artificial Sequence
  Antisense compound
cggtatcgttgctgtagcat

SEQ ID NO: 25361 - DNA, 20 bp, Artificial Sequence
  Antisense compound
gcggtatcgttgctgtagca

SEQ ID NO: 25362 - DNA, 20 bp, Artificial Sequence
  Antisense compound
agcggtatcgttgctgtagc

SEQ ID NO: 25363 - DNA, 20 bp, Artificial Sequence
  Antisense compound
tagcggtatcgttgctgtag

SEQ ID NO: 25364 - DNA, 20 bp, Artificial Sequence
  Antisense compound
gtagcggtatcgttgctgta

SEQ ID NO: 25365 - DNA, 20 bp, Artificial Sequence
  Antisense compound
tgtagcggtatcgttgctgt

SEQ ID NO: 25366 - DNA, 20 bp, Artificial Sequence
  Antisense compound
ttgtagcggtatcgttgctg

SEQ ID NO: 25367 - DNA, 20 bp, Artificial Sequence
  Antisense compound
cttgtagcggtatcgttgct

SEQ ID NO: 25368 - DNA, 20 bp, Artificial Sequence
  Antisense compound
gcttgtagcggtatcgttgc

SEQ ID NO: 25369 - DNA, 20 bp, Artificial Sequence
  Antisense compound
ggcttgtagcggtatcgttg

SEQ ID NO: 25370 - DNA, 20 bp, Artificial Sequence
  Antisense compound
aggcttgtagcggtatcgtt

SEQ ID NO: 25371 - DNA, 20 bp, Artificial Sequence
  Antisense compound
gaggcttgtagcggtatcgt

SEQ ID NO: 25372 - DNA, 20 bp, Artificial Sequence
  Antisense compound
tgaggcttgtagcggtatcg

SEQ ID NO: 25373 - DNA, 20 bp, Artificial Sequence
  Antisense compound
gtgaggcttgtagcggtatc

SEQ ID NO: 25374 - DNA, 20 bp, Artificial Sequence
  Antisense compound
agtgaggcttgtagcggtat

SEQ ID NO: 25375 - DNA, 20 bp, Artificial Sequence
  Antisense compound
gagtgaggcttgtagcggta

SEQ ID NO: 25376 - DNA, 20 bp, Artificial Sequence
  Antisense compound
ggagtgaggcttgtagcggt

SEQ ID NO: 25377 - DNA, 20 bp, Artificial Sequence
  Antisense compound
gggagtgaggcttgtagcgg

SEQ ID NO: 25378 - DNA, 20 bp, Artificial Sequence
  Antisense compound
agggagtgaggcttgtagcg

SEQ ID NO: 25379 - DNA, 20 bp, Artificial Sequence
  Antisense compound
aagggagtgaggcttgtagc

SEQ ID NO: 25380 - DNA, 20 bp, Artificial Sequence
  Antisense compound
aaagggagtgaggcttgtag

SEQ ID NO: 25381 - DNA, 20 bp, Artificial Sequence
  Antisense compound
gaaagggagtgaggcttgta

SEQ ID NO: 25382 - DNA, 20 bp, Artificial Sequence
  Antisense compound
cgaaagggagtgaggcttgt

SEQ ID NO: 25383 - DNA, 20 bp, Artificial Sequence
  Antisense compound
ccgaaagggagtgaggcttg

SEQ ID NO: 25384 - DNA, 20 bp, Artificial Sequence
  Antisense compound
tccgaaagggagtgaggctt

SEQ ID NO: 25385 - DNA, 20 bp, Artificial Sequence
  Antisense compound
atccgaaagggagtgaggct

SEQ ID NO: 25386 - DNA, 20 bp, Artificial Sequence
  Antisense compound
catccgaaagggagtgaggc

SEQ ID NO: 25387 - DNA, 20 bp, Artificial Sequence
  Antisense compound
ccatccgaaagggagtgagg

SEQ ID NO: 25388 - DNA, 20 bp, Artificial Sequence
  Antisense compound
gccatccgaaagggagtgag

SEQ ID NO: 25389 - DNA, 20 bp, Artificial Sequence
  Antisense compound
agccatccgaaagggagtga

SEQ ID NO: 25390 - DNA, 20 bp, Artificial Sequence
  Antisense compound
aagccatccgaaagggagtg

SEQ ID NO: 25391 - DNA, 20 bp, Artificial Sequence
  Antisense compound
caagccatccgaaagggagt

SEQ ID NO: 25392 - DNA, 20 bp, Artificial Sequence
  Antisense compound
acaagccatccgaaagggag

SEQ ID NO: 25393 - DNA, 20 bp, Artificial Sequence
  Antisense compound
aacaagccatccgaaaggga

SEQ ID NO: 25394 - DNA, 20 bp, Artificial Sequence
  Antisense compound
taacaagccatccgaaaggg

SEQ ID NO: 25395 - DNA, 20 bp, Artificial Sequence
  Antisense compound
ataacaagccatccgaaagg

SEQ ID NO: 25396 - DNA, 20 bp, Artificial Sequence
  Antisense compound
aataacaagccatccgaaag

SEQ ID NO: 25397 - DNA, 20 bp, Artificial Sequence
  Antisense compound
caataacaagccatccgaaa

SEQ ID NO: 25398 - DNA, 20 bp, Artificial Sequence
  Antisense compound
ccaataacaagccatccgaa

SEQ ID NO: 25399 - DNA, 20 bp, Artificial Sequence
  Antisense compound
gccaataacaagccatccga

SEQ ID NO: 25400 - DNA, 20 bp, Artificial Sequence
  Antisense compound
cgccaataacaagccatccg

SEQ ID NO: 25401 - DNA, 20 bp, Artificial Sequence
  Antisense compound
acgccaataacaagccatcc

SEQ ID NO: 25402 - DNA, 20 bp, Artificial Sequence
  Antisense compound
aacgccaataacaagccatc

SEQ ID NO: 25403 - DNA, 20 bp, Artificial Sequence
  Antisense compound
caacgccaataacaagccat

SEQ ID NO: 25404 - DNA, 20 bp, Artificial Sequence
  Antisense compound
gcaacgccaataacaagcca

SEQ ID NO: 25405 - DNA, 20 bp, Artificial Sequence
  Antisense compound
tgcaacgccaataacaagcc

SEQ ID NO: 25406 - DNA, 20 bp, Artificial Sequence
  Antisense compound
atgcaacgccaataacaagc

SEQ ID NO: 25407 - DNA, 20 bp, Artificial Sequence
  Antisense compound
aatgcaacgccaataacaag

SEQ ID NO: 25408 - DNA, 20 bp, Artificial Sequence
  Antisense compound
aaatgcaacgccaataacaa

SEQ ID NO: 25409 - DNA, 20 bp, Artificial Sequence
  Antisense compound
gaaatgcaacgccaataaca

SEQ ID NO: 25410 - DNA, 20 bp, Artificial Sequence
  Antisense compound
agaaatgcaacgccaataac

SEQ ID NO: 25411 - DNA, 20 bp, Artificial Sequence
  Antisense compound
aagaaatgcaacgccaataa

SEQ ID NO: 25412 - DNA, 20 bp, Artificial Sequence
  Antisense compound
caagaaatgcaacgccaata

SEQ ID NO: 25413 - DNA, 20 bp, Artificial Sequence
  Antisense compound
gcaagaaatgcaacgccaat

SEQ ID NO: 25414 - DNA, 20 bp, Artificial Sequence
  Antisense compound
agcaagaaatgcaacgccaa

SEQ ID NO: 25415 - DNA, 20 bp, Artificial Sequence
  Antisense compound
cagcaagaaatgcaacgcca

SEQ ID NO: 25416 - DNA, 20 bp, Artificial Sequence
  Antisense compound
acagcaagaaatgcaacgcc

SEQ ID NO: 25417 - DNA, 20 bp, Artificial Sequence
  Antisense compound
aacagcaagaaatgcaacgc

SEQ ID NO: 25418 - DNA, 20 bp, Artificial Sequence
  Antisense compound
aaacagcaagaaatgcaacg

SEQ ID NO: 25419 - DNA, 20 bp, Artificial Sequence
  Antisense compound
aaaacagcaagaaatgcaac

SEQ ID NO: 25420 - DNA, 20 bp, Artificial Sequence
  Antisense compound
aaaaacagcaagaaatgcaa

SEQ ID NO: 25421 - DNA, 20 bp, Artificial Sequence
  Antisense compound
gaaaaacagcaagaaatgca

SEQ ID NO: 25422 - DNA, 20 bp, Artificial Sequence
  Antisense compound
tgaaaaacagcaagaaatgc

SEQ ID NO: 25423 - DNA, 20 bp, Artificial Sequence
  Antisense compound
ctgaaaaacagcaagaaatg

SEQ ID NO: 25424 - DNA, 20 bp, Artificial Sequence
  Antisense compound
tctgaaaaacagcaagaaat

SEQ ID NO: 25425 - DNA, 20 bp, Artificial Sequence
  Antisense compound
ctctgaaaaacagcaagaaa

SEQ ID NO: 25426 - DNA, 20 bp, Artificial Sequence
  Antisense compound
gctctgaaaaacagcaagaa

SEQ ID NO: 25427 - DNA, 20 bp, Artificial Sequence
  Antisense compound
cgctctgaaaaacagcaaga

SEQ ID NO: 25428 - DNA, 20 bp, Artificial Sequence
  Antisense compound
gcgctctgaaaaacagcaag

SEQ ID NO: 25429 - DNA, 20 bp, Artificial Sequence
  Antisense compound
agcgctctgaaaaacagcaa

SEQ ID NO: 25430 - DNA, 20 bp, Artificial Sequence
  Antisense compound
tagcgctctgaaaaacagca

SEQ ID NO: 25431 - DNA, 20 bp, Artificial Sequence
  Antisense compound
gtagcgctctgaaaaacagc

SEQ ID NO: 25432 - DNA, 20 bp, Artificial Sequence
  Antisense compound
ggtagcgctctgaaaaacag

SEQ ID NO: 25433 - DNA, 20 bp, Artificial Sequence
  Antisense compound
tggtagcgctctgaaaaaca

SEQ ID NO: 25434 - DNA, 20 bp, Artificial Sequence
  Antisense compound
ttggtagcgctctgaaaaac

SEQ ID NO: 25435 - DNA, 20 bp, Artificial Sequence
  Antisense compound
tttggtagcgctctgaaaaa

SEQ ID NO: 25436 - DNA, 20 bp, Artificial Sequence
  Antisense compound
ttttggtagcgctctgaaaa

SEQ ID NO: 25437 - DNA, 20 bp, Artificial Sequence
  Antisense compound
attttggtagcgctctgaaa

SEQ ID NO: 25438 - DNA, 20 bp, Artificial Sequence
  Antisense compound
tattttggtagcgctctgaa

SEQ ID NO: 25439 - DNA, 20 bp, Artificial Sequence
  Antisense compound
ttattttggtagcgctctga

SEQ ID NO: 25440 - DNA, 20 bp, Artificial Sequence
  Antisense compound
attattttggtagcgctctg

SEQ ID NO: 25441 - DNA, 20 bp, Artificial Sequence
  Antisense compound
aattattttggtagcgctct

SEQ ID NO: 25442 - DNA, 20 bp, Artificial Sequence
  Antisense compound
caattattttggtagcgctc

SEQ ID NO: 25443 - DNA, 20 bp, Artificial Sequence
  Antisense compound
gcaattattttggtagcgct

SEQ ID NO: 25444 - DNA, 20 bp, Artificial Sequence
  Antisense compound
cgcaattattttggtagcgc

SEQ ID NO: 25445 - DNA, 20 bp, Artificial Sequence
  Antisense compound
gcgcaattattttggtagcg

SEQ ID NO: 25446 - DNA, 20 bp, Artificial Sequence
  Antisense compound
agcgcaattattttggtagc

SEQ ID NO: 25447 - DNA, 20 bp, Artificial Sequence
  Antisense compound
gagcgcaattattttggtag

SEQ ID NO: 25448 - DNA, 20 bp, Artificial Sequence
  Antisense compound
tgagcgcaattattttggta

SEQ ID NO: 25449 - DNA, 20 bp, Artificial Sequence
  Antisense compound
ttgagcgcaattattttggt

SEQ ID NO: 25450 - DNA, 20 bp, Artificial Sequence
  Antisense compound
attgagcgcaattattttgg

SEQ ID NO: 25451 - DNA, 20 bp, Artificial Sequence
  Antisense compound
tattgagcgcaattattttg

SEQ ID NO: 25452 - DNA, 20 bp, Artificial Sequence
  Antisense compound
ttattgagcgcaattatttt

SEQ ID NO: 25453 - DNA, 20 bp, Artificial Sequence
  Antisense compound
tttattgagcgcaattattt

SEQ ID NO: 25454 - DNA, 20 bp, Artificial Sequence
  Antisense compound
ttttattgagcgcaattatt

SEQ ID NO: 25455 - DNA, 20 bp, Artificial Sequence
  Antisense compound
cttttattgagcgcaattat

SEQ ID NO: 25456 - DNA, 20 bp, Artificial Sequence
  Antisense compound
tcttttattgagcgcaatta

SEQ ID NO: 25457 - DNA, 20 bp, Artificial Sequence
  Antisense compound
atcttttattgagcgcaatt

SEQ ID NO: 25458 - DNA, 20 bp, Artificial Sequence
  Antisense compound
catcttttattgagcgcaat

SEQ ID NO: 25459 - DNA, 20 bp, Artificial Sequence
  Antisense compound
ccatcttttattgagcgcaa

SEQ ID NO: 25460 - DNA, 20 bp, Artificial Sequence
  Antisense compound
gccatcttttattgagcgca

SEQ ID NO: 25461 - DNA, 20 bp, Artificial Sequence
  Antisense compound
tgccatcttttattgagcgc

SEQ ID NO: 25462 - DNA, 20 bp, Artificial Sequence
  Antisense compound
ctgccatcttttattgagcg

SEQ ID NO: 25463 - DNA, 20 bp, Artificial Sequence
  Antisense compound
gctgccatcttttattgagc

SEQ ID NO: 25464 - DNA, 20 bp, Artificial Sequence
  Antisense compound
agctgccatcttttattgag

SEQ ID NO: 25465 - DNA, 20 bp, Artificial Sequence
  Antisense compound
tagctgccatcttttattga

SEQ ID NO: 25466 - DNA, 20 bp, Artificial Sequence
  Antisense compound
ctagctgccatcttttattg

SEQ ID NO: 25467 - DNA, 20 bp, Artificial Sequence
  Antisense compound
gctagctgccatcttttatt

SEQ ID NO: 25468 - DNA, 20 bp, Artificial Sequence
  Antisense compound
ggctagctgccatcttttat

SEQ ID NO: 25469 - DNA, 20 bp, Artificial Sequence
  Antisense compound
gggctagctgccatctttta

SEQ ID NO: 25470 - DNA, 20 bp, Artificial Sequence
  Antisense compound
agggctagctgccatctttt

SEQ ID NO: 25471 - DNA, 20 bp, Artificial Sequence
  Antisense compound
aagggctagctgccatcttt

SEQ ID NO: 25472 - DNA, 20 bp, Artificial Sequence
  Antisense compound
aaagggctagctgccatctt

SEQ ID NO: 25473 - DNA, 20 bp, Artificial Sequence
  Antisense compound
taaagggctagctgccatct

SEQ ID NO: 25474 - DNA, 20 bp, Artificial Sequence
  Antisense compound
ataaagggctagctgccatc

SEQ ID NO: 25475 - DNA, 20 bp, Artificial Sequence
  Antisense compound
tataaagggctagctgccat

SEQ ID NO: 25476 - DNA, 20 bp, Artificial Sequence
  Antisense compound
ttataaagggctagctgcca

SEQ ID NO: 25477 - DNA, 20 bp, Artificial Sequence
  Antisense compound
cttataaagggctagctgcc

SEQ ID NO: 25478 - DNA, 20 bp, Artificial Sequence
  Antisense compound
ccttataaagggctagctgc

SEQ ID NO: 25479 - DNA, 20 bp, Artificial Sequence
  Antisense compound
cccttataaagggctagctg

SEQ ID NO: 25480 - DNA, 20 bp, Artificial Sequence
  Antisense compound
gcccttataaagggctagct

SEQ ID NO: 25481 - DNA, 20 bp, Artificial Sequence
  Antisense compound
agcccttataaagggctagc

SEQ ID NO: 25482 - DNA, 20 bp, Artificial Sequence
  Antisense compound
aagcccttataaagggctag

SEQ ID NO: 25483 - DNA, 20 bp, Artificial Sequence
  Antisense compound
gaagcccttataaagggcta

SEQ ID NO: 25484 - DNA, 20 bp, Artificial Sequence
  Antisense compound
ggaagcccttataaagggct

SEQ ID NO: 25485 - DNA, 20 bp, Artificial Sequence
  Antisense compound
tggaagcccttataaagggc

SEQ ID NO: 25486 - DNA, 20 bp, Artificial Sequence
  Antisense compound
ctggaagcccttataaaggg

SEQ ID NO: 25487 - DNA, 20 bp, Artificial Sequence
  Antisense compound
actggaagcccttataaagg

SEQ ID NO: 25488 - DNA, 20 bp, Artificial Sequence
  Antisense compound
aactggaagcccttataaag

SEQ ID NO: 25489 - DNA, 20 bp, Artificial Sequence
  Antisense compound
gaactggaagcccttataaa

SEQ ID NO: 25490 - DNA, 20 bp, Artificial Sequence
  Antisense compound
tgaactggaagcccttataa

SEQ ID NO: 25491 - DNA, 20 bp, Artificial Sequence
  Antisense compound
atgaactggaagcccttata

SEQ ID NO: 25492 - DNA, 20 bp, Artificial Sequence
  Antisense compound
aatgaactggaagcccttat

SEQ ID NO: 25493 - DNA, 20 bp, Artificial Sequence
  Antisense compound
aaatgaactggaagccctta

SEQ ID NO: 25494 - DNA, 20 bp, Artificial Sequence
  Antisense compound
caaatgaactggaagccctt

SEQ ID NO: 25495 - DNA, 20 bp, Artificial Sequence
  Antisense compound
gcaaatgaactggaagccct

SEQ ID NO: 25496 - DNA, 20 bp, Artificial Sequence
  Antisense compound
tgcaaatgaactggaagccc

SEQ ID NO: 25497 - DNA, 20 bp, Artificial Sequence
  Antisense compound
ttgcaaatgaactggaagcc

SEQ ID NO: 25498 - DNA, 20 bp, Artificial Sequence
  Antisense compound
attgcaaatgaactggaagc

SEQ ID NO: 25499 - DNA, 20 bp, Artificial Sequence
  Antisense compound
aattgcaaatgaactggaag

SEQ ID NO: 25500 - DNA, 20 bp, Artificial Sequence
  Antisense compound
aaattgcaaatgaactggaa

SEQ ID NO: 25501 - DNA, 20 bp, Artificial Sequence
  Antisense compound
taaattgcaaatgaactgga

SEQ ID NO: 25502 - DNA, 20 bp, Artificial Sequence
  Antisense compound
gtaaattgcaaatgaactgg

SEQ ID NO: 25503 - DNA, 20 bp, Artificial Sequence
  Antisense compound
agtaaattgcaaatgaactg

SEQ ID NO: 25504 - DNA, 20 bp, Artificial Sequence
  Antisense compound
cagtaaattgcaaatgaact

SEQ ID NO: 25505 - DNA, 20 bp, Artificial Sequence
  Antisense compound
gcagtaaattgcaaatgaac

SEQ ID NO: 25506 - DNA, 20 bp, Artificial Sequence
  Antisense compound
agcagtaaattgcaaatgaa

SEQ ID NO: 25507 - DNA, 20 bp, Artificial Sequence
  Antisense compound
cagcagtaaattgcaaatga

SEQ ID NO: 25508 - DNA, 20 bp, Artificial Sequence
  Antisense compound
gcagcagtaaattgcaaatg

SEQ ID NO: 25509 - DNA, 20 bp, Artificial Sequence
  Antisense compound
agcagcagtaaattgcaaat

SEQ ID NO: 25510 - DNA, 20 bp, Artificial Sequence
  Antisense compound
tagcagcagtaaattgcaaa

SEQ ID NO: 25511 - DNA, 20 bp, Artificial Sequence
  Antisense compound
atagcagcagtaaattgcaa

SEQ ID NO: 25512 - DNA, 20 bp, Artificial Sequence
  Antisense compound
aatagcagcagtaaattgca

SEQ ID NO: 25513 - DNA, 20 bp, Artificial Sequence
  Antisense compound
aaatagcagcagtaaattgc

SEQ ID NO: 25514 - DNA, 20 bp, Artificial Sequence
  Antisense compound
caaatagcagcagtaaattg

SEQ ID NO: 25515 - DNA, 20 bp, Artificial Sequence
  Antisense compound
acaaatagcagcagtaaatt

SEQ ID NO: 25516 - DNA, 20 bp, Artificial Sequence
  Antisense compound
aacaaatagcagcagtaaat

SEQ ID NO: 25517 - DNA, 20 bp, Artificial Sequence
  Antisense compound
taacaaatagcagcagtaaa

SEQ ID NO: 25518 - DNA, 20 bp, Artificial Sequence
  Antisense compound
gtaacaaatagcagcagtaa

SEQ ID NO: 25519 - DNA, 20 bp, Artificial Sequence
  Antisense compound
ggtaacaaatagcagcagta

SEQ ID NO: 25520 - DNA, 20 bp, Artificial Sequence
  Antisense compound
tggtaacaaatagcagcagt

SEQ ID NO: 25521 - DNA, 20 bp, Artificial Sequence
  Antisense compound
atggtaacaaatagcagcag

SEQ ID NO: 25522 - DNA, 20 bp, Artificial Sequence
  Antisense compound
gatggtaacaaatagcagca

SEQ ID NO: 25523 - DNA, 20 bp, Artificial Sequence
  Antisense compound
agatggtaacaaatagcagc

SEQ ID NO: 25524 - DNA, 20 bp, Artificial Sequence
  Antisense compound
tagatggtaacaaatagcag

SEQ ID NO: 25525 - DNA, 20 bp, Artificial Sequence
  Antisense compound
atagatggtaacaaatagca

SEQ ID NO: 25526 - DNA, 20 bp, Artificial Sequence
  Antisense compound
aatagatggtaacaaatagc

SEQ ID NO: 25527 - DNA, 20 bp, Artificial Sequence
  Antisense compound
gaatagatggtaacaaatag

SEQ ID NO: 25528 - DNA, 20 bp, Artificial Sequence
  Antisense compound
tgaatagatggtaacaaata

SEQ ID NO: 25529 - DNA, 20 bp, Artificial Sequence
  Antisense compound
gtgaatagatggtaacaaat

SEQ ID NO: 25530 - DNA, 20 bp, Artificial Sequence
  Antisense compound
tgtgaatagatggtaacaaa

SEQ ID NO: 25531 - DNA, 20 bp, Artificial Sequence
  Antisense compound
atgtgaatagatggtaacaa

SEQ ID NO: 25532 - DNA, 20 bp, Artificial Sequence
  Antisense compound
gatgtgaatagatggtaaca

SEQ ID NO: 25533 - DNA, 20 bp, Artificial Sequence
  Antisense compound
agatgtgaatagatggtaac

SEQ ID NO: 25534 - DNA, 20 bp, Artificial Sequence
  Antisense compound
aagatgtgaatagatggtaa

SEQ ID NO: 25535 - DNA, 20 bp, Artificial Sequence
  Antisense compound
aaagatgtgaatagatggta

SEQ ID NO: 25536 - DNA, 20 bp, Artificial Sequence
  Antisense compound
aaaagatgtgaatagatggt

SEQ ID NO: 25537 - DNA, 20 bp, Artificial Sequence
  Antisense compound
caaaagatgtgaatagatgg

SEQ ID NO: 25538 - DNA, 20 bp, Artificial Sequence
  Antisense compound
gcaaaagatgtgaatagatg

SEQ ID NO: 25539 - DNA, 20 bp, Artificial Sequence
  Antisense compound
agcaaaagatgtgaatagat

SEQ ID NO: 25540 - DNA, 20 bp, Artificial Sequence
  Antisense compound
aagcaaaagatgtgaataga

SEQ ID NO: 25541 - DNA, 20 bp, Artificial Sequence
  Antisense compound
caagcaaaagatgtgaatag

SEQ ID NO: 25542 - DNA, 20 bp, Artificial Sequence
  Antisense compound
acaagcaaaagatgtgaata

SEQ ID NO: 25543 - DNA, 20 bp, Artificial Sequence
  Antisense compound
gacaagcaaaagatgtgaat

SEQ ID NO: 25544 - DNA, 20 bp, Artificial Sequence
  Antisense compound
cgacaagcaaaagatgtgaa

SEQ ID NO: 25545 - DNA, 20 bp, Artificial Sequence
  Antisense compound
gcgacaagcaaaagatgtga

SEQ ID NO: 25546 - DNA, 20 bp, Artificial Sequence
  Antisense compound
agcgacaagcaaaagatgtg

SEQ ID NO: 25547 - DNA, 20 bp, Artificial Sequence
  Antisense compound
cagcgacaagcaaaagatgt

SEQ ID NO: 25548 - DNA, 20 bp, Artificial Sequence
  Antisense compound
gcagcgacaagcaaaagatg

SEQ ID NO: 25549 - DNA, 20 bp, Artificial Sequence
  Antisense compound
tgcagcgacaagcaaaagat

SEQ ID NO: 25550 - DNA, 20 bp, Artificial Sequence
  Antisense compound
ctgcagcgacaagcaaaaga

SEQ ID NO: 25551 - DNA, 20 bp, Artificial Sequence
  Antisense compound
cctgcagcgacaagcaaaag

SEQ ID NO: 25552 - DNA, 20 bp, Artificial Sequence
  Antisense compound
acctgcagcgacaagcaaaa

SEQ ID NO: 25553 - DNA, 20 bp, Artificial Sequence
  Antisense compound
tacctgcagcgacaagcaaa

SEQ ID NO: 25554 - DNA, 20 bp, Artificial Sequence
  Antisense compound
atacctgcagcgacaagcaa

SEQ ID NO: 25555 - DNA, 20 bp, Artificial Sequence
  Antisense compound
catacctgcagcgacaagca

SEQ ID NO: 25556 - DNA, 20 bp, Artificial Sequence
  Antisense compound
ccatacctgcagcgacaagc

SEQ ID NO: 25557 - DNA, 20 bp, Artificial Sequence
  Antisense compound
tccatacctgcagcgacaag

SEQ ID NO: 25558 - DNA, 20 bp, Artificial Sequence
  Antisense compound
ctccatacctgcagcgacaa

SEQ ID NO: 25559 - DNA, 20 bp, Artificial Sequence
  Antisense compound
cctccatacctgcagcgaca

SEQ ID NO: 25560 - DNA, 20 bp, Artificial Sequence
  Antisense compound
gcctccatacctgcagcgac

SEQ ID NO: 25561 - DNA, 20 bp, Artificial Sequence
  Antisense compound
cgcctccatacctgcagcga

SEQ ID NO: 25562 - DNA, 20 bp, Artificial Sequence
  Antisense compound
gcgcctccatacctgcagcg

SEQ ID NO: 25563 - DNA, 20 bp, Artificial Sequence
  Antisense compound
tgcgcctccatacctgcagc

SEQ ID NO: 25564 - DNA, 20 bp, Artificial Sequence
  Antisense compound
ttgcgcctccatacctgcag

SEQ ID NO: 25565 - DNA, 20 bp, Artificial Sequence
  Antisense compound
attgcgcctccatacctgca

SEQ ID NO: 25566 - DNA, 20 bp, Artificial Sequence
  Antisense compound
aattgcgcctccatacctgc

SEQ ID NO: 25567 - DNA, 20 bp, Artificial Sequence
  Antisense compound
aaattgcgcctccatacctg

SEQ ID NO: 25568 - DNA, 20 bp, Artificial Sequence
  Antisense compound
aaaattgcgcctccatacct

SEQ ID NO: 25569 - DNA, 20 bp, Artificial Sequence
  Antisense compound
aaaaattgcgcctccatacc

SEQ ID NO: 25570 - DNA, 20 bp, Artificial Sequence
  Antisense compound
caaaaattgcgcctccatac

SEQ ID NO: 25571 - DNA, 20 bp, Artificial Sequence
  Antisense compound
acaaaaattgcgcctccata

SEQ ID NO: 25572 - DNA, 20 bp, Artificial Sequence
  Antisense compound
tacaaaaattgcgcctccat

SEQ ID NO: 25573 - DNA, 20 bp, Artificial Sequence
  Antisense compound
gtacaaaaattgcgcctcca

SEQ ID NO: 25574 - DNA, 20 bp, Artificial Sequence
  Antisense compound
ggtacaaaaattgcgcctcc

SEQ ID NO: 25575 - DNA, 20 bp, Artificial Sequence
  Antisense compound
aggtacaaaaattgcgcctc

SEQ ID NO: 25576 - DNA, 20 bp, Artificial Sequence
  Antisense compound
gaggtacaaaaattgcgcct

SEQ ID NO: 25577 - DNA, 20 bp, Artificial Sequence
  Antisense compound
agaggtacaaaaattgcgcc

SEQ ID NO: 25578 - DNA, 20 bp, Artificial Sequence
  Antisense compound
tagaggtacaaaaattgcgc

SEQ ID NO: 25579 - DNA, 20 bp, Artificial Sequence
  Antisense compound
atagaggtacaaaaattgcg

SEQ ID NO: 25580 - DNA, 20 bp, Artificial Sequence
  Antisense compound
catagaggtacaaaaattgc

SEQ ID NO: 25581 - DNA, 20 bp, Artificial Sequence
  Antisense compound
gcatagaggtacaaaaattg

SEQ ID NO: 25582 - DNA, 20 bp, Artificial Sequence
  Antisense compound
ggcatagaggtacaaaaatt

SEQ ID NO: 25583 - DNA, 20 bp, Artificial Sequence
  Antisense compound
aggcatagaggtacaaaaat

SEQ ID NO: 25584 - DNA, 20 bp, Artificial Sequence
  Antisense compound
aaggcatagaggtacaaaaa

SEQ ID NO: 25585 - DNA, 20 bp, Artificial Sequence
  Antisense compound
caaggcatagaggtacaaaa

SEQ ID NO: 25586 - DNA, 20 bp, Artificial Sequence
  Antisense compound
tcaaggcatagaggtacaaa

SEQ ID NO: 25587 - DNA, 20 bp, Artificial Sequence
  Antisense compound
atcaaggcatagaggtacaa

SEQ ID NO: 25588 - DNA, 20 bp, Artificial Sequence
  Antisense compound
tatcaaggcatagaggtaca

SEQ ID NO: 25589 - DNA, 20 bp, Artificial Sequence
  Antisense compound
atatcaaggcatagaggtac

SEQ ID NO: 25590 - DNA, 20 bp, Artificial Sequence
  Antisense compound
tatatcaaggcatagaggta

SEQ ID NO: 25591 - DNA, 20 bp, Artificial Sequence
  Antisense compound
atatatcaaggcatagaggt

SEQ ID NO: 25592 - DNA, 20 bp, Artificial Sequence
  Antisense compound
aatatatcaaggcatagagg

SEQ ID NO: 25593 - DNA, 20 bp, Artificial Sequence
  Antisense compound
aaatatatcaaggcatagag

SEQ ID NO: 25594 - DNA, 20 bp, Artificial Sequence
  Antisense compound
aaaatatatcaaggcataga

SEQ ID NO: 25595 - DNA, 20 bp, Artificial Sequence
  Antisense compound
gaaaatatatcaaggcatag

SEQ ID NO: 25596 - DNA, 20 bp, Artificial Sequence
  Antisense compound
agaaaatatatcaaggcata

SEQ ID NO: 25597 - DNA, 20 bp, Artificial Sequence
  Antisense compound
tagaaaatatatcaaggcat

SEQ ID NO: 25598 - DNA, 20 bp, Artificial Sequence
  Antisense compound
gtagaaaatatatcaaggca

SEQ ID NO: 25599 - DNA, 20 bp, Artificial Sequence
  Antisense compound
tgtagaaaatatatcaaggc

SEQ ID NO: 25600 - DNA, 20 bp, Artificial Sequence
  Antisense compound
ttgtagaaaatatatcaagg

SEQ ID NO: 25601 - DNA, 20 bp, Artificial Sequence
  Antisense compound
attgtagaaaatatatcaag

SEQ ID NO: 25602 - DNA, 20 bp, Artificial Sequence
  Antisense compound
cattgtagaaaatatatcaa

SEQ ID NO: 25603 - DNA, 20 bp, Artificial Sequence
  Antisense compound
gcattgtagaaaatatatca

SEQ ID NO: 25604 - DNA, 20 bp, Artificial Sequence
  Antisense compound
tgcattgtagaaaatatatc

SEQ ID NO: 25605 - DNA, 20 bp, Artificial Sequence
  Antisense compound
atgcattgtagaaaatatat

SEQ ID NO: 25606 - DNA, 20 bp, Artificial Sequence
  Antisense compound
gatgcattgtagaaaatata

SEQ ID NO: 25607 - DNA, 20 bp, Artificial Sequence
  Antisense compound
tgatgcattgtagaaaatat

SEQ ID NO: 25608 - DNA, 20 bp, Artificial Sequence
  Antisense compound
ttgatgcattgtagaaaata

SEQ ID NO: 25609 - DNA, 20 bp, Artificial Sequence
  Antisense compound
gttgatgcattgtagaaaat

SEQ ID NO: 25610 - DNA, 20 bp, Artificial Sequence
  Antisense compound
cgttgatgcattgtagaaaa

SEQ ID NO: 25611 - DNA, 20 bp, Artificial Sequence
  Antisense compound
gcgttgatgcattgtagaaa

SEQ ID NO: 25612 - DNA, 20 bp, Artificial Sequence
  Antisense compound
tgcgttgatgcattgtagaa

SEQ ID NO: 25613 - DNA, 20 bp, Artificial Sequence
  Antisense compound
atgcgttgatgcattgtaga

SEQ ID NO: 25614 - DNA, 20 bp, Artificial Sequence
  Antisense compound
catgcgttgatgcattgtag

SEQ ID NO: 25615 - DNA, 20 bp, Artificial Sequence
  Antisense compound
acatgcgttgatgcattgta

SEQ ID NO: 25616 - DNA, 20 bp, Artificial Sequence
  Antisense compound
tacatgcgttgatgcattgt

SEQ ID NO: 25617 - DNA, 20 bp, Artificial Sequence
  Antisense compound
ctacatgcgttgatgcattg

SEQ ID NO: 25618 - DNA, 20 bp, Artificial Sequence
  Antisense compound
tctacatgcgttgatgcatt

SEQ ID NO: 25619 - DNA, 20 bp, Artificial Sequence
  Antisense compound
ttctacatgcgttgatgcat

SEQ ID NO: 25620 - DNA, 20 bp, Artificial Sequence
  Antisense compound
attctacatgcgttgatgca

SEQ ID NO: 25621 - DNA, 20 bp, Artificial Sequence
  Antisense compound
aattctacatgcgttgatgc

SEQ ID NO: 25622 - DNA, 20 bp, Artificial Sequence
  Antisense compound
taattctacatgcgttgatg

SEQ ID NO: 25623 - DNA, 20 bp, Artificial Sequence
  Antisense compound
ataattctacatgcgttgat

SEQ ID NO: 25624 - DNA, 20 bp, Artificial Sequence
  Antisense compound
aataattctacatgcgttga

SEQ ID NO: 25625 - DNA, 20 bp, Artificial Sequence
  Antisense compound
taataattctacatgcgttg

SEQ ID NO: 25626 - DNA, 20 bp, Artificial Sequence
  Antisense compound
ataataattctacatgcgtt

SEQ ID NO: 25627 - DNA, 20 bp, Artificial Sequence
  Antisense compound
cataataattctacatgcgt

SEQ ID NO: 25628 - DNA, 20 bp, Artificial Sequence
  Antisense compound
tcataataattctacatgcg

SEQ ID NO: 25629 - DNA, 20 bp, Artificial Sequence
  Antisense compound
ctcataataattctacatgc

SEQ ID NO: 25630 - DNA, 20 bp, Artificial Sequence
  Antisense compound
tctcataataattctacatg

SEQ ID NO: 25631 - DNA, 20 bp, Artificial Sequence
  Antisense compound
atctcataataattctacat

SEQ ID NO: 25632 - DNA, 20 bp, Artificial Sequence
  Antisense compound
catctcataataattctaca

SEQ ID NO: 25633 - DNA, 20 bp, Artificial Sequence
  Antisense compound
acatctcataataattctac

SEQ ID NO: 25634 - DNA, 20 bp, Artificial Sequence
  Antisense compound
aacatctcataataattcta

SEQ ID NO: 25635 - DNA, 20 bp, Artificial Sequence
  Antisense compound
caacatctcataataattct

SEQ ID NO: 25636 - DNA, 20 bp, Artificial Sequence
  Antisense compound
ccaacatctcataataattc

SEQ ID NO: 25637 - DNA, 20 bp, Artificial Sequence
  Antisense compound
gccaacatctcataataatt

SEQ ID NO: 25638 - DNA, 20 bp, Artificial Sequence
  Antisense compound
agccaacatctcataataat

SEQ ID NO: 25639 - DNA, 20 bp, Artificial Sequence
  Antisense compound
aagccaacatctcataataa

SEQ ID NO: 25640 - DNA, 20 bp, Artificial Sequence
  Antisense compound
aaagccaacatctcataata

SEQ ID NO: 25641 - DNA, 20 bp, Artificial Sequence
  Antisense compound
caaagccaacatctcataat

SEQ ID NO: 25642 - DNA, 20 bp, Artificial Sequence
  Antisense compound
acaaagccaacatctcataa

SEQ ID NO: 25643 - DNA, 20 bp, Artificial Sequence
  Antisense compound
aacaaagccaacatctcata

SEQ ID NO: 25644 - DNA, 20 bp, Artificial Sequence
  Antisense compound
caacaaagccaacatctcat

SEQ ID NO: 25645 - DNA, 20 bp, Artificial Sequence
  Antisense compound
ccaacaaagccaacatctca

SEQ ID NO: 25646 - DNA, 20 bp, Artificial Sequence
  Antisense compound
tccaacaaagccaacatctc

SEQ ID NO: 25647 - DNA, 20 bp, Artificial Sequence
  Antisense compound
ttccaacaaagccaacatct

SEQ ID NO: 25648 - DNA, 20 bp, Artificial Sequence
  Antisense compound
cttccaacaaagccaacatc

SEQ ID NO: 25649 - DNA, 20 bp, Artificial Sequence
  Antisense compound
acttccaacaaagccaacat

SEQ ID NO: 25650 - DNA, 20 bp, Artificial Sequence
  Antisense compound
cacttccaacaaagccaaca

SEQ ID NO: 25651 - DNA, 20 bp, Artificial Sequence
  Antisense compound
gcacttccaacaaagccaac

SEQ ID NO: 25652 - DNA, 20 bp, Artificial Sequence
  Antisense compound
tgcacttccaacaaagccaa

SEQ ID NO: 25653 - DNA, 20 bp, Artificial Sequence
  Antisense compound
ttgcacttccaacaaagcca

SEQ ID NO: 25654 - DNA, 20 bp, Artificial Sequence
  Antisense compound
tttgcacttccaacaaagcc

SEQ ID NO: 25655 - DNA, 20 bp, Artificial Sequence
  Antisense compound
atttgcacttccaacaaagc

SEQ ID NO: 25656 - DNA, 20 bp, Artificial Sequence
  Antisense compound
gatttgcacttccaacaaag

SEQ ID NO: 25657 - DNA, 20 bp, Artificial Sequence
  Antisense compound
ggatttgcacttccaacaaa

SEQ ID NO: 25658 - DNA, 20 bp, Artificial Sequence
  Antisense compound
tggatttgcacttccaacaa

SEQ ID NO: 25659 - DNA, 20 bp, Artificial Sequence
  Antisense compound
ttggatttgcacttccaaca

SEQ ID NO: 25660 - DNA, 20 bp, Artificial Sequence
  Antisense compound
cttggatttgcacttccaac

SEQ ID NO: 25661 - DNA, 20 bp, Artificial Sequence
  Antisense compound
tcttggatttgcacttccaa

SEQ ID NO: 25662 - DNA, 20 bp, Artificial Sequence
  Antisense compound
ttcttggatttgcacttcca

SEQ ID NO: 25663 - DNA, 20 bp, Artificial Sequence
  Antisense compound
gttcttggatttgcacttcc

SEQ ID NO: 25664 - DNA, 20 bp, Artificial Sequence
  Antisense compound
ggttcttggatttgcacttc

SEQ ID NO: 25665 - DNA, 20 bp, Artificial Sequence
  Antisense compound
gggttcttggatttgcactt

SEQ ID NO: 25666 - DNA, 20 bp, Artificial Sequence
  Antisense compound
tgggttcttggatttgcact

SEQ ID NO: 25667 - DNA, 20 bp, Artificial Sequence
  Antisense compound
atgggttcttggatttgcac

SEQ ID NO: 25668 - DNA, 20 bp, Artificial Sequence
  Antisense compound
aatgggttcttggatttgca

SEQ ID NO: 25669 - DNA, 20 bp, Artificial Sequence
  Antisense compound
taatgggttcttggatttgc

SEQ ID NO: 25670 - DNA, 20 bp, Artificial Sequence
  Antisense compound
gtaatgggttcttggatttg

SEQ ID NO: 25671 - DNA, 20 bp, Artificial Sequence
  Antisense compound
agtaatgggttcttggattt

SEQ ID NO: 25672 - DNA, 20 bp, Artificial Sequence
  Antisense compound
aagtaatgggttcttggatt

SEQ ID NO: 25673 - DNA, 20 bp, Artificial Sequence
  Antisense compound
aaagtaatgggttcttggat

SEQ ID NO: 25674 - DNA, 20 bp, Artificial Sequence
  Antisense compound
taaagtaatgggttcttgga

SEQ ID NO: 25675 - DNA, 20 bp, Artificial Sequence
  Antisense compound
ataaagtaatgggttcttgg

SEQ ID NO: 25676 - DNA, 20 bp, Artificial Sequence
  Antisense compound
cataaagtaatgggttcttg

SEQ ID NO: 25677 - DNA, 20 bp, Artificial Sequence
  Antisense compound
tcataaagtaatgggttctt

SEQ ID NO: 25678 - DNA, 20 bp, Artificial Sequence
  Antisense compound
atcataaagtaatgggttct

SEQ ID NO: 25679 - DNA, 20 bp, Artificial Sequence
  Antisense compound
catcataaagtaatgggttc

SEQ ID NO: 25680 - DNA, 20 bp, Artificial Sequence
  Antisense compound
gcatcataaagtaatgggtt

SEQ ID NO: 25681 - DNA, 20 bp, Artificial Sequence
  Antisense compound
ggcatcataaagtaatgggt

SEQ ID NO: 25682 - DNA, 20 bp, Artificial Sequence
  Antisense compound
tggcatcataaagtaatggg

SEQ ID NO: 25683 - DNA, 20 bp, Artificial Sequence
  Antisense compound
ttggcatcataaagtaatgg

SEQ ID NO: 25684 - DNA, 20 bp, Artificial Sequence
  Antisense compound
gttggcatcataaagtaatg

SEQ ID NO: 25685 - DNA, 20 bp, Artificial Sequence
  Antisense compound
agttggcatcataaagtaat

SEQ ID NO: 25686 - DNA, 20 bp, Artificial Sequence
  Antisense compound
tagttggcatcataaagtaa

SEQ ID NO: 25687 - DNA, 20 bp, Artificial Sequence
  Antisense compound
gtagttggcatcataaagta

SEQ ID NO: 25688 - DNA, 20 bp, Artificial Sequence
  Antisense compound
agtagttggcatcataaagt

SEQ ID NO: 25689 - DNA, 20 bp, Artificial Sequence
  Antisense compound
aagtagttggcatcataaag

SEQ ID NO: 25690 - DNA, 20 bp, Artificial Sequence
  Antisense compound
aaagtagttggcatcataaa

SEQ ID NO: 25691 - DNA, 20 bp, Artificial Sequence
  Antisense compound
caaagtagttggcatcataa

SEQ ID NO: 25692 - DNA, 20 bp, Artificial Sequence
  Antisense compound
acaaagtagttggcatcata

SEQ ID NO: 25693 - DNA, 20 bp, Artificial Sequence
  Antisense compound
aacaaagtagttggcatcat

SEQ ID NO: 25694 - DNA, 20 bp, Artificial Sequence
  Antisense compound
aaacaaagtagttggcatca

SEQ ID NO: 25695 - DNA, 20 bp, Artificial Sequence
  Antisense compound
caaacaaagtagttggcatc

SEQ ID NO: 25696 - DNA, 20 bp, Artificial Sequence
  Antisense compound
gcaaacaaagtagttggcat

SEQ ID NO: 25697 - DNA, 20 bp, Artificial Sequence
  Antisense compound
agcaaacaaagtagttggca

SEQ ID NO: 25698 - DNA, 20 bp, Artificial Sequence
  Antisense compound
cagcaaacaaagtagttggc

SEQ ID NO: 25699 - DNA, 20 bp, Artificial Sequence
  Antisense compound
ccagcaaacaaagtagttgg

SEQ ID NO: 25700 - DNA, 20 bp, Artificial Sequence
  Antisense compound
gccagcaaacaaagtagttg

SEQ ID NO: 25701 - DNA, 20 bp, Artificial Sequence
  Antisense compound
tgccagcaaacaaagtagtt

SEQ ID NO: 25702 - DNA, 20 bp, Artificial Sequence
  Antisense compound
gtgccagcaaacaaagtagt

SEQ ID NO: 25703 - DNA, 20 bp, Artificial Sequence
  Antisense compound
tgtgccagcaaacaaagtag

SEQ ID NO: 25704 - DNA, 20 bp, Artificial Sequence
  Antisense compound
gtgtgccagcaaacaaagta

SEQ ID NO: 25705 - DNA, 20 bp, Artificial Sequence
  Antisense compound
tgtgtgccagcaaacaaagt

SEQ ID NO: 25706 - DNA, 20 bp, Artificial Sequence
  Antisense compound
gtgtgtgccagcaaacaaag

SEQ ID NO: 25707 - DNA, 20 bp, Artificial Sequence
  Antisense compound
tgtgtgtgccagcaaacaaa

SEQ ID NO: 25708 - DNA, 20 bp, Artificial Sequence
  Antisense compound
atgtgtgtgccagcaaacaa

SEQ ID NO: 25709 - DNA, 20 bp, Artificial Sequence
  Antisense compound
tatgtgtgtgccagcaaaca

SEQ ID NO: 25710 - DNA, 20 bp, Artificial Sequence
  Antisense compound
ttatgtgtgtgccagcaaac

SEQ ID NO: 25711 - DNA, 20 bp, Artificial Sequence
  Antisense compound
gttatgtgtgtgccagcaaa

SEQ ID NO: 25712 - DNA, 20 bp, Artificial Sequence
  Antisense compound
agttatgtgtgtgccagcaa

SEQ ID NO: 25713 - DNA, 20 bp, Artificial Sequence
  Antisense compound
tagttatgtgtgtgccagca

SEQ ID NO: 25714 - DNA, 20 bp, Artificial Sequence
  Antisense compound
atagttatgtgtgtgccagc

SEQ ID NO: 25715 - DNA, 20 bp, Artificial Sequence
  Antisense compound
catagttatgtgtgtgccag

SEQ ID NO: 25716 - DNA, 20 bp, Artificial Sequence
  Antisense compound
tcatagttatgtgtgtgcca

SEQ ID NO: 25717 - DNA, 20 bp, Artificial Sequence
  Antisense compound
gtcatagttatgtgtgtgcc

SEQ ID NO: 25718 - DNA, 20 bp, Artificial Sequence
  Antisense compound
agtcatagttatgtgtgtgc

SEQ ID NO: 25719 - DNA, 20 bp, Artificial Sequence
  Antisense compound
tagtcatagttatgtgtgtg

SEQ ID NO: 25720 - DNA, 20 bp, Artificial Sequence
  Antisense compound
gtagtcatagttatgtgtgt

SEQ ID NO: 25721 - DNA, 20 bp, Artificial Sequence
  Antisense compound
agtagtcatagttatgtgtg

SEQ ID NO: 25722 - DNA, 20 bp, Artificial Sequence
  Antisense compound
cagtagtcatagttatgtgt

SEQ ID NO: 25723 - DNA, 20 bp, Artificial Sequence
  Antisense compound
acagtagtcatagttatgtg

SEQ ID NO: 25724 - DNA, 20 bp, Artificial Sequence
  Antisense compound
tacagtagtcatagttatgt

SEQ ID NO: 25725 - DNA, 20 bp, Artificial Sequence
  Antisense compound
atacagtagtcatagttatg

SEQ ID NO: 25726 - DNA, 20 bp, Artificial Sequence
  Antisense compound
tatacagtagtcatagttat

SEQ ID NO: 25727 - DNA, 20 bp, Artificial Sequence
  Antisense compound
gtatacagtagtcatagtta

SEQ ID NO: 25728 - DNA, 20 bp, Artificial Sequence
  Antisense compound
ggtatacagtagtcatagtt

SEQ ID NO: 25729 - DNA, 20 bp, Artificial Sequence
  Antisense compound
tggtatacagtagtcatagt

SEQ ID NO: 25730 - DNA, 20 bp, Artificial Sequence
  Antisense compound
atggtatacagtagtcatag

SEQ ID NO: 25731 - DNA, 20 bp, Artificial Sequence
  Antisense compound
tatggtatacagtagtcata

SEQ ID NO: 25732 - DNA, 20 bp, Artificial Sequence
  Antisense compound
atatggtatacagtagtcat

SEQ ID NO: 25733 - DNA, 20 bp, Artificial Sequence
  Antisense compound
tatatggtatacagtagtca

SEQ ID NO: 25734 - DNA, 20 bp, Artificial Sequence
  Antisense compound
ttatatggtatacagtagtc

SEQ ID NO: 25735 - DNA, 20 bp, Artificial Sequence
  Antisense compound
gttatatggtatacagtagt

SEQ ID NO: 25736 - DNA, 20 bp, Artificial Sequence
  Antisense compound
tgttatatggtatacagtag

SEQ ID NO: 25737 - DNA, 20 bp, Artificial Sequence
  Antisense compound
ctgttatatggtatacagta

SEQ ID NO: 25738 - DNA, 20 bp, Artificial Sequence
  Antisense compound
actgttatatggtatacagt

SEQ ID NO: 25739 - DNA, 20 bp, Artificial Sequence
  Antisense compound
cactgttatatggtatacag

SEQ ID NO: 25740 - DNA, 20 bp, Artificial Sequence
  Antisense compound
acactgttatatggtataca

SEQ ID NO: 25741 - DNA, 20 bp, Artificial Sequence
  Antisense compound
gacactgttatatggtatac

SEQ ID NO: 25742 - DNA, 20 bp, Artificial Sequence
  Antisense compound
tgacactgttatatggtata

SEQ ID NO: 25743 - DNA, 20 bp, Artificial Sequence
  Antisense compound
gtgacactgttatatggtat

SEQ ID NO: 25744 - DNA, 20 bp, Artificial Sequence
  Antisense compound
tgtgacactgttatatggta

SEQ ID NO: 25745 - DNA, 20 bp, Artificial Sequence
  Antisense compound
ctgtgacactgttatatggt

SEQ ID NO: 25746 - DNA, 20 bp, Artificial Sequence
  Antisense compound
tctgtgacactgttatatgg

SEQ ID NO: 25747 - DNA, 20 bp, Artificial Sequence
  Antisense compound
atctgtgacactgttatatg

SEQ ID NO: 25748 - DNA, 20 bp, Artificial Sequence
  Antisense compound
tatctgtgacactgttatat

SEQ ID NO: 25749 - DNA, 20 bp, Artificial Sequence
  Antisense compound
gtatctgtgacactgttata

SEQ ID NO: 25750 - DNA, 20 bp, Artificial Sequence
  Antisense compound
tgtatctgtgacactgttat

SEQ ID NO: 25751 - DNA, 20 bp, Artificial Sequence
  Antisense compound
ttgtatctgtgacactgtta

SEQ ID NO: 25752 - DNA, 20 bp, Artificial Sequence
  Antisense compound
attgtatctgtgacactgtt

SEQ ID NO: 25753 - DNA, 20 bp, Artificial Sequence
  Antisense compound
aattgtatctgtgacactgt

SEQ ID NO: 25754 - DNA, 20 bp, Artificial Sequence
  Antisense compound
caattgtatctgtgacactg

SEQ ID NO: 25755 - DNA, 20 bp, Artificial Sequence
  Antisense compound
acaattgtatctgtgacact

SEQ ID NO: 25756 - DNA, 20 bp, Artificial Sequence
  Antisense compound
gacaattgtatctgtgacac

SEQ ID NO: 25757 - DNA, 20 bp, Artificial Sequence
  Antisense compound
cgacaattgtatctgtgaca

SEQ ID NO: 25758 - DNA, 20 bp, Artificial Sequence
  Antisense compound
acgacaattgtatctgtgac

SEQ ID NO: 25759 - DNA, 20 bp, Artificial Sequence
  Antisense compound
aacgacaattgtatctgtga

SEQ ID NO: 25760 - DNA, 20 bp, Artificial Sequence
  Antisense compound
taacgacaattgtatctgtg

SEQ ID NO: 25761 - DNA, 20 bp, Artificial Sequence
  Antisense compound
gtaacgacaattgtatctgt

SEQ ID NO: 25762 - DNA, 20 bp, Artificial Sequence
  Antisense compound
agtaacgacaattgtatctg

SEQ ID NO: 25763 - DNA, 20 bp, Artificial Sequence
  Antisense compound
cagtaacgacaattgtatct

SEQ ID NO: 25764 - DNA, 20 bp, Artificial Sequence
  Antisense compound
tcagtaacgacaattgtatc

SEQ ID NO: 25765 - DNA, 20 bp, Artificial Sequence
  Antisense compound
ttcagtaacgacaattgtat

SEQ ID NO: 25766 - DNA, 20 bp, Artificial Sequence
  Antisense compound
cttcagtaacgacaattgta

SEQ ID NO: 25767 - DNA, 20 bp, Artificial Sequence
  Antisense compound
ccttcagtaacgacaattgt

SEQ ID NO: 25768 - DNA, 20 bp, Artificial Sequence
  Antisense compound
accttcagtaacgacaattg

SEQ ID NO: 25769 - DNA, 20 bp, Artificial Sequence
  Antisense compound
caccttcagtaacgacaatt

SEQ ID NO: 25770 - DNA, 20 bp, Artificial Sequence
  Antisense compound
tcaccttcagtaacgacaat

SEQ ID NO: 25771 - DNA, 20 bp, Artificial Sequence
  Antisense compound
gtcaccttcagtaacgacaa

SEQ ID NO: 25772 - DNA, 20 bp, Artificial Sequence
  Antisense compound
cgtcaccttcagtaacgaca

SEQ ID NO: 25773 - DNA, 20 bp, Artificial Sequence
  Antisense compound
ccgtcaccttcagtaacgac

SEQ ID NO: 25774 - DNA, 20 bp, Artificial Sequence
  Antisense compound
gccgtcaccttcagtaacga

SEQ ID NO: 25775 - DNA, 20 bp, Artificial Sequence
  Antisense compound
tgccgtcaccttcagtaacg

SEQ ID NO: 25776 - DNA, 20 bp, Artificial Sequence
  Antisense compound
atgccgtcaccttcagtaac

SEQ ID NO: 25777 - DNA, 20 bp, Artificial Sequence
  Antisense compound
aatgccgtcaccttcagtaa

SEQ ID NO: 25778 - DNA, 20 bp, Artificial Sequence
  Antisense compound
aaatgccgtcaccttcagta

SEQ ID NO: 25779 - DNA, 20 bp, Artificial Sequence
  Antisense compound
gaaatgccgtcaccttcagt

SEQ ID NO: 25780 - DNA, 20 bp, Artificial Sequence
  Antisense compound
tgaaatgccgtcaccttcag

SEQ ID NO: 25781 - DNA, 20 bp, Artificial Sequence
  Antisense compound
ttgaaatgccgtcaccttca

SEQ ID NO: 25782 - DNA, 20 bp, Artificial Sequence
  Antisense compound
gttgaaatgccgtcaccttc

SEQ ID NO: 25783 - DNA, 20 bp, Artificial Sequence
  Antisense compound
tgttgaaatgccgtcacctt

SEQ ID NO: 25784 - DNA, 20 bp, Artificial Sequence
  Antisense compound
gtgttgaaatgccgtcacct

SEQ ID NO: 25785 - DNA, 20 bp, Artificial Sequence
  Antisense compound
ggtgttgaaatgccgtcacc

SEQ ID NO: 25786 - DNA, 20 bp, Artificial Sequence
  Antisense compound
tggtgttgaaatgccgtcac

SEQ ID NO: 25787 - DNA, 20 bp, Artificial Sequence
  Antisense compound
ttggtgttgaaatgccgtca

SEQ ID NO: 25788 - DNA, 20 bp, Artificial Sequence
  Antisense compound
tttggtgttgaaatgccgtc

SEQ ID NO: 25789 - DNA, 20 bp, Artificial Sequence
  Antisense compound
ttttggtgttgaaatgccgt

SEQ ID NO: 25790 - DNA, 20 bp, Artificial Sequence
  Antisense compound
gttttggtgttgaaatgccg

SEQ ID NO: 25791 - DNA, 20 bp, Artificial Sequence
  Antisense compound
agttttggtgttgaaatgcc

SEQ ID NO: 25792 - DNA, 20 bp, Artificial Sequence
  Antisense compound
gagttttggtgttgaaatgc

SEQ ID NO: 25793 - DNA, 20 bp, Artificial Sequence
  Antisense compound
tgagttttggtgttgaaatg

SEQ ID NO: 25794 - DNA, 20 bp, Artificial Sequence
  Antisense compound
ttgagttttggtgttgaaat

SEQ ID NO: 25795 - DNA, 20 bp, Artificial Sequence
  Antisense compound
tttgagttttggtgttgaaa

SEQ ID NO: 25796 - DNA, 20 bp, Artificial Sequence
  Antisense compound
ctttgagttttggtgttgaa

SEQ ID NO: 25797 - DNA, 20 bp, Artificial Sequence
  Antisense compound
tctttgagttttggtgttga

SEQ ID NO: 25798 - DNA, 20 bp, Artificial Sequence
  Antisense compound
ttctttgagttttggtgttg

SEQ ID NO: 25799 - DNA, 20 bp, Artificial Sequence
  Antisense compound
cttctttgagttttggtgtt

SEQ ID NO: 25800 - DNA, 20 bp, Artificial Sequence
  Antisense compound
tcttctttgagttttggtgt

SEQ ID NO: 25801 - DNA, 20 bp, Artificial Sequence
  Antisense compound
gtcttctttgagttttggtg

SEQ ID NO: 25802 - DNA, 20 bp, Artificial Sequence
  Antisense compound
agtcttctttgagttttggt

SEQ ID NO: 25803 - DNA, 20 bp, Artificial Sequence
  Antisense compound
tagtcttctttgagttttgg

SEQ ID NO: 25804 - DNA, 20 bp, Artificial Sequence
  Antisense compound
gtagtcttctttgagttttg

SEQ ID NO: 25805 - DNA, 20 bp, Artificial Sequence
  Antisense compound
ggtagtcttctttgagtttt

SEQ ID NO: 25806 - DNA, 20 bp, Artificial Sequence
  Antisense compound
tggtagtcttctttgagttt

SEQ ID NO: 25807 - DNA, 20 bp, Artificial Sequence
  Antisense compound
ttggtagtcttctttgagtt

SEQ ID NO: 25808 - DNA, 20 bp, Artificial Sequence
  Antisense compound
tttggtagtcttctttgagt

SEQ ID NO: 25809 - DNA, 20 bp, Artificial Sequence
  Antisense compound
atttggtagtcttctttgag

SEQ ID NO: 25810 - DNA, 20 bp, Artificial Sequence
  Antisense compound
aatttggtagtcttctttga

SEQ ID NO: 25811 - DNA, 20 bp, Artificial Sequence
  Antisense compound
caatttggtagtcttctttg

SEQ ID NO: 25812 - DNA, 20 bp, Artificial Sequence
  Antisense compound
ccaatttggtagtcttcttt

SEQ ID NO: 25813 - DNA, 20 bp, Artificial Sequence
  Antisense compound
accaatttggtagtcttctt

SEQ ID NO: 25814 - DNA, 20 bp, Artificial Sequence
  Antisense compound
caccaatttggtagtcttct

SEQ ID NO: 25815 - DNA, 20 bp, Artificial Sequence
  Antisense compound
ccaccaatttggtagtcttc

SEQ ID NO: 25816 - DNA, 20 bp, Artificial Sequence
  Antisense compound
accaccaatttggtagtctt

SEQ ID NO: 25817 - DNA, 20 bp, Artificial Sequence
  Antisense compound
aaccaccaatttggtagtct

SEQ ID NO: 25818 - DNA, 20 bp, Artificial Sequence
  Antisense compound
taaccaccaatttggtagtc

SEQ ID NO: 25819 - DNA, 20 bp, Artificial Sequence
  Antisense compound
ataaccaccaatttggtagt

SEQ ID NO: 25820 - DNA, 20 bp, Artificial Sequence
  Antisense compound
aataaccaccaatttggtag

SEQ ID NO: 25821 - DNA, 20 bp, Artificial Sequence
  Antisense compound
gaataaccaccaatttggta

SEQ ID NO: 25822 - DNA, 20 bp, Artificial Sequence
  Antisense compound
agaataaccaccaatttggt

SEQ ID NO: 25823 - DNA, 20 bp, Artificial Sequence
  Antisense compound
cagaataaccaccaatttgg

SEQ ID NO: 25824 - DNA, 20 bp, Artificial Sequence
  Antisense compound
tcagaataaccaccaatttg

SEQ ID NO: 25825 - DNA, 20 bp, Artificial Sequence
  Antisense compound
ctcagaataaccaccaattt

SEQ ID NO: 25826 - DNA, 20 bp, Artificial Sequence
  Antisense compound
cctcagaataaccaccaatt

SEQ ID NO: 25827 - DNA, 20 bp, Artificial Sequence
  Antisense compound
tcctcagaataaccaccaat

SEQ ID NO: 25828 - DNA, 20 bp, Artificial Sequence
  Antisense compound
atcctcagaataaccaccaa

SEQ ID NO: 25829 - DNA, 20 bp, Artificial Sequence
  Antisense compound
tatcctcagaataaccacca

SEQ ID NO: 25830 - DNA, 20 bp, Artificial Sequence
  Antisense compound
ctatcctcagaataaccacc

SEQ ID NO: 25831 - DNA, 20 bp, Artificial Sequence
  Antisense compound
cctatcctcagaataaccac

SEQ ID NO: 25832 - DNA, 20 bp, Artificial Sequence
  Antisense compound
gcctatcctcagaataacca

SEQ ID NO: 25833 - DNA, 20 bp, Artificial Sequence
  Antisense compound
tgcctatcctcagaataacc

SEQ ID NO: 25834 - DNA, 20 bp, Artificial Sequence
  Antisense compound
gtgcctatcctcagaataac

SEQ ID NO: 25835 - DNA, 20 bp, Artificial Sequence
  Antisense compound
agtgcctatcctcagaataa

SEQ ID NO: 25836 - DNA, 20 bp, Artificial Sequence
  Antisense compound
gagtgcctatcctcagaata

SEQ ID NO: 25837 - DNA, 20 bp, Artificial Sequence
  Antisense compound
tgagtgcctatcctcagaat

SEQ ID NO: 25838 - DNA, 20 bp, Artificial Sequence
  Antisense compound
ctgagtgcctatcctcagaa

SEQ ID NO: 25839 - DNA, 20 bp, Artificial Sequence
  Antisense compound
cctgagtgcctatcctcaga

SEQ ID NO: 25840 - DNA, 20 bp, Artificial Sequence
  Antisense compound
acctgagtgcctatcctcag

SEQ ID NO: 25841 - DNA, 20 bp, Artificial Sequence
  Antisense compound
cacctgagtgcctatcctca

SEQ ID NO: 25842 - DNA, 20 bp, Artificial Sequence
  Antisense compound
acacctgagtgcctatcctc

SEQ ID NO: 25843 - DNA, 20 bp, Artificial Sequence
  Antisense compound
aacacctgagtgcctatcct

SEQ ID NO: 25844 - DNA, 20 bp, Artificial Sequence
  Antisense compound
taacacctgagtgcctatcc

SEQ ID NO: 25845 - DNA, 20 bp, Artificial Sequence
  Antisense compound
ttaacacctgagtgcctatc

SEQ ID NO: 25846 - DNA, 20 bp, Artificial Sequence
  Antisense compound
tttaacacctgagtgcctat

SEQ ID NO: 25847 - DNA, 20 bp, Artificial Sequence
  Antisense compound
ctttaacacctgagtgccta

SEQ ID NO: 25848 - DNA, 20 bp, Artificial Sequence
  Antisense compound
tctttaacacctgagtgcct

SEQ ID NO: 25849 - DNA, 20 bp, Artificial Sequence
  Antisense compound
gtctttaacacctgagtgcc

SEQ ID NO: 25850 - DNA, 20 bp, Artificial Sequence
  Antisense compound
agtctttaacacctgagtgc

SEQ ID NO: 25851 - DNA, 20 bp, Artificial Sequence
  Antisense compound
tagtctttaacacctgagtg

SEQ ID NO: 25852 - DNA, 20 bp, Artificial Sequence
  Antisense compound
atagtctttaacacctgagt

SEQ ID NO: 25853 - DNA, 20 bp, Artificial Sequence
  Antisense compound
catagtctttaacacctgag

SEQ ID NO: 25854 - DNA, 20 bp, Artificial Sequence
  Antisense compound
acatagtctttaacacctga

SEQ ID NO: 25855 - DNA, 20 bp, Artificial Sequence
  Antisense compound
gacatagtctttaacacctg

SEQ ID NO: 25856 - DNA, 20 bp, Artificial Sequence
  Antisense compound
cgacatagtctttaacacct

SEQ ID NO: 25857 - DNA, 20 bp, Artificial Sequence
  Antisense compound
acgacatagtctttaacacc

SEQ ID NO: 25858 - DNA, 20 bp, Artificial Sequence
  Antisense compound
aacgacatagtctttaacac

SEQ ID NO: 25859 - DNA, 20 bp, Artificial Sequence
  Antisense compound
caacgacatagtctttaaca

SEQ ID NO: 25860 - DNA, 20 bp, Artificial Sequence
  Antisense compound
acaacgacatagtctttaac

SEQ ID NO: 25861 - DNA, 20 bp, Artificial Sequence
  Antisense compound
tacaacgacatagtctttaa

SEQ ID NO: 25862 - DNA, 20 bp, Artificial Sequence
  Antisense compound
gtacaacgacatagtcttta

SEQ ID NO: 25863 - DNA, 20 bp, Artificial Sequence
  Antisense compound
tgtacaacgacatagtcttt

SEQ ID NO: 25864 - DNA, 20 bp, Artificial Sequence
  Antisense compound
atgtacaacgacatagtctt

SEQ ID NO: 25865 - DNA, 20 bp, Artificial Sequence
  Antisense compound
catgtacaacgacatagtct

SEQ ID NO: 25866 - DNA, 20 bp, Artificial Sequence
  Antisense compound
ccatgtacaacgacatagtc

SEQ ID NO: 25867 - DNA, 20 bp, Artificial Sequence
  Antisense compound
gccatgtacaacgacatagt

SEQ ID NO: 25868 - DNA, 20 bp, Artificial Sequence
  Antisense compound
agccatgtacaacgacatag

SEQ ID NO: 25869 - DNA, 20 bp, Artificial Sequence
  Antisense compound
tagccatgtacaacgacata

SEQ ID NO: 25870 - DNA, 20 bp, Artificial Sequence
  Antisense compound
atagccatgtacaacgacat

SEQ ID NO: 25871 - DNA, 20 bp, Artificial Sequence
  Antisense compound
aatagccatgtacaacgaca

SEQ ID NO: 25872 - DNA, 20 bp, Artificial Sequence
  Antisense compound
aaatagccatgtacaacgac

SEQ ID NO: 25873 - DNA, 20 bp, Artificial Sequence
  Antisense compound
gaaatagccatgtacaacga

SEQ ID NO: 25874 - DNA, 20 bp, Artificial Sequence
  Antisense compound
tgaaatagccatgtacaacg

SEQ ID NO: 25875 - DNA, 20 bp, Artificial Sequence
  Antisense compound
gtgaaatagccatgtacaac

SEQ ID NO: 25876 - DNA, 20 bp, Artificial Sequence
  Antisense compound
ggtgaaatagccatgtacaa

SEQ ID NO: 25877 - DNA, 20 bp, Artificial Sequence
  Antisense compound
cggtgaaatagccatgtaca

SEQ ID NO: 25878 - DNA, 20 bp, Artificial Sequence
  Antisense compound
tcggtgaaatagccatgtac

SEQ ID NO: 25879 - DNA, 20 bp, Artificial Sequence
  Antisense compound
ttcggtgaaatagccatgta

SEQ ID NO: 25880 - DNA, 20 bp, Artificial Sequence
  Antisense compound
cttcggtgaaatagccatgt

SEQ ID NO: 25881 - DNA, 20 bp, Artificial Sequence
  Antisense compound
acttcggtgaaatagccatg

SEQ ID NO: 25882 - DNA, 20 bp, Artificial Sequence
  Antisense compound
aacttcggtgaaatagccat

SEQ ID NO: 25883 - DNA, 20 bp, Artificial Sequence
  Antisense compound
aaacttcggtgaaatagcca

SEQ ID NO: 25884 - DNA, 20 bp, Artificial Sequence
  Antisense compound
taaacttcggtgaaatagcc

SEQ ID NO: 25885 - DNA, 20 bp, Artificial Sequence
  Antisense compound
gtaaacttcggtgaaatagc

SEQ ID NO: 25886 - DNA, 20 bp, Artificial Sequence
  Antisense compound
agtaaacttcggtgaaatag

SEQ ID NO: 25887 - DNA, 20 bp, Artificial Sequence
  Antisense compound
tagtaaacttcggtgaaata

SEQ ID NO: 25888 - DNA, 20 bp, Artificial Sequence
  Antisense compound
gtagtaaacttcggtgaaat

SEQ ID NO: 25889 - DNA, 20 bp, Artificial Sequence
  Antisense compound
ggtagtaaacttcggtgaaa

SEQ ID NO: 25890 - DNA, 20 bp, Artificial Sequence
  Antisense compound
tggtagtaaacttcggtgaa

SEQ ID NO: 25891 - DNA, 20 bp, Artificial Sequence
  Antisense compound
ctggtagtaaacttcggtga

SEQ ID NO: 25892 - DNA, 20 bp, Artificial Sequence
  Antisense compound
gctggtagtaaacttcggtg

SEQ ID NO: 25893 - DNA, 20 bp, Artificial Sequence
  Antisense compound
agctggtagtaaacttcggt

SEQ ID NO: 25894 - DNA, 20 bp, Artificial Sequence
  Antisense compound
aagctggtagtaaacttcgg

SEQ ID NO: 25895 - DNA, 20 bp, Artificial Sequence
  Antisense compound
caagctggtagtaaacttcg

SEQ ID NO: 25896 - DNA, 20 bp, Artificial Sequence
  Antisense compound
tcaagctggtagtaaacttc

SEQ ID NO: 25897 - DNA, 20 bp, Artificial Sequence
  Antisense compound
ctcaagctggtagtaaactt

SEQ ID NO: 25898 - DNA, 20 bp, Artificial Sequence
  Antisense compound
actcaagctggtagtaaact

SEQ ID NO: 25899 - DNA, 20 bp, Artificial Sequence
  Antisense compound
gactcaagctggtagtaaac

SEQ ID NO: 25900 - DNA, 20 bp, Artificial Sequence
  Antisense compound
agactcaagctggtagtaaa

SEQ ID NO: 25901 - DNA, 20 bp, Artificial Sequence
  Antisense compound
tagactcaagctggtagtaa

SEQ ID NO: 25902 - DNA, 20 bp, Artificial Sequence
  Antisense compound
gtagactcaagctggtagta

SEQ ID NO: 25903 - DNA, 20 bp, Artificial Sequence
  Antisense compound
tgtagactcaagctggtagt

SEQ ID NO: 25904 - DNA, 20 bp, Artificial Sequence
  Antisense compound
gtgtagactcaagctggtag

SEQ ID NO: 25905 - DNA, 20 bp, Artificial Sequence
  Antisense compound
tgtgtagactcaagctggta

SEQ ID NO: 25906 - DNA, 20 bp, Artificial Sequence
  Antisense compound
ttgtgtagactcaagctggt

SEQ ID NO: 25907 - DNA, 20 bp, Artificial Sequence
  Antisense compound
tttgtgtagactcaagctgg

SEQ ID NO: 25908 - DNA, 20 bp, Artificial Sequence
  Antisense compound
atttgtgtagactcaagctg

SEQ ID NO: 25909 - DNA, 20 bp, Artificial Sequence
  Antisense compound
aatttgtgtagactcaagct

SEQ ID NO: 25910 - DNA, 20 bp, Artificial Sequence
  Antisense compound
taatttgtgtagactcaagc

SEQ ID NO: 25911 - DNA, 20 bp, Artificial Sequence
  Antisense compound
gtaatttgtgtagactcaag

SEQ ID NO: 25912 - DNA, 20 bp, Artificial Sequence
  Antisense compound
agtaatttgtgtagactcaa

SEQ ID NO: 25913 - DNA, 20 bp, Artificial Sequence
  Antisense compound
tagtaatttgtgtagactca

SEQ ID NO: 25914 - DNA, 20 bp, Artificial Sequence
  Antisense compound
gtagtaatttgtgtagactc

SEQ ID NO: 25915 - DNA, 20 bp, Artificial Sequence
  Antisense compound
tgtagtaatttgtgtagact

SEQ ID NO: 25916 - DNA, 20 bp, Artificial Sequence
  Antisense compound
ctgtagtaatttgtgtagac

SEQ ID NO: 25917 - DNA, 20 bp, Artificial Sequence
  Antisense compound
tctgtagtaatttgtgtaga

SEQ ID NO: 25918 - DNA, 20 bp, Artificial Sequence
  Antisense compound
gtctgtagtaatttgtgtag

SEQ ID NO: 25919 - DNA, 20 bp, Artificial Sequence
  Antisense compound
tgtctgtagtaatttgtgta

SEQ ID NO: 25920 - DNA, 20 bp, Artificial Sequence
  Antisense compound
gtgtctgtagtaatttgtgt

SEQ ID NO: 25921 - DNA, 20 bp, Artificial Sequence
  Antisense compound
agtgtctgtagtaatttgtg

SEQ ID NO: 25922 - DNA, 20 bp, Artificial Sequence
  Antisense compound
cagtgtctgtagtaatttgt

SEQ ID NO: 25923 - DNA, 20 bp, Artificial Sequence
  Antisense compound
ccagtgtctgtagtaatttg

SEQ ID NO: 25924 - DNA, 20 bp, Artificial Sequence
  Antisense compound
accagtgtctgtagtaattt

SEQ ID NO: 25925 - DNA, 20 bp, Artificial Sequence
  Antisense compound
taccagtgtctgtagtaatt

SEQ ID NO: 25926 - DNA, 20 bp, Artificial Sequence
  Antisense compound
ataccagtgtctgtagtaat

SEQ ID NO: 25927 - DNA, 20 bp, Artificial Sequence
  Antisense compound
aataccagtgtctgtagtaa

SEQ ID NO: 25928 - DNA, 20 bp, Artificial Sequence
  Antisense compound
caataccagtgtctgtagta

SEQ ID NO: 25929 - DNA, 20 bp, Artificial Sequence
  Antisense compound
tcaataccagtgtctgtagt

SEQ ID NO: 25930 - DNA, 20 bp, Artificial Sequence
  Antisense compound
ttcaataccagtgtctgtag

SEQ ID NO: 25931 - DNA, 20 bp, Artificial Sequence
  Antisense compound
tttcaataccagtgtctgta

SEQ ID NO: 25932 - DNA, 20 bp, Artificial Sequence
  Antisense compound
ttttcaataccagtgtctgt

SEQ ID NO: 25933 - DNA, 20 bp, Artificial Sequence
  Antisense compound
attttcaataccagtgtctg

SEQ ID NO: 25934 - DNA, 20 bp, Artificial Sequence
  Antisense compound
cattttcaataccagtgtct

SEQ ID NO: 25935 - DNA, 20 bp, Artificial Sequence
  Antisense compound
gcattttcaataccagtgtc

SEQ ID NO: 25936 - DNA, 20 bp, Artificial Sequence
  Antisense compound
agcattttcaataccagtgt

SEQ ID NO: 25937 - DNA, 20 bp, Artificial Sequence
  Antisense compound
tagcattttcaataccagtg

SEQ ID NO: 25938 - DNA, 20 bp, Artificial Sequence
  Antisense compound
gtagcattttcaataccagt

SEQ ID NO: 25939 - DNA, 20 bp, Artificial Sequence
  Antisense compound
tgtagcattttcaataccag

SEQ ID NO: 25940 - DNA, 20 bp, Artificial Sequence
  Antisense compound
atgtagcattttcaatacca

SEQ ID NO: 25941 - DNA, 20 bp, Artificial Sequence
  Antisense compound
aatgtagcattttcaatacc

SEQ ID NO: 25942 - DNA, 20 bp, Artificial Sequence
  Antisense compound
gaatgtagcattttcaatac

SEQ ID NO: 25943 - DNA, 20 bp, Artificial Sequence
  Antisense compound
agaatgtagcattttcaata

SEQ ID NO: 25944 - DNA, 20 bp, Artificial Sequence
  Antisense compound
aagaatgtagcattttcaat

SEQ ID NO: 25945 - DNA, 20 bp, Artificial Sequence
  Antisense compound
gaagaatgtagcattttcaa

SEQ ID NO: 25946 - DNA, 20 bp, Artificial Sequence
  Antisense compound
tgaagaatgtagcattttca

SEQ ID NO: 25947 - DNA, 20 bp, Artificial Sequence
  Antisense compound
atgaagaatgtagcattttc

SEQ ID NO: 25948 - DNA, 20 bp, Artificial Sequence
  Antisense compound
gatgaagaatgtagcatttt

SEQ ID NO: 25949 - DNA, 20 bp, Artificial Sequence
  Antisense compound
agatgaagaatgtagcattt

SEQ ID NO: 25950 - DNA, 20 bp, Artificial Sequence
  Antisense compound
aagatgaagaatgtagcatt

SEQ ID NO: 25951 - DNA, 20 bp, Artificial Sequence
  Antisense compound
aaagatgaagaatgtagcat

SEQ ID NO: 25952 - DNA, 20 bp, Artificial Sequence
  Antisense compound
taaagatgaagaatgtagca

SEQ ID NO: 25953 - DNA, 20 bp, Artificial Sequence
  Antisense compound
ttaaagatgaagaatgtagc

SEQ ID NO: 25954 - DNA, 20 bp, Artificial Sequence
  Antisense compound
gttaaagatgaagaatgtag

SEQ ID NO: 25955 - DNA, 20 bp, Artificial Sequence
  Antisense compound
tgttaaagatgaagaatgta

SEQ ID NO: 25956 - DNA, 20 bp, Artificial Sequence
  Antisense compound
ttgttaaagatgaagaatgt

SEQ ID NO: 25957 - DNA, 20 bp, Artificial Sequence
  Antisense compound
cttgttaaagatgaagaatg

SEQ ID NO: 25958 - DNA, 20 bp, Artificial Sequence
  Antisense compound
gcttgttaaagatgaagaat

SEQ ID NO: 25959 - DNA, 20 bp, Artificial Sequence
  Antisense compound
agcttgttaaagatgaagaa

SEQ ID NO: 25960 - DNA, 20 bp, Artificial Sequence
  Antisense compound
aagcttgttaaagatgaaga

SEQ ID NO: 25961 - DNA, 20 bp, Artificial Sequence
  Antisense compound
caagcttgttaaagatgaag

SEQ ID NO: 25962 - DNA, 20 bp, Artificial Sequence
  Antisense compound
acaagcttgttaaagatgaa

SEQ ID NO: 25963 - DNA, 20 bp, Artificial Sequence
  Antisense compound
aacaagcttgttaaagatga

SEQ ID NO: 25964 - DNA, 20 bp, Artificial Sequence
  Antisense compound
taacaagcttgttaaagatg

SEQ ID NO: 25965 - DNA, 20 bp, Artificial Sequence
  Antisense compound
ttaacaagcttgttaaagat

SEQ ID NO: 25966 - DNA, 20 bp, Artificial Sequence
  Antisense compound
tttaacaagcttgttaaaga

SEQ ID NO: 25967 - DNA, 20 bp, Artificial Sequence
  Antisense compound
ctttaacaagcttgttaaag

SEQ ID NO: 25968 - DNA, 20 bp, Artificial Sequence
  Antisense compound
tctttaacaagcttgttaaa

SEQ ID NO: 25969 - DNA, 20 bp, Artificial Sequence
  Antisense compound
gtctttaacaagcttgttaa

SEQ ID NO: 25970 - DNA, 20 bp, Artificial Sequence
  Antisense compound
ggtctttaacaagcttgtta

SEQ ID NO: 25971 - DNA, 20 bp, Artificial Sequence
  Antisense compound
gggtctttaacaagcttgtt

SEQ ID NO: 25972 - DNA, 20 bp, Artificial Sequence
  Antisense compound
tgggtctttaacaagcttgt

SEQ ID NO: 25973 - DNA, 20 bp, Artificial Sequence
  Antisense compound
gtgggtctttaacaagcttg

SEQ ID NO: 25974 - DNA, 20 bp, Artificial Sequence
  Antisense compound
ggtgggtctttaacaagctt

SEQ ID NO: 25975 - DNA, 20 bp, Artificial Sequence
  Antisense compound
cggtgggtctttaacaagct

SEQ ID NO: 25976 - DNA, 20 bp, Artificial Sequence
  Antisense compound
tcggtgggtctttaacaagc

SEQ ID NO: 25977 - DNA, 20 bp, Artificial Sequence
  Antisense compound
ttcggtgggtctttaacaag

SEQ ID NO: 25978 - DNA, 20 bp, Artificial Sequence
  Antisense compound
attcggtgggtctttaacaa

SEQ ID NO: 25979 - DNA, 20 bp, Artificial Sequence
  Antisense compound
cattcggtgggtctttaaca

SEQ ID NO: 25980 - DNA, 20 bp, Artificial Sequence
  Antisense compound
acattcggtgggtctttaac

SEQ ID NO: 25981 - DNA, 20 bp, Artificial Sequence
  Antisense compound
cacattcggtgggtctttaa

SEQ ID NO: 25982 - DNA, 20 bp, Artificial Sequence
  Antisense compound
gcacattcggtgggtcttta

SEQ ID NO: 25983 - DNA, 20 bp, Artificial Sequence
  Antisense compound
tgcacattcggtgggtcttt

SEQ ID NO: 25984 - DNA, 20 bp, Artificial Sequence
  Antisense compound
ttgcacattcggtgggtctt

SEQ ID NO: 25985 - DNA, 20 bp, Artificial Sequence
  Antisense compound
tttgcacattcggtgggtct

SEQ ID NO: 25986 - DNA, 20 bp, Artificial Sequence
  Antisense compound
atttgcacattcggtgggtc

SEQ ID NO: 25987 - DNA, 20 bp, Artificial Sequence
  Antisense compound
tatttgcacattcggtgggt

SEQ ID NO: 25988 - DNA, 20 bp, Artificial Sequence
  Antisense compound
gtatttgcacattcggtggg

SEQ ID NO: 25989 - DNA, 20 bp, Artificial Sequence
  Antisense compound
tgtatttgcacattcggtgg

SEQ ID NO: 25990 - DNA, 20 bp, Artificial Sequence
  Antisense compound
gtgtatttgcacattcggtg

SEQ ID NO: 25991 - DNA, 20 bp, Artificial Sequence
  Antisense compound
tgtgtatttgcacattcggt

SEQ ID NO: 25992 - DNA, 20 bp, Artificial Sequence
  Antisense compound
gtgtgtatttgcacattcgg

SEQ ID NO: 25993 - DNA, 20 bp, Artificial Sequence
  Antisense compound
tgtgtgtatttgcacattcg

SEQ ID NO: 25994 - DNA, 20 bp, Artificial Sequence
  Antisense compound
ttgtgtgtatttgcacattc

SEQ ID NO: 25995 - DNA, 20 bp, Artificial Sequence
  Antisense compound
attgtgtgtatttgcacatt

SEQ ID NO: 25996 - DNA, 20 bp, Artificial Sequence
  Antisense compound
gattgtgtgtatttgcacat

SEQ ID NO: 25997 - DNA, 20 bp, Artificial Sequence
  Antisense compound
cgattgtgtgtatttgcaca

SEQ ID NO: 25998 - DNA, 20 bp, Artificial Sequence
  Antisense compound
tcgattgtgtgtatttgcac

SEQ ID NO: 25999 - DNA, 20 bp, Artificial Sequence
  Antisense compound
gtcgattgtgtgtatttgca

SEQ ID NO: 26000 - DNA, 20 bp, Artificial Sequence
  Antisense compound
cgtcgattgtgtgtatttgc

SEQ ID NO: 26001 - DNA, 20 bp, Artificial Sequence
  Antisense compound
ccgtcgattgtgtgtatttg

SEQ ID NO: 26002 - DNA, 20 bp, Artificial Sequence
  Antisense compound
gccgtcgattgtgtgtattt

SEQ ID NO: 26003 - DNA, 20 bp, Artificial Sequence
  Antisense compound
agccgtcgattgtgtgtatt

SEQ ID NO: 26004 - DNA, 20 bp, Artificial Sequence
  Antisense compound
gagccgtcgattgtgtgtat

SEQ ID NO: 26005 - DNA, 20 bp, Artificial Sequence
  Antisense compound
agagccgtcgattgtgtgta

SEQ ID NO: 26006 - DNA, 20 bp, Artificial Sequence
  Antisense compound
aagagccgtcgattgtgtgt

SEQ ID NO: 26007 - DNA, 20 bp, Artificial Sequence
  Antisense compound
gaagagccgtcgattgtgtg

SEQ ID NO: 26008 - DNA, 20 bp, Artificial Sequence
  Antisense compound
tgaagagccgtcgattgtgt

SEQ ID NO: 26009 - DNA, 20 bp, Artificial Sequence
  Antisense compound
ctgaagagccgtcgattgtg

SEQ ID NO: 26010 - DNA, 20 bp, Artificial Sequence
  Antisense compound
cctgaagagccgtcgattgt

SEQ ID NO: 26011 - DNA, 20 bp, Artificial Sequence
  Antisense compound
tcctgaagagccgtcgattg

SEQ ID NO: 26012 - DNA, 20 bp, Artificial Sequence
  Antisense compound
ctcctgaagagccgtcgatt

SEQ ID NO: 26013 - DNA, 20 bp, Artificial Sequence
  Antisense compound
actcctgaagagccgtcgat

SEQ ID NO: 26014 - DNA, 20 bp, Artificial Sequence
  Antisense compound
aactcctgaagagccgtcga

SEQ ID NO: 26015 - DNA, 20 bp, Artificial Sequence
  Antisense compound
caactcctgaagagccgtcg

SEQ ID NO: 26016 - DNA, 20 bp, Artificial Sequence
  Antisense compound
gcaactcctgaagagccgtc

SEQ ID NO: 26017 - DNA, 20 bp, Artificial Sequence
  Antisense compound
agcaactcctgaagagccgt

SEQ ID NO: 26018 - DNA, 20 bp, Artificial Sequence
  Antisense compound
tagcaactcctgaagagccg

SEQ ID NO: 26019 - DNA, 20 bp, Artificial Sequence
  Antisense compound
ttagcaactcctgaagagcc

SEQ ID NO: 26020 - DNA, 20 bp, Artificial Sequence
  Antisense compound
attagcaactcctgaagagc

SEQ ID NO: 26021 - DNA, 20 bp, Artificial Sequence
  Antisense compound
gattagcaactcctgaagag

SEQ ID NO: 26022 - DNA, 20 bp, Artificial Sequence
  Antisense compound
ggattagcaactcctgaaga

SEQ ID NO: 26023 - DNA, 20 bp, Artificial Sequence
  Antisense compound
tggattagcaactcctgaag

SEQ ID NO: 26024 - DNA, 20 bp, Artificial Sequence
  Antisense compound
ctggattagcaactcctgaa

SEQ ID NO: 26025 - DNA, 20 bp, Artificial Sequence
  Antisense compound
gctggattagcaactcctga

SEQ ID NO: 26026 - DNA, 20 bp, Artificial Sequence
  Antisense compound
tgctggattagcaactcctg

SEQ ID NO: 26027 - DNA, 20 bp, Artificial Sequence
  Antisense compound
ttgctggattagcaactcct

SEQ ID NO: 26028 - DNA, 20 bp, Artificial Sequence
  Antisense compound
attgctggattagcaactcc

SEQ ID NO: 26029 - DNA, 20 bp, Artificial Sequence
  Antisense compound
cattgctggattagcaactc

SEQ ID NO: 26030 - DNA, 20 bp, Artificial Sequence
  Antisense compound
ccattgctggattagcaact

SEQ ID NO: 26031 - DNA, 20 bp, Artificial Sequence
  Antisense compound
tccattgctggattagcaac

SEQ ID NO: 26032 - DNA, 20 bp, Artificial Sequence
  Antisense compound
atccattgctggattagcaa

SEQ ID NO: 26033 - DNA, 20 bp, Artificial Sequence
  Antisense compound
gatccattgctggattagca

SEQ ID NO: 26034 - DNA, 20 bp, Artificial Sequence
  Antisense compound
ggatccattgctggattagc

SEQ ID NO: 26035 - DNA, 20 bp, Artificial Sequence
  Antisense compound
tggatccattgctggattag

SEQ ID NO: 26036 - DNA, 20 bp, Artificial Sequence
  Antisense compound
ttggatccattgctggatta

SEQ ID NO: 26037 - DNA, 20 bp, Artificial Sequence
  Antisense compound
attggatccattgctggatt

SEQ ID NO: 26038 - DNA, 20 bp, Artificial Sequence
  Antisense compound
aattggatccattgctggat

SEQ ID NO: 26039 - DNA, 20 bp, Artificial Sequence
  Antisense compound
aaattggatccattgctgga

SEQ ID NO: 26040 - DNA, 20 bp, Artificial Sequence
  Antisense compound
taaattggatccattgctgg

SEQ ID NO: 26041 - DNA, 20 bp, Artificial Sequence
  Antisense compound
ataaattggatccattgctg

SEQ ID NO: 26042 - DNA, 20 bp, Artificial Sequence
  Antisense compound
cataaattggatccattgct

SEQ ID NO: 26043 - DNA, 20 bp, Artificial Sequence
  Antisense compound
tcataaattggatccattgc

SEQ ID NO: 26044 - DNA, 20 bp, Artificial Sequence
  Antisense compound
atcataaattggatccattg

SEQ ID NO: 26045 - DNA, 20 bp, Artificial Sequence
  Antisense compound
catcataaattggatccatt

SEQ ID NO: 26046 - DNA, 20 bp, Artificial Sequence
  Antisense compound
tcatcataaattggatccat

SEQ ID NO: 26047 - DNA, 20 bp, Artificial Sequence
  Antisense compound
ctcatcataaattggatcca

SEQ ID NO: 26048 - DNA, 20 bp, Artificial Sequence
  Antisense compound
gctcatcataaattggatcc

SEQ ID NO: 26049 - DNA, 20 bp, Artificial Sequence
  Antisense compound
ggctcatcataaattggatc

SEQ ID NO: 26050 - DNA, 20 bp, Artificial Sequence
  Antisense compound
cggctcatcataaattggat

SEQ ID NO: 26051 - DNA, 20 bp, Artificial Sequence
  Antisense compound
tcggctcatcataaattgga

SEQ ID NO: 26052 - DNA, 20 bp, Artificial Sequence
  Antisense compound
gtcggctcatcataaattgg

SEQ ID NO: 26053 - DNA, 20 bp, Artificial Sequence
  Antisense compound
cgtcggctcatcataaattg

SEQ ID NO: 26054 - DNA, 20 bp, Artificial Sequence
  Antisense compound
tcgtcggctcatcataaatt

SEQ ID NO: 26055 - DNA, 20 bp, Artificial Sequence
  Antisense compound
gtcgtcggctcatcataaat

SEQ ID NO: 26056 - DNA, 20 bp, Artificial Sequence
  Antisense compound
cgtcgtcggctcatcataaa

SEQ ID NO: 26057 - DNA, 20 bp, Artificial Sequence
  Antisense compound
tcgtcgtcggctcatcataa

SEQ ID NO: 26058 - DNA, 20 bp, Artificial Sequence
  Antisense compound
gtcgtcgtcggctcatcata

SEQ ID NO: 26059 - DNA, 20 bp, Artificial Sequence
  Antisense compound
agtcgtcgtcggctcatcat

SEQ ID NO: 26060 - DNA, 20 bp, Artificial Sequence
  Antisense compound
tagtcgtcgtcggctcatca

SEQ ID NO: 26061 - DNA, 20 bp, Artificial Sequence
  Antisense compound
gtagtcgtcgtcggctcatc

SEQ ID NO: 26062 - DNA, 20 bp, Artificial Sequence
  Antisense compound
agtagtcgtcgtcggctcat

SEQ ID NO: 26063 - DNA, 20 bp, Artificial Sequence
  Antisense compound
tagtagtcgtcgtcggctca

SEQ ID NO: 26064 - DNA, 20 bp, Artificial Sequence
  Antisense compound
ctagtagtcgtcgtcggctc

SEQ ID NO: 26065 - DNA, 20 bp, Artificial Sequence
  Antisense compound
gctagtagtcgtcgtcggct

SEQ ID NO: 26066 - DNA, 20 bp, Artificial Sequence
  Antisense compound
cgctagtagtcgtcgtcggc

SEQ ID NO: 26067 - DNA, 20 bp, Artificial Sequence
  Antisense compound
acgctagtagtcgtcgtcgg

SEQ ID NO: 26068 - DNA, 20 bp, Artificial Sequence
  Antisense compound
cacgctagtagtcgtcgtcg

SEQ ID NO: 26069 - DNA, 20 bp, Artificial Sequence
  Antisense compound
gcacgctagtagtcgtcgtc

SEQ ID NO: 26070 - DNA, 20 bp, Artificial Sequence
  Antisense compound
ggcacgctagtagtcgtcgt

SEQ ID NO: 26071 - DNA, 20 bp, Artificial Sequence
  Antisense compound
aggcacgctagtagtcgtcg

SEQ ID NO: 26072 - DNA, 20 bp, Artificial Sequence
  Antisense compound
aaggcacgctagtagtcgtc

SEQ ID NO: 26073 - DNA, 20 bp, Artificial Sequence
  Antisense compound
aaaggcacgctagtagtcgt

SEQ ID NO: 26074 - DNA, 20 bp, Artificial Sequence
  Antisense compound
caaaggcacgctagtagtcg

SEQ ID NO: 26075 - DNA, 20 bp, Artificial Sequence
  Antisense compound
acaaaggcacgctagtagtc

SEQ ID NO: 26076 - DNA, 20 bp, Artificial Sequence
  Antisense compound
tacaaaggcacgctagtagt

SEQ ID NO: 26077 - DNA, 20 bp, Artificial Sequence
  Antisense compound
ttacaaaggcacgctagtag

SEQ ID NO: 26078 - DNA, 20 bp, Artificial Sequence
  Antisense compound
cttacaaaggcacgctagta

SEQ ID NO: 26079 - DNA, 20 bp, Artificial Sequence
  Antisense compound
gcttacaaaggcacgctagt

SEQ ID NO: 26080 - DNA, 20 bp, Artificial Sequence
  Antisense compound
tgcttacaaaggcacgctag

SEQ ID NO: 26081 - DNA, 20 bp, Artificial Sequence
  Antisense compound
gtgcttacaaaggcacgcta

SEQ ID NO: 26082 - DNA, 20 bp, Artificial Sequence
  Antisense compound
tgtgcttacaaaggcacgct

SEQ ID NO: 26083 - DNA, 20 bp, Artificial Sequence
  Antisense compound
ttgtgcttacaaaggcacgc

SEQ ID NO: 26084 - DNA, 20 bp, Artificial Sequence
  Antisense compound
cttgtgcttacaaaggcacg

SEQ ID NO: 26085 - DNA, 20 bp, Artificial Sequence
  Antisense compound
tcttgtgcttacaaaggcac

SEQ ID NO: 26086 - DNA, 20 bp, Artificial Sequence
  Antisense compound
ttcttgtgcttacaaaggca

SEQ ID NO: 26087 - DNA, 20 bp, Artificial Sequence
  Antisense compound
tttcttgtgcttacaaaggc

SEQ ID NO: 26088 - DNA, 20 bp, Artificial Sequence
  Antisense compound
ctttcttgtgcttacaaagg

SEQ ID NO: 26089 - DNA, 20 bp, Artificial Sequence
  Antisense compound
actttcttgtgcttacaaag

SEQ ID NO: 26090 - DNA, 20 bp, Artificial Sequence
  Antisense compound
cactttcttgtgcttacaaa

SEQ ID NO: 26091 - DNA, 20 bp, Artificial Sequence
  Antisense compound
tcactttcttgtgcttacaa

SEQ ID NO: 26092 - DNA, 20 bp, Artificial Sequence
  Antisense compound
ctcactttcttgtgcttaca

SEQ ID NO: 26093 - DNA, 20 bp, Artificial Sequence
  Antisense compound
actcactttcttgtgcttac

SEQ ID NO: 26094 - DNA, 20 bp, Artificial Sequence
  Antisense compound
tactcactttcttgtgctta

SEQ ID NO: 26095 - DNA, 20 bp, Artificial Sequence
  Antisense compound
gtactcactttcttgtgctt

SEQ ID NO: 26096 - DNA, 20 bp, Artificial Sequence
  Antisense compound
cgtactcactttcttgtgct

SEQ ID NO: 26097 - DNA, 20 bp, Artificial Sequence
  Antisense compound
tcgtactcactttcttgtgc

SEQ ID NO: 26098 - DNA, 20 bp, Artificial Sequence
  Antisense compound
ttcgtactcactttcttgtg

SEQ ID NO: 26099 - DNA, 20 bp, Artificial Sequence
  Antisense compound
gttcgtactcactttcttgt

SEQ ID NO: 26100 - DNA, 20 bp, Artificial Sequence
  Antisense compound
agttcgtactcactttcttg

SEQ ID NO: 26101 - DNA, 20 bp, Artificial Sequence
  Antisense compound
aagttcgtactcactttctt

SEQ ID NO: 26102 - DNA, 20 bp, Artificial Sequence
  Antisense compound
taagttcgtactcactttct

SEQ ID NO: 26103 - DNA, 20 bp, Artificial Sequence
  Antisense compound
ataagttcgtactcactttc

SEQ ID NO: 26104 - DNA, 20 bp, Artificial Sequence
  Antisense compound
cataagttcgtactcacttt

SEQ ID NO: 26105 - DNA, 20 bp, Artificial Sequence
  Antisense compound
acataagttcgtactcactt

SEQ ID NO: 26106 - DNA, 20 bp, Artificial Sequence
  Antisense compound
tacataagttcgtactcact

SEQ ID NO: 26107 - DNA, 20 bp, Artificial Sequence
  Antisense compound
gtacataagttcgtactcac

SEQ ID NO: 26108 - DNA, 20 bp, Artificial Sequence
  Antisense compound
agtacataagttcgtactca

SEQ ID NO: 26109 - DNA, 20 bp, Artificial Sequence
  Antisense compound
gagtacataagttcgtactc

SEQ ID NO: 26110 - DNA, 20 bp, Artificial Sequence
  Antisense compound
tgagtacataagttcgtact

SEQ ID NO: 26111 - DNA, 20 bp, Artificial Sequence
  Antisense compound
atgagtacataagttcgtac

SEQ ID NO: 26112 - DNA, 20 bp, Artificial Sequence
  Antisense compound
aatgagtacataagttcgta

SEQ ID NO: 26113 - DNA, 20 bp, Artificial Sequence
  Antisense compound
gaatgagtacataagttcgt

SEQ ID NO: 26114 - DNA, 20 bp, Artificial Sequence
  Antisense compound
cgaatgagtacataagttcg

SEQ ID NO: 26115 - DNA, 20 bp, Artificial Sequence
  Antisense compound
acgaatgagtacataagttc

SEQ ID NO: 26116 - DNA, 20 bp, Artificial Sequence
  Antisense compound
aacgaatgagtacataagtt

SEQ ID NO: 26117 - DNA, 20 bp, Artificial Sequence
  Antisense compound
aaacgaatgagtacataagt

SEQ ID NO: 26118 - DNA, 20 bp, Artificial Sequence
  Antisense compound
gaaacgaatgagtacataag

SEQ ID NO: 26119 - DNA, 20 bp, Artificial Sequence
  Antisense compound
cgaaacgaatgagtacataa

SEQ ID NO: 26120 - DNA, 20 bp, Artificial Sequence
  Antisense compound
ccgaaacgaatgagtacata

SEQ ID NO: 26121 - DNA, 20 bp, Artificial Sequence
  Antisense compound
tccgaaacgaatgagtacat

SEQ ID NO: 26122 - DNA, 20 bp, Artificial Sequence
  Antisense compound
ttccgaaacgaatgagtaca

SEQ ID NO: 26123 - DNA, 20 bp, Artificial Sequence
  Antisense compound
cttccgaaacgaatgagtac

SEQ ID NO: 26124 - DNA, 20 bp, Artificial Sequence
  Antisense compound
tcttccgaaacgaatgagta

SEQ ID NO: 26125 - DNA, 20 bp, Artificial Sequence
  Antisense compound
ttcttccgaaacgaatgagt

SEQ ID NO: 26126 - DNA, 20 bp, Artificial Sequence
  Antisense compound
tttcttccgaaacgaatgag

SEQ ID NO: 26127 - DNA, 20 bp, Artificial Sequence
  Antisense compound
gtttcttccgaaacgaatga

SEQ ID NO: 26128 - DNA, 20 bp, Artificial Sequence
  Antisense compound
tgtttcttccgaaacgaatg

SEQ ID NO: 26129 - DNA, 20 bp, Artificial Sequence
  Antisense compound
ctgtttcttccgaaacgaat

SEQ ID NO: 26130 - DNA, 20 bp, Artificial Sequence
  Antisense compound
cctgtttcttccgaaacgaa

SEQ ID NO: 26131 - DNA, 20 bp, Artificial Sequence
  Antisense compound
acctgtttcttccgaaacga

SEQ ID NO: 26132 - DNA, 20 bp, Artificial Sequence
  Antisense compound
tacctgtttcttccgaaacg

SEQ ID NO: 26133 - DNA, 20 bp, Artificial Sequence
  Antisense compound
gtacctgtttcttccgaaac

SEQ ID NO: 26134 - DNA, 20 bp, Artificial Sequence
  Antisense compound
cgtacctgtttcttccgaaa

SEQ ID NO: 26135 - DNA, 20 bp, Artificial Sequence
  Antisense compound
acgtacctgtttcttccgaa

SEQ ID NO: 26136 - DNA, 20 bp, Artificial Sequence
  Antisense compound
aacgtacctgtttcttccga

SEQ ID NO: 26137 - DNA, 20 bp, Artificial Sequence
  Antisense compound
taacgtacctgtttcttccg

SEQ ID NO: 26138 - DNA, 20 bp, Artificial Sequence
  Antisense compound
ttaacgtacctgtttcttcc

SEQ ID NO: 26139 - DNA, 20 bp, Artificial Sequence
  Antisense compound
attaacgtacctgtttcttc

SEQ ID NO: 26140 - DNA, 20 bp, Artificial Sequence
  Antisense compound
tattaacgtacctgtttctt

SEQ ID NO: 26141 - DNA, 20 bp, Artificial Sequence
  Antisense compound
ctattaacgtacctgtttct

SEQ ID NO: 26142 - DNA, 20 bp, Artificial Sequence
  Antisense compound
actattaacgtacctgtttc

SEQ ID NO: 26143 - DNA, 20 bp, Artificial Sequence
  Antisense compound
aactattaacgtacctgttt

SEQ ID NO: 26144 - DNA, 20 bp, Artificial Sequence
  Antisense compound
taactattaacgtacctgtt

SEQ ID NO: 26145 - DNA, 20 bp, Artificial Sequence
  Antisense compound
ttaactattaacgtacctgt

SEQ ID NO: 26146 - DNA, 20 bp, Artificial Sequence
  Antisense compound
attaactattaacgtacctg

SEQ ID NO: 26147 - DNA, 20 bp, Artificial Sequence
  Antisense compound
tattaactattaacgtacct

SEQ ID NO: 26148 - DNA, 20 bp, Artificial Sequence
  Antisense compound
ctattaactattaacgtacc

SEQ ID NO: 26149 - DNA, 20 bp, Artificial Sequence
  Antisense compound
gctattaactattaacgtac

SEQ ID NO: 26150 - DNA, 20 bp, Artificial Sequence
  Antisense compound
cgctattaactattaacgta

SEQ ID NO: 26151 - DNA, 20 bp, Artificial Sequence
  Antisense compound
acgctattaactattaacgt

SEQ ID NO: 26152 - DNA, 20 bp, Artificial Sequence
  Antisense compound
tacgctattaactattaacg

SEQ ID NO: 26153 - DNA, 20 bp, Artificial Sequence
  Antisense compound
gtacgctattaactattaac

SEQ ID NO: 26154 - DNA, 20 bp, Artificial Sequence
  Antisense compound
agtacgctattaactattaa

SEQ ID NO: 26155 - DNA, 20 bp, Artificial Sequence
  Antisense compound
aagtacgctattaactatta

SEQ ID NO: 26156 - DNA, 20 bp, Artificial Sequence
  Antisense compound
gaagtacgctattaactatt

SEQ ID NO: 26157 - DNA, 20 bp, Artificial Sequence
  Antisense compound
agaagtacgctattaactat

SEQ ID NO: 26158 - DNA, 20 bp, Artificial Sequence
  Antisense compound
aagaagtacgctattaacta

SEQ ID NO: 26159 - DNA, 20 bp, Artificial Sequence
  Antisense compound
aaagaagtacgctattaact

SEQ ID NO: 26160 - DNA, 20 bp, Artificial Sequence
  Antisense compound
aaaagaagtacgctattaac

SEQ ID NO: 26161 - DNA, 20 bp, Artificial Sequence
  Antisense compound
aaaaagaagtacgctattaa

SEQ ID NO: 26162 - DNA, 20 bp, Artificial Sequence
  Antisense compound
gaaaaagaagtacgctatta

SEQ ID NO: 26163 - DNA, 20 bp, Artificial Sequence
  Antisense compound
agaaaaagaagtacgctatt

SEQ ID NO: 26164 - DNA, 20 bp, Artificial Sequence
  Antisense compound
aagaaaaagaagtacgctat

SEQ ID NO: 26165 - DNA, 20 bp, Artificial Sequence
  Antisense compound
caagaaaaagaagtacgcta

SEQ ID NO: 26166 - DNA, 20 bp, Artificial Sequence
  Antisense compound
gcaagaaaaagaagtacgct

SEQ ID NO: 26167 - DNA, 20 bp, Artificial Sequence
  Antisense compound
agcaagaaaaagaagtacgc

SEQ ID NO: 26168 - DNA, 20 bp, Artificial Sequence
  Antisense compound
aagcaagaaaaagaagtacg

SEQ ID NO: 26169 - DNA, 20 bp, Artificial Sequence
  Antisense compound
aaagcaagaaaaagaagtac

SEQ ID NO: 26170 - DNA, 20 bp, Artificial Sequence
  Antisense compound
gaaagcaagaaaaagaagta

SEQ ID NO: 26171 - DNA, 20 bp, Artificial Sequence
  Antisense compound
cgaaagcaagaaaaagaagt

SEQ ID NO: 26172 - DNA, 20 bp, Artificial Sequence
  Antisense compound
acgaaagcaagaaaaagaag

SEQ ID NO: 26173 - DNA, 20 bp, Artificial Sequence
  Antisense compound
cacgaaagcaagaaaaagaa

SEQ ID NO: 26174 - DNA, 20 bp, Artificial Sequence
  Antisense compound
ccacgaaagcaagaaaaaga

SEQ ID NO: 26175 - DNA, 20 bp, Artificial Sequence
  Antisense compound
accacgaaagcaagaaaaag

SEQ ID NO: 26176 - DNA, 20 bp, Artificial Sequence
  Antisense compound
taccacgaaagcaagaaaaa

SEQ ID NO: 26177 - DNA, 20 bp, Artificial Sequence
  Antisense compound
ataccacgaaagcaagaaaa

SEQ ID NO: 26178 - DNA, 20 bp, Artificial Sequence
  Antisense compound
aataccacgaaagcaagaaa

SEQ ID NO: 26179 - DNA, 20 bp, Artificial Sequence
  Antisense compound
gaataccacgaaagcaagaa

SEQ ID NO: 26180 - DNA, 20 bp, Artificial Sequence
  Antisense compound
agaataccacgaaagcaaga

SEQ ID NO: 26181 - DNA, 20 bp, Artificial Sequence
  Antisense compound
aagaataccacgaaagcaag

SEQ ID NO: 26182 - DNA, 20 bp, Artificial Sequence
  Antisense compound
caagaataccacgaaagcaa

SEQ ID NO: 26183 - DNA, 20 bp, Artificial Sequence
  Antisense compound
gcaagaataccacgaaagca

SEQ ID NO: 26184 - DNA, 20 bp, Artificial Sequence
  Antisense compound
agcaagaataccacgaaagc

SEQ ID NO: 26185 - DNA, 20 bp, Artificial Sequence
  Antisense compound
tagcaagaataccacgaaag

SEQ ID NO: 26186 - DNA, 20 bp, Artificial Sequence
  Antisense compound
ctagcaagaataccacgaaa

SEQ ID NO: 26187 - DNA, 20 bp, Artificial Sequence
  Antisense compound
actagcaagaataccacgaa

SEQ ID NO: 26188 - DNA, 20 bp, Artificial Sequence
  Antisense compound
gactagcaagaataccacga

SEQ ID NO: 26189 - DNA, 20 bp, Artificial Sequence
  Antisense compound
tgactagcaagaataccacg

SEQ ID NO: 26190 - DNA, 20 bp, Artificial Sequence
  Antisense compound
gtgactagcaagaataccac

SEQ ID NO: 26191 - DNA, 20 bp, Artificial Sequence
  Antisense compound
tgtgactagcaagaatacca

SEQ ID NO: 26192 - DNA, 20 bp, Artificial Sequence
  Antisense compound
gtgtgactagcaagaatacc

SEQ ID NO: 26193 - DNA, 20 bp, Artificial Sequence
  Antisense compound
agtgtgactagcaagaatac

SEQ ID NO: 26194 - DNA, 20 bp, Artificial Sequence
  Antisense compound
tagtgtgactagcaagaata

SEQ ID NO: 26195 - DNA, 20 bp, Artificial Sequence
  Antisense compound
ctagtgtgactagcaagaat

SEQ ID NO: 26196 - DNA, 20 bp, Artificial Sequence
  Antisense compound
gctagtgtgactagcaagaa

SEQ ID NO: 26197 - DNA, 20 bp, Artificial Sequence
  Antisense compound
ggctagtgtgactagcaaga

SEQ ID NO: 26198 - DNA, 20 bp, Artificial Sequence
  Antisense compound
tggctagtgtgactagcaag

SEQ ID NO: 26199 - DNA, 20 bp, Artificial Sequence
  Antisense compound
atggctagtgtgactagcaa

SEQ ID NO: 26200 - DNA, 20 bp, Artificial Sequence
  Antisense compound
gatggctagtgtgactagca

SEQ ID NO: 26201 - DNA, 20 bp, Artificial Sequence
  Antisense compound
ggatggctagtgtgactagc

SEQ ID NO: 26202 - DNA, 20 bp, Artificial Sequence
  Antisense compound
aggatggctagtgtgactag

SEQ ID NO: 26203 - DNA, 20 bp, Artificial Sequence
  Antisense compound
aaggatggctagtgtgacta

SEQ ID NO: 26204 - DNA, 20 bp, Artificial Sequence
  Antisense compound
taaggatggctagtgtgact

SEQ ID NO: 26205 - DNA, 20 bp, Artificial Sequence
  Antisense compound
gtaaggatggctagtgtgac

SEQ ID NO: 26206 - DNA, 20 bp, Artificial Sequence
  Antisense compound
agtaaggatggctagtgtga

SEQ ID NO: 26207 - DNA, 20 bp, Artificial Sequence
  Antisense compound
cagtaaggatggctagtgtg

SEQ ID NO: 26208 - DNA, 20 bp, Artificial Sequence
  Antisense compound
gcagtaaggatggctagtgt

SEQ ID NO: 26209 - DNA, 20 bp, Artificial Sequence
  Antisense compound
cgcagtaaggatggctagtg

SEQ ID NO: 26210 - DNA, 20 bp, Artificial Sequence
  Antisense compound
gcgcagtaaggatggctagt

SEQ ID NO: 26211 - DNA, 20 bp, Artificial Sequence
  Antisense compound
agcgcagtaaggatggctag

SEQ ID NO: 26212 - DNA, 20 bp, Artificial Sequence
  Antisense compound
aagcgcagtaaggatggcta

SEQ ID NO: 26213 - DNA, 20 bp, Artificial Sequence
  Antisense compound
gaagcgcagtaaggatggct

SEQ ID NO: 26214 - DNA, 20 bp, Artificial Sequence
  Antisense compound
cgaagcgcagtaaggatggc

SEQ ID NO: 26215 - DNA, 20 bp, Artificial Sequence
  Antisense compound
tcgaagcgcagtaaggatgg

SEQ ID NO: 26216 - DNA, 20 bp, Artificial Sequence
  Antisense compound
atcgaagcgcagtaaggatg

SEQ ID NO: 26217 - DNA, 20 bp, Artificial Sequence
  Antisense compound
aatcgaagcgcagtaaggat

SEQ ID NO: 26218 - DNA, 20 bp, Artificial Sequence
  Antisense compound
caatcgaagcgcagtaagga

SEQ ID NO: 26219 - DNA, 20 bp, Artificial Sequence
  Antisense compound
acaatcgaagcgcagtaagg

SEQ ID NO: 26220 - DNA, 20 bp, Artificial Sequence
  Antisense compound
cacaatcgaagcgcagtaag

SEQ ID NO: 26221 - DNA, 20 bp, Artificial Sequence
  Antisense compound
acacaatcgaagcgcagtaa

SEQ ID NO: 26222 - DNA, 20 bp, Artificial Sequence
  Antisense compound
cacacaatcgaagcgcagta

SEQ ID NO: 26223 - DNA, 20 bp, Artificial Sequence
  Antisense compound
gcacacaatcgaagcgcagt

SEQ ID NO: 26224 - DNA, 20 bp, Artificial Sequence
  Antisense compound
cgcacacaatcgaagcgcag

SEQ ID NO: 26225 - DNA, 20 bp, Artificial Sequence
  Antisense compound
acgcacacaatcgaagcgca

SEQ ID NO: 26226 - DNA, 20 bp, Artificial Sequence
  Antisense compound
tacgcacacaatcgaagcgc

SEQ ID NO: 26227 - DNA, 20 bp, Artificial Sequence
  Antisense compound
gtacgcacacaatcgaagcg

SEQ ID NO: 26228 - DNA, 20 bp, Artificial Sequence
  Antisense compound
agtacgcacacaatcgaagc

SEQ ID NO: 26229 - DNA, 20 bp, Artificial Sequence
  Antisense compound
cagtacgcacacaatcgaag

SEQ ID NO: 26230 - DNA, 20 bp, Artificial Sequence
  Antisense compound
gcagtacgcacacaatcgaa

SEQ ID NO: 26231 - DNA, 20 bp, Artificial Sequence
  Antisense compound
agcagtacgcacacaatcga

SEQ ID NO: 26232 - DNA, 20 bp, Artificial Sequence
  Antisense compound
cagcagtacgcacacaatcg

SEQ ID NO: 26233 - DNA, 20 bp, Artificial Sequence
  Antisense compound
gcagcagtacgcacacaatc

SEQ ID NO: 26234 - DNA, 20 bp, Artificial Sequence
  Antisense compound
tgcagcagtacgcacacaat

SEQ ID NO: 26235 - DNA, 20 bp, Artificial Sequence
  Antisense compound
ttgcagcagtacgcacacaa

SEQ ID NO: 26236 - DNA, 20 bp, Artificial Sequence
  Antisense compound
attgcagcagtacgcacaca

SEQ ID NO: 26237 - DNA, 20 bp, Artificial Sequence
  Antisense compound
tattgcagcagtacgcacac

SEQ ID NO: 26238 - DNA, 20 bp, Artificial Sequence
  Antisense compound
atattgcagcagtacgcaca

SEQ ID NO: 26239 - DNA, 20 bp, Artificial Sequence
  Antisense compound
aatattgcagcagtacgcac

SEQ ID NO: 26240 - DNA, 20 bp, Artificial Sequence
  Antisense compound
caatattgcagcagtacgca

SEQ ID NO: 26241 - DNA, 20 bp, Artificial Sequence
  Antisense compound
acaatattgcagcagtacgc

SEQ ID NO: 26242 - DNA, 20 bp, Artificial Sequence
  Antisense compound
aacaatattgcagcagtacg

SEQ ID NO: 26243 - DNA, 20 bp, Artificial Sequence
  Antisense compound
taacaatattgcagcagtac

SEQ ID NO: 26244 - DNA, 20 bp, Artificial Sequence
  Antisense compound
ttaacaatattgcagcagta

SEQ ID NO: 26245 - DNA, 20 bp, Artificial Sequence
  Antisense compound
gttaacaatattgcagcagt

SEQ ID NO: 26246 - DNA, 20 bp, Artificial Sequence
  Antisense compound
cgttaacaatattgcagcag

SEQ ID NO: 26247 - DNA, 20 bp, Artificial Sequence
  Antisense compound
acgttaacaatattgcagca

SEQ ID NO: 26248 - DNA, 20 bp, Artificial Sequence
  Antisense compound
cacgttaacaatattgcagc

SEQ ID NO: 26249 - DNA, 20 bp, Artificial Sequence
  Antisense compound
tcacgttaacaatattgcag

SEQ ID NO: 26250 - DNA, 20 bp, Artificial Sequence
  Antisense compound
ctcacgttaacaatattgca

SEQ ID NO: 26251 - DNA, 20 bp, Artificial Sequence
  Antisense compound
actcacgttaacaatattgc

SEQ ID NO: 26252 - DNA, 20 bp, Artificial Sequence
  Antisense compound
aactcacgttaacaatattg

SEQ ID NO: 26253 - DNA, 20 bp, Artificial Sequence
  Antisense compound
aaactcacgttaacaatatt

SEQ ID NO: 26254 - DNA, 20 bp, Artificial Sequence
  Antisense compound
taaactcacgttaacaatat

SEQ ID NO: 26255 - DNA, 20 bp, Artificial Sequence
  Antisense compound
ctaaactcacgttaacaata

SEQ ID NO: 26256 - DNA, 20 bp, Artificial Sequence
  Antisense compound
actaaactcacgttaacaat

SEQ ID NO: 26257 - DNA, 20 bp, Artificial Sequence
  Antisense compound
tactaaactcacgttaacaa

SEQ ID NO: 26258 - DNA, 20 bp, Artificial Sequence
  Antisense compound
ttactaaactcacgttaaca

SEQ ID NO: 26259 - DNA, 20 bp, Artificial Sequence
  Antisense compound
tttactaaactcacgttaac

SEQ ID NO: 26260 - DNA, 20 bp, Artificial Sequence
  Antisense compound
ttttactaaactcacgttaa

SEQ ID NO: 26261 - DNA, 20 bp, Artificial Sequence
  Antisense compound
gttttactaaactcacgtta

SEQ ID NO: 26262 - DNA, 20 bp, Artificial Sequence
  Antisense compound
ggttttactaaactcacgtt

SEQ ID NO: 26263 - DNA, 20 bp, Artificial Sequence
  Antisense compound
tggttttactaaactcacgt

SEQ ID NO: 26264 - DNA, 20 bp, Artificial Sequence
  Antisense compound
ttggttttactaaactcacg

SEQ ID NO: 26265 - DNA, 20 bp, Artificial Sequence
  Antisense compound
gttggttttactaaactcac

SEQ ID NO: 26266 - DNA, 20 bp, Artificial Sequence
  Antisense compound
cgttggttttactaaactca

SEQ ID NO: 26267 - DNA, 20 bp, Artificial Sequence
  Antisense compound
ccgttggttttactaaactc

SEQ ID NO: 26268 - DNA, 20 bp, Artificial Sequence
  Antisense compound
accgttggttttactaaact

SEQ ID NO: 26269 - DNA, 20 bp, Artificial Sequence
  Antisense compound
aaccgttggttttactaaac

SEQ ID NO: 26270 - DNA, 20 bp, Artificial Sequence
  Antisense compound
aaaccgttggttttactaaa

SEQ ID NO: 26271 - DNA, 20 bp, Artificial Sequence
  Antisense compound
taaaccgttggttttactaa

SEQ ID NO: 26272 - DNA, 20 bp, Artificial Sequence
  Antisense compound
gtaaaccgttggttttacta

SEQ ID NO: 26273 - DNA, 20 bp, Artificial Sequence
  Antisense compound
cgtaaaccgttggttttact

SEQ ID NO: 26274 - DNA, 20 bp, Artificial Sequence
  Antisense compound
acgtaaaccgttggttttac

SEQ ID NO: 26275 - DNA, 20 bp, Artificial Sequence
  Antisense compound
gacgtaaaccgttggtttta

SEQ ID NO: 26276 - DNA, 20 bp, Artificial Sequence
  Antisense compound
agacgtaaaccgttggtttt

SEQ ID NO: 26277 - DNA, 20 bp, Artificial Sequence
  Antisense compound
tagacgtaaaccgttggttt

SEQ ID NO: 26278 - DNA, 20 bp, Artificial Sequence
  Antisense compound
gtagacgtaaaccgttggtt

SEQ ID NO: 26279 - DNA, 20 bp, Artificial Sequence
  Antisense compound
agtagacgtaaaccgttggt

SEQ ID NO: 26280 - DNA, 20 bp, Artificial Sequence
  Antisense compound
gagtagacgtaaaccgttgg

SEQ ID NO: 26281 - DNA, 20 bp, Artificial Sequence
  Antisense compound
cgagtagacgtaaaccgttg

SEQ ID NO: 26282 - DNA, 20 bp, Artificial Sequence
  Antisense compound
gcgagtagacgtaaaccgtt

SEQ ID NO: 26283 - DNA, 20 bp, Artificial Sequence
  Antisense compound
cgcgagtagacgtaaaccgt

SEQ ID NO: 26284 - DNA, 20 bp, Artificial Sequence
  Antisense compound
acgcgagtagacgtaaaccg

SEQ ID NO: 26285 - DNA, 20 bp, Artificial Sequence
  Antisense compound
cacgcgagtagacgtaaacc

SEQ ID NO: 26286 - DNA, 20 bp, Artificial Sequence
  Antisense compound
acacgcgagtagacgtaaac

SEQ ID NO: 26287 - DNA, 20 bp, Artificial Sequence
  Antisense compound
aacacgcgagtagacgtaaa

SEQ ID NO: 26288 - DNA, 20 bp, Artificial Sequence
  Antisense compound
taacacgcgagtagacgtaa

SEQ ID NO: 26289 - DNA, 20 bp, Artificial Sequence
  Antisense compound
ttaacacgcgagtagacgta

SEQ ID NO: 26290 - DNA, 20 bp, Artificial Sequence
  Antisense compound
tttaacacgcgagtagacgt

SEQ ID NO: 26291 - DNA, 20 bp, Artificial Sequence
  Antisense compound
ttttaacacgcgagtagacg

SEQ ID NO: 26292 - DNA, 20 bp, Artificial Sequence
  Antisense compound
tttttaacacgcgagtagac

SEQ ID NO: 26293 - DNA, 20 bp, Artificial Sequence
  Antisense compound
atttttaacacgcgagtaga

SEQ ID NO: 26294 - DNA, 20 bp, Artificial Sequence
  Antisense compound
gatttttaacacgcgagtag

SEQ ID NO: 26295 - DNA, 20 bp, Artificial Sequence
  Antisense compound
agatttttaacacgcgagta

SEQ ID NO: 26296 - DNA, 20 bp, Artificial Sequence
  Antisense compound
cagatttttaacacgcgagt

SEQ ID NO: 26297 - DNA, 20 bp, Artificial Sequence
  Antisense compound
tcagatttttaacacgcgag

SEQ ID NO: 26298 - DNA, 20 bp, Artificial Sequence
  Antisense compound
ttcagatttttaacacgcga

SEQ ID NO: 26299 - DNA, 20 bp, Artificial Sequence
  Antisense compound
gttcagatttttaacacgcg

SEQ ID NO: 26300 - DNA, 20 bp, Artificial Sequence
  Antisense compound
agttcagatttttaacacgc

SEQ ID NO: 26301 - DNA, 20 bp, Artificial Sequence
  Antisense compound
gagttcagatttttaacacg

SEQ ID NO: 26302 - DNA, 20 bp, Artificial Sequence
  Antisense compound
agagttcagatttttaacac

SEQ ID NO: 26303 - DNA, 20 bp, Artificial Sequence
  Antisense compound
aagagttcagatttttaaca

SEQ ID NO: 26304 - DNA, 20 bp, Artificial Sequence
  Antisense compound
gaagagttcagatttttaac

SEQ ID NO: 26305 - DNA, 20 bp, Artificial Sequence
  Antisense compound
agaagagttcagatttttaa

SEQ ID NO: 26306 - DNA, 20 bp, Artificial Sequence
  Antisense compound
cagaagagttcagattttta

SEQ ID NO: 26307 - DNA, 20 bp, Artificial Sequence
  Antisense compound
tcagaagagttcagattttt

SEQ ID NO: 26308 - DNA, 20 bp, Artificial Sequence
  Antisense compound
ttcagaagagttcagatttt

SEQ ID NO: 26309 - DNA, 20 bp, Artificial Sequence
  Antisense compound
cttcagaagagttcagattt

SEQ ID NO: 26310 - DNA, 20 bp, Artificial Sequence
  Antisense compound
ccttcagaagagttcagatt

SEQ ID NO: 26311 - DNA, 20 bp, Artificial Sequence
  Antisense compound
tccttcagaagagttcagat

SEQ ID NO: 26312 - DNA, 20 bp, Artificial Sequence
  Antisense compound
ctccttcagaagagttcaga

SEQ ID NO: 26313 - DNA, 20 bp, Artificial Sequence
  Antisense compound
actccttcagaagagttcag

SEQ ID NO: 26314 - DNA, 20 bp, Artificial Sequence
  Antisense compound
aactccttcagaagagttca

SEQ ID NO: 26315 - DNA, 20 bp, Artificial Sequence
  Antisense compound
gaactccttcagaagagttc

SEQ ID NO: 26316 - DNA, 20 bp, Artificial Sequence
  Antisense compound
ggaactccttcagaagagtt

SEQ ID NO: 26317 - DNA, 20 bp, Artificial Sequence
  Antisense compound
aggaactccttcagaagagt

SEQ ID NO: 26318 - DNA, 20 bp, Artificial Sequence
  Antisense compound
caggaactccttcagaagag

SEQ ID NO: 26319 - DNA, 20 bp, Artificial Sequence
  Antisense compound
tcaggaactccttcagaaga

SEQ ID NO: 26320 - DNA, 20 bp, Artificial Sequence
  Antisense compound
atcaggaactccttcagaag

SEQ ID NO: 26321 - DNA, 20 bp, Artificial Sequence
  Antisense compound
gatcaggaactccttcagaa

SEQ ID NO: 26322 - DNA, 20 bp, Artificial Sequence
  Antisense compound
agatcaggaactccttcaga

SEQ ID NO: 26323 - DNA, 20 bp, Artificial Sequence
  Antisense compound
aagatcaggaactccttcag

SEQ ID NO: 26324 - DNA, 20 bp, Artificial Sequence
  Antisense compound
gaagatcaggaactccttca

SEQ ID NO: 26325 - DNA, 20 bp, Artificial Sequence
  Antisense compound
agaagatcaggaactccttc

SEQ ID NO: 26326 - DNA, 20 bp, Artificial Sequence
  Antisense compound
cagaagatcaggaactcctt

SEQ ID NO: 26327 - DNA, 20 bp, Artificial Sequence
  Antisense compound
ccagaagatcaggaactcct

SEQ ID NO: 26328 - DNA, 20 bp, Artificial Sequence
  Antisense compound
accagaagatcaggaactcc

SEQ ID NO: 26329 - DNA, 20 bp, Artificial Sequence
  Antisense compound
gaccagaagatcaggaactc

SEQ ID NO: 26330 - DNA, 20 bp, Artificial Sequence
  Antisense compound
agaccagaagatcaggaact

SEQ ID NO: 26331 - DNA, 20 bp, Artificial Sequence
  Antisense compound
tagaccagaagatcaggaac

SEQ ID NO: 26332 - DNA, 20 bp, Artificial Sequence
  Antisense compound
ttagaccagaagatcaggaa

SEQ ID NO: 26333 - DNA, 20 bp, Artificial Sequence
  Antisense compound
tttagaccagaagatcagga

SEQ ID NO: 26334 - DNA, 20 bp, Artificial Sequence
  Antisense compound
gtttagaccagaagatcagg

SEQ ID NO: 26335 - DNA, 20 bp, Artificial Sequence
  Antisense compound
cgtttagaccagaagatcag

SEQ ID NO: 26336 - DNA, 20 bp, Artificial Sequence
  Antisense compound
tcgtttagaccagaagatca

SEQ ID NO: 26337 - DNA, 20 bp, Artificial Sequence
  Antisense compound
ttcgtttagaccagaagatc

SEQ ID NO: 26338 - DNA, 20 bp, Artificial Sequence
  Antisense compound
gttcgtttagaccagaagat

SEQ ID NO: 26339 - DNA, 20 bp, Artificial Sequence
  Antisense compound
agttcgtttagaccagaaga

SEQ ID NO: 26340 - DNA, 20 bp, Artificial Sequence
  Antisense compound
tagttcgtttagaccagaag

SEQ ID NO: 26341 - DNA, 20 bp, Artificial Sequence
  Antisense compound
ttagttcgtttagaccagaa

SEQ ID NO: 26342 - DNA, 20 bp, Artificial Sequence
  Antisense compound
gttagttcgtttagaccaga

SEQ ID NO: 26343 - DNA, 20 bp, Artificial Sequence
  Antisense compound
agttagttcgtttagaccag

SEQ ID NO: 26344 - DNA, 20 bp, Artificial Sequence
  Antisense compound
tagttagttcgtttagacca

SEQ ID NO: 26345 - DNA, 20 bp, Artificial Sequence
  Antisense compound
atagttagttcgtttagacc

SEQ ID NO: 26346 - DNA, 20 bp, Artificial Sequence
  Antisense compound
aatagttagttcgtttagac

SEQ ID NO: 26347 - DNA, 20 bp, Artificial Sequence
  Antisense compound
taatagttagttcgtttaga

SEQ ID NO: 26348 - DNA, 20 bp, Artificial Sequence
  Antisense compound
ataatagttagttcgtttag

SEQ ID NO: 26349 - DNA, 20 bp, Artificial Sequence
  Antisense compound
aataatagttagttcgttta

SEQ ID NO: 26350 - DNA, 20 bp, Artificial Sequence
  Antisense compound
taataatagttagttcgttt

SEQ ID NO: 26351 - DNA, 20 bp, Artificial Sequence
  Antisense compound
ataataatagttagttcgtt

SEQ ID NO: 26352 - DNA, 20 bp, Artificial Sequence
  Antisense compound
aataataatagttagttcgt

SEQ ID NO: 26353 - DNA, 20 bp, Artificial Sequence
  Antisense compound
taataataatagttagttcg

SEQ ID NO: 26354 - DNA, 20 bp, Artificial Sequence
  Antisense compound
ataataataatagttagttc

SEQ ID NO: 26355 - DNA, 20 bp, Artificial Sequence
  Antisense compound
aataataataatagttagtt

SEQ ID NO: 26356 - DNA, 20 bp, Artificial Sequence
  Antisense compound
gaataataataatagttagt

SEQ ID NO: 26357 - DNA, 20 bp, Artificial Sequence
  Antisense compound
agaataataataatagttag

SEQ ID NO: 26358 - DNA, 20 bp, Artificial Sequence
  Antisense compound
cagaataataataatagtta

SEQ ID NO: 26359 - DNA, 20 bp, Artificial Sequence
  Antisense compound
acagaataataataatagtt

SEQ ID NO: 26360 - DNA, 20 bp, Artificial Sequence
  Antisense compound
aacagaataataataatagt

SEQ ID NO: 26361 - DNA, 20 bp, Artificial Sequence
  Antisense compound
aaacagaataataataatag

SEQ ID NO: 26362 - DNA, 20 bp, Artificial Sequence
  Antisense compound
caaacagaataataataata

SEQ ID NO: 26363 - DNA, 20 bp, Artificial Sequence
  Antisense compound
ccaaacagaataataataat

SEQ ID NO: 26364 - DNA, 20 bp, Artificial Sequence
  Antisense compound
tccaaacagaataataataa

SEQ ID NO: 26365 - DNA, 20 bp, Artificial Sequence
  Antisense compound
ttccaaacagaataataata

SEQ ID NO: 26366 - DNA, 20 bp, Artificial Sequence
  Antisense compound
gttccaaacagaataataat

SEQ ID NO: 26367 - DNA, 20 bp, Artificial Sequence
  Antisense compound
agttccaaacagaataataa

SEQ ID NO: 26368 - DNA, 20 bp, Artificial Sequence
  Antisense compound
aagttccaaacagaataata

SEQ ID NO: 26369 - DNA, 20 bp, Artificial Sequence
  Antisense compound
aaagttccaaacagaataat

SEQ ID NO: 26370 - DNA, 20 bp, Artificial Sequence
  Antisense compound
taaagttccaaacagaataa

SEQ ID NO: 26371 - DNA, 20 bp, Artificial Sequence
  Antisense compound
ttaaagttccaaacagaata

SEQ ID NO: 26372 - DNA, 20 bp, Artificial Sequence
  Antisense compound
gttaaagttccaaacagaat

SEQ ID NO: 26373 - DNA, 20 bp, Artificial Sequence
  Antisense compound
tgttaaagttccaaacagaa

SEQ ID NO: 26374 - DNA, 20 bp, Artificial Sequence
  Antisense compound
atgttaaagttccaaacaga

SEQ ID NO: 26375 - DNA, 20 bp, Artificial Sequence
  Antisense compound
aatgttaaagttccaaacag

SEQ ID NO: 26376 - DNA, 20 bp, Artificial Sequence
  Antisense compound
caatgttaaagttccaaaca

SEQ ID NO: 26377 - DNA, 20 bp, Artificial Sequence
  Antisense compound
gcaatgttaaagttccaaac

SEQ ID NO: 26378 - DNA, 20 bp, Artificial Sequence
  Antisense compound
agcaatgttaaagttccaaa

SEQ ID NO: 26379 - DNA, 20 bp, Artificial Sequence
  Antisense compound
aagcaatgttaaagttccaa

SEQ ID NO: 26380 - DNA, 20 bp, Artificial Sequence
  Antisense compound
taagcaatgttaaagttcca

SEQ ID NO: 26381 - DNA, 20 bp, Artificial Sequence
  Antisense compound
ataagcaatgttaaagttcc

SEQ ID NO: 26382 - DNA, 20 bp, Artificial Sequence
  Antisense compound
gataagcaatgttaaagttc

SEQ ID NO: 26383 - DNA, 20 bp, Artificial Sequence
  Antisense compound
tgataagcaatgttaaagtt

SEQ ID NO: 26384 - DNA, 20 bp, Artificial Sequence
  Antisense compound
atgataagcaatgttaaagt

SEQ ID NO: 26385 - DNA, 20 bp, Artificial Sequence
  Antisense compound
catgataagcaatgttaaag

SEQ ID NO: 26386 - DNA, 20 bp, Artificial Sequence
  Antisense compound
ccatgataagcaatgttaaa

SEQ ID NO: 26387 - DNA, 20 bp, Artificial Sequence
  Antisense compound
gccatgataagcaatgttaa

SEQ ID NO: 26388 - DNA, 20 bp, Artificial Sequence
  Antisense compound
tgccatgataagcaatgtta

SEQ ID NO: 26389 - DNA, 20 bp, Artificial Sequence
  Antisense compound
ctgccatgataagcaatgtt

SEQ ID NO: 26390 - DNA, 20 bp, Artificial Sequence
  Antisense compound
tctgccatgataagcaatgt

SEQ ID NO: 26391 - DNA, 20 bp, Artificial Sequence
  Antisense compound
gtctgccatgataagcaatg

SEQ ID NO: 26392 - DNA, 20 bp, Artificial Sequence
  Antisense compound
tgtctgccatgataagcaat

SEQ ID NO: 26393 - DNA, 20 bp, Artificial Sequence
  Antisense compound
ttgtctgccatgataagcaa

SEQ ID NO: 26394 - DNA, 20 bp, Artificial Sequence
  Antisense compound
gttgtctgccatgataagca

SEQ ID NO: 26395 - DNA, 20 bp, Artificial Sequence
  Antisense compound
cgttgtctgccatgataagc

SEQ ID NO: 26396 - DNA, 20 bp, Artificial Sequence
  Antisense compound
ccgttgtctgccatgataag

SEQ ID NO: 26397 - DNA, 20 bp, Artificial Sequence
  Antisense compound
accgttgtctgccatgataa

SEQ ID NO: 26398 - DNA, 20 bp, Artificial Sequence
  Antisense compound
taccgttgtctgccatgata

SEQ ID NO: 26399 - DNA, 20 bp, Artificial Sequence
  Antisense compound
gtaccgttgtctgccatgat

SEQ ID NO: 26400 - DNA, 20 bp, Artificial Sequence
  Antisense compound
agtaccgttgtctgccatga

SEQ ID NO: 26401 - DNA, 20 bp, Artificial Sequence
  Antisense compound
tagtaccgttgtctgccatg

SEQ ID NO: 26402 - DNA, 20 bp, Artificial Sequence
  Antisense compound
atagtaccgttgtctgccat

SEQ ID NO: 26403 - DNA, 20 bp, Artificial Sequence
  Antisense compound
aatagtaccgttgtctgcca

SEQ ID NO: 26404 - DNA, 20 bp, Artificial Sequence
  Antisense compound
taatagtaccgttgtctgcc

SEQ ID NO: 26405 - DNA, 20 bp, Artificial Sequence
  Antisense compound
gtaatagtaccgttgtctgc

SEQ ID NO: 26406 - DNA, 20 bp, Artificial Sequence
  Antisense compound
ggtaatagtaccgttgtctg

SEQ ID NO: 26407 - DNA, 20 bp, Artificial Sequence
  Antisense compound
cggtaatagtaccgttgtct

SEQ ID NO: 26408 - DNA, 20 bp, Artificial Sequence
  Antisense compound
acggtaatagtaccgttgtc

SEQ ID NO: 26409 - DNA, 20 bp, Artificial Sequence
  Antisense compound
aacggtaatagtaccgttgt

SEQ ID NO: 26410 - DNA, 20 bp, Artificial Sequence
  Antisense compound
caacggtaatagtaccgttg

SEQ ID NO: 26411 - DNA, 20 bp, Artificial Sequence
  Antisense compound
tcaacggtaatagtaccgtt

SEQ ID NO: 26412 - DNA, 20 bp, Artificial Sequence
  Antisense compound
ctcaacggtaatagtaccgt

SEQ ID NO: 26413 - DNA, 20 bp, Artificial Sequence
  Antisense compound
cctcaacggtaatagtaccg

SEQ ID NO: 26414 - DNA, 20 bp, Artificial Sequence
  Antisense compound
tcctcaacggtaatagtacc

SEQ ID NO: 26415 - DNA, 20 bp, Artificial Sequence
  Antisense compound
ctcctcaacggtaatagtac

SEQ ID NO: 26416 - DNA, 20 bp, Artificial Sequence
  Antisense compound
gctcctcaacggtaatagta

SEQ ID NO: 26417 - DNA, 20 bp, Artificial Sequence
  Antisense compound
agctcctcaacggtaatagt

SEQ ID NO: 26418 - DNA, 20 bp, Artificial Sequence
  Antisense compound
aagctcctcaacggtaatag

SEQ ID NO: 26419 - DNA, 20 bp, Artificial Sequence
  Antisense compound
taagctcctcaacggtaata

SEQ ID NO: 26420 - DNA, 20 bp, Artificial Sequence
  Antisense compound
ttaagctcctcaacggtaat

SEQ ID NO: 26421 - DNA, 20 bp, Artificial Sequence
  Antisense compound
tttaagctcctcaacggtaa

SEQ ID NO: 26422 - DNA, 20 bp, Artificial Sequence
  Antisense compound
gtttaagctcctcaacggta

SEQ ID NO: 26423 - DNA, 20 bp, Artificial Sequence
  Antisense compound
tgtttaagctcctcaacggt

SEQ ID NO: 26424 - DNA, 20 bp, Artificial Sequence
  Antisense compound
ttgtttaagctcctcaacgg

SEQ ID NO: 26425 - DNA, 20 bp, Artificial Sequence
  Antisense compound
gttgtttaagctcctcaacg

SEQ ID NO: 26426 - DNA, 20 bp, Artificial Sequence
  Antisense compound
agttgtttaagctcctcaac

SEQ ID NO: 26427 - DNA, 20 bp, Artificial Sequence
  Antisense compound
gagttgtttaagctcctcaa

SEQ ID NO: 26428 - DNA, 20 bp, Artificial Sequence
  Antisense compound
ggagttgtttaagctcctca

SEQ ID NO: 26429 - DNA, 20 bp, Artificial Sequence
  Antisense compound
aggagttgtttaagctcctc

SEQ ID NO: 26430 - DNA, 20 bp, Artificial Sequence
  Antisense compound
caggagttgtttaagctcct

SEQ ID NO: 26431 - DNA, 20 bp, Artificial Sequence
  Antisense compound
ccaggagttgtttaagctcc

SEQ ID NO: 26432 - DNA, 20 bp, Artificial Sequence
  Antisense compound
tccaggagttgtttaagctc

SEQ ID NO: 26433 - DNA, 20 bp, Artificial Sequence
  Antisense compound
ttccaggagttgtttaagct

SEQ ID NO: 26434 - DNA, 20 bp, Artificial Sequence
  Antisense compound
gttccaggagttgtttaagc

SEQ ID NO: 26435 - DNA, 20 bp, Artificial Sequence
  Antisense compound
tgttccaggagttgtttaag

SEQ ID NO: 26436 - DNA, 20 bp, Artificial Sequence
  Antisense compound
ttgttccaggagttgtttaa

SEQ ID NO: 26437 - DNA, 20 bp, Artificial Sequence
  Antisense compound
attgttccaggagttgttta

SEQ ID NO: 26438 - DNA, 20 bp, Artificial Sequence
  Antisense compound
cattgttccaggagttgttt

SEQ ID NO: 26439 - DNA, 20 bp, Artificial Sequence
  Antisense compound
ccattgttccaggagttgtt

SEQ ID NO: 26440 - DNA, 20 bp, Artificial Sequence
  Antisense compound
tccattgttccaggagttgt

SEQ ID NO: 26441 - DNA, 20 bp, Artificial Sequence
  Antisense compound
ttccattgttccaggagttg

SEQ ID NO: 26442 - DNA, 20 bp, Artificial Sequence
  Antisense compound
gttccattgttccaggagtt

SEQ ID NO: 26443 - DNA, 20 bp, Artificial Sequence
  Antisense compound
ggttccattgttccaggagt

SEQ ID NO: 26444 - DNA, 20 bp, Artificial Sequence
  Antisense compound
aggttccattgttccaggag

SEQ ID NO: 26445 - DNA, 20 bp, Artificial Sequence
  Antisense compound
taggttccattgttccagga

SEQ ID NO: 26446 - DNA, 20 bp, Artificial Sequence
  Antisense compound
ctaggttccattgttccagg

SEQ ID NO: 26447 - DNA, 20 bp, Artificial Sequence
  Antisense compound
actaggttccattgttccag

SEQ ID NO: 26448 - DNA, 20 bp, Artificial Sequence
  Antisense compound
tactaggttccattgttcca

SEQ ID NO: 26449 - DNA, 20 bp, Artificial Sequence
  Antisense compound
ttactaggttccattgttcc

SEQ ID NO: 26450 - DNA, 20 bp, Artificial Sequence
  Antisense compound
attactaggttccattgttc

SEQ ID NO: 26451 - DNA, 20 bp, Artificial Sequence
  Antisense compound
tattactaggttccattgtt

SEQ ID NO: 26452 - DNA, 20 bp, Artificial Sequence
  Antisense compound
ctattactaggttccattgt

SEQ ID NO: 26453 - DNA, 20 bp, Artificial Sequence
  Antisense compound
cctattactaggttccattg

SEQ ID NO: 26454 - DNA, 20 bp, Artificial Sequence
  Antisense compound
acctattactaggttccatt

SEQ ID NO: 26455 - DNA, 20 bp, Artificial Sequence
  Antisense compound
aacctattactaggttccat

SEQ ID NO: 26456 - DNA, 20 bp, Artificial Sequence
  Antisense compound
aaacctattactaggttcca

SEQ ID NO: 26457 - DNA, 20 bp, Artificial Sequence
  Antisense compound
gaaacctattactaggttcc

SEQ ID NO: 26458 - DNA, 20 bp, Artificial Sequence
  Antisense compound
ggaaacctattactaggttc

SEQ ID NO: 26459 - DNA, 20 bp, Artificial Sequence
  Antisense compound
aggaaacctattactaggtt

SEQ ID NO: 26460 - DNA, 20 bp, Artificial Sequence
  Antisense compound
taggaaacctattactaggt

SEQ ID NO: 26461 - DNA, 20 bp, Artificial Sequence
  Antisense compound
ataggaaacctattactagg

SEQ ID NO: 26462 - DNA, 20 bp, Artificial Sequence
  Antisense compound
aataggaaacctattactag

SEQ ID NO: 26463 - DNA, 20 bp, Artificial Sequence
  Antisense compound
gaataggaaacctattacta

SEQ ID NO: 26464 - DNA, 20 bp, Artificial Sequence
  Antisense compound
ggaataggaaacctattact

SEQ ID NO: 26465 - DNA, 20 bp, Artificial Sequence
  Antisense compound
aggaataggaaacctattac

SEQ ID NO: 26466 - DNA, 20 bp, Artificial Sequence
  Antisense compound
taggaataggaaacctatta

SEQ ID NO: 26467 - DNA, 20 bp, Artificial Sequence
  Antisense compound
ctaggaataggaaacctatt

SEQ ID NO: 26468 - DNA, 20 bp, Artificial Sequence
  Antisense compound
gctaggaataggaaacctat

SEQ ID NO: 26469 - DNA, 20 bp, Artificial Sequence
  Antisense compound
ggctaggaataggaaaccta

SEQ ID NO: 26470 - DNA, 20 bp, Artificial Sequence
  Antisense compound
aggctaggaataggaaacct

SEQ ID NO: 26471 - DNA, 20 bp, Artificial Sequence
  Antisense compound
caggctaggaataggaaacc

SEQ ID NO: 26472 - DNA, 20 bp, Artificial Sequence
  Antisense compound
ccaggctaggaataggaaac

SEQ ID NO: 26473 - DNA, 20 bp, Artificial Sequence
  Antisense compound
tccaggctaggaataggaaa

SEQ ID NO: 26474 - DNA, 20 bp, Artificial Sequence
  Antisense compound
atccaggctaggaataggaa

SEQ ID NO: 26475 - DNA, 20 bp, Artificial Sequence
  Antisense compound
aatccaggctaggaatagga

SEQ ID NO: 26476 - DNA, 20 bp, Artificial Sequence
  Antisense compound
taatccaggctaggaatagg

SEQ ID NO: 26477 - DNA, 20 bp, Artificial Sequence
  Antisense compound
ataatccaggctaggaatag

SEQ ID NO: 26478 - DNA, 20 bp, Artificial Sequence
  Antisense compound
cataatccaggctaggaata

SEQ ID NO: 26479 - DNA, 20 bp, Artificial Sequence
  Antisense compound
acataatccaggctaggaat

SEQ ID NO: 26480 - DNA, 20 bp, Artificial Sequence
  Antisense compound
aacataatccaggctaggaa

SEQ ID NO: 26481 - DNA, 20 bp, Artificial Sequence
  Antisense compound
taacataatccaggctagga

SEQ ID NO: 26482 - DNA, 20 bp, Artificial Sequence
  Antisense compound
gtaacataatccaggctagg

SEQ ID NO: 26483 - DNA, 20 bp, Artificial Sequence
  Antisense compound
agtaacataatccaggctag

SEQ ID NO: 26484 - DNA, 20 bp, Artificial Sequence
  Antisense compound
tagtaacataatccaggcta

SEQ ID NO: 26485 - DNA, 20 bp, Artificial Sequence
  Antisense compound
gtagtaacataatccaggct

SEQ ID NO: 26486 - DNA, 20 bp, Artificial Sequence
  Antisense compound
tgtagtaacataatccaggc

SEQ ID NO: 26487 - DNA, 20 bp, Artificial Sequence
  Antisense compound
ttgtagtaacataatccagg

SEQ ID NO: 26488 - DNA, 20 bp, Artificial Sequence
  Antisense compound
attgtagtaacataatccag

SEQ ID NO: 26489 - DNA, 20 bp, Artificial Sequence
  Antisense compound
aattgtagtaacataatcca

SEQ ID NO: 26490 - DNA, 20 bp, Artificial Sequence
  Antisense compound
aaattgtagtaacataatcc

SEQ ID NO: 26491 - DNA, 20 bp, Artificial Sequence
  Antisense compound
caaattgtagtaacataatc

SEQ ID NO: 26492 - DNA, 20 bp, Artificial Sequence
  Antisense compound
gcaaattgtagtaacataat

SEQ ID NO: 26493 - DNA, 20 bp, Artificial Sequence
  Antisense compound
ggcaaattgtagtaacataa

SEQ ID NO: 26494 - DNA, 20 bp, Artificial Sequence
  Antisense compound
aggcaaattgtagtaacata

SEQ ID NO: 26495 - DNA, 20 bp, Artificial Sequence
  Antisense compound
taggcaaattgtagtaacat

SEQ ID NO: 26496 - DNA, 20 bp, Artificial Sequence
  Antisense compound
ataggcaaattgtagtaaca

SEQ ID NO: 26497 - DNA, 20 bp, Artificial Sequence
  Antisense compound
aataggcaaattgtagtaac

SEQ ID NO: 26498 - DNA, 20 bp, Artificial Sequence
  Antisense compound
gaataggcaaattgtagtaa

SEQ ID NO: 26499 - DNA, 20 bp, Artificial Sequence
  Antisense compound
agaataggcaaattgtagta

SEQ ID NO: 26500 - DNA, 20 bp, Artificial Sequence
  Antisense compound
tagaataggcaaattgtagt

SEQ ID NO: 26501 - DNA, 20 bp, Artificial Sequence
  Antisense compound
ttagaataggcaaattgtag

SEQ ID NO: 26502 - DNA, 20 bp, Artificial Sequence
  Antisense compound
attagaataggcaaattgta

SEQ ID NO: 26503 - DNA, 20 bp, Artificial Sequence
  Antisense compound
gattagaataggcaaattgt

SEQ ID NO: 26504 - DNA, 20 bp, Artificial Sequence
  Antisense compound
cgattagaataggcaaattg

SEQ ID NO: 26505 - DNA, 20 bp, Artificial Sequence
  Antisense compound
ccgattagaataggcaaatt

SEQ ID NO: 26506 - DNA, 20 bp, Artificial Sequence
  Antisense compound
tccgattagaataggcaaat

SEQ ID NO: 26507 - DNA, 20 bp, Artificial Sequence
  Antisense compound
ttccgattagaataggcaaa

SEQ ID NO: 26508 - DNA, 20 bp, Artificial Sequence
  Antisense compound
gttccgattagaataggcaa

SEQ ID NO: 26509 - DNA, 20 bp, Artificial Sequence
  Antisense compound
tgttccgattagaataggca

SEQ ID NO: 26510 - DNA, 20 bp, Artificial Sequence
  Antisense compound
ctgttccgattagaataggc

SEQ ID NO: 26511 - DNA, 20 bp, Artificial Sequence
  Antisense compound
cctgttccgattagaatagg

SEQ ID NO: 26512 - DNA, 20 bp, Artificial Sequence
  Antisense compound
acctgttccgattagaatag

SEQ ID NO: 26513 - DNA, 20 bp, Artificial Sequence
  Antisense compound
aacctgttccgattagaata

SEQ ID NO: 26514 - DNA, 20 bp, Artificial Sequence
  Antisense compound
aaacctgttccgattagaat

SEQ ID NO: 26515 - DNA, 20 bp, Artificial Sequence
  Antisense compound
aaaacctgttccgattagaa

SEQ ID NO: 26516 - DNA, 20 bp, Artificial Sequence
  Antisense compound
aaaaacctgttccgattaga

SEQ ID NO: 26517 - DNA, 20 bp, Artificial Sequence
  Antisense compound
caaaaacctgttccgattag

SEQ ID NO: 26518 - DNA, 20 bp, Artificial Sequence
  Antisense compound
acaaaaacctgttccgatta

SEQ ID NO: 26519 - DNA, 20 bp, Artificial Sequence
  Antisense compound
tacaaaaacctgttccgatt

SEQ ID NO: 26520 - DNA, 20 bp, Artificial Sequence
  Antisense compound
gtacaaaaacctgttccgat

SEQ ID NO: 26521 - DNA, 20 bp, Artificial Sequence
  Antisense compound
tgtacaaaaacctgttccga

SEQ ID NO: 26522 - DNA, 20 bp, Artificial Sequence
  Antisense compound
atgtacaaaaacctgttccg

SEQ ID NO: 26523 - DNA, 20 bp, Artificial Sequence
  Antisense compound
tatgtacaaaaacctgttcc

SEQ ID NO: 26524 - DNA, 20 bp, Artificial Sequence
  Antisense compound
ttatgtacaaaaacctgttc

SEQ ID NO: 26525 - DNA, 20 bp, Artificial Sequence
  Antisense compound
attatgtacaaaaacctgtt

SEQ ID NO: 26526 - DNA, 20 bp, Artificial Sequence
  Antisense compound
tattatgtacaaaaacctgt

SEQ ID NO: 26527 - DNA, 20 bp, Artificial Sequence
  Antisense compound
ttattatgtacaaaaacctg

SEQ ID NO: 26528 - DNA, 20 bp, Artificial Sequence
  Antisense compound
tttattatgtacaaaaacct

SEQ ID NO: 26529 - DNA, 20 bp, Artificial Sequence
  Antisense compound
ctttattatgtacaaaaacc

SEQ ID NO: 26530 - DNA, 20 bp, Artificial Sequence
  Antisense compound
gctttattatgtacaaaaac

SEQ ID NO: 26531 - DNA, 20 bp, Artificial Sequence
  Antisense compound
agctttattatgtacaaaaa

SEQ ID NO: 26532 - DNA, 20 bp, Artificial Sequence
  Antisense compound
aagctttattatgtacaaaa

SEQ ID NO: 26533 - DNA, 20 bp, Artificial Sequence
  Antisense compound
caagctttattatgtacaaa

SEQ ID NO: 26534 - DNA, 20 bp, Artificial Sequence
  Antisense compound
acaagctttattatgtacaa

SEQ ID NO: 26535 - DNA, 20 bp, Artificial Sequence
  Antisense compound
aacaagctttattatgtaca

SEQ ID NO: 26536 - DNA, 20 bp, Artificial Sequence
  Antisense compound
aaacaagctttattatgtac

SEQ ID NO: 26537 - DNA, 20 bp, Artificial Sequence
  Antisense compound
aaaacaagctttattatgta

SEQ ID NO: 26538 - DNA, 20 bp, Artificial Sequence
  Antisense compound
gaaaacaagctttattatgt

SEQ ID NO: 26539 - DNA, 20 bp, Artificial Sequence
  Antisense compound
ggaaaacaagctttattatg

SEQ ID NO: 26540 - DNA, 20 bp, Artificial Sequence
  Antisense compound
aggaaaacaagctttattat

SEQ ID NO: 26541 - DNA, 20 bp, Artificial Sequence
  Antisense compound
gaggaaaacaagctttatta

SEQ ID NO: 26542 - DNA, 20 bp, Artificial Sequence
  Antisense compound
agaggaaaacaagctttatt

SEQ ID NO: 26543 - DNA, 20 bp, Artificial Sequence
  Antisense compound
cagaggaaaacaagctttat

SEQ ID NO: 26544 - DNA, 20 bp, Artificial Sequence
  Antisense compound
ccagaggaaaacaagcttta

SEQ ID NO: 26545 - DNA, 20 bp, Artificial Sequence
  Antisense compound
gccagaggaaaacaagcttt

SEQ ID NO: 26546 - DNA, 20 bp, Artificial Sequence
  Antisense compound
agccagaggaaaacaagctt

SEQ ID NO: 26547 - DNA, 20 bp, Artificial Sequence
  Antisense compound
gagccagaggaaaacaagct

SEQ ID NO: 26548 - DNA, 20 bp, Artificial Sequence
  Antisense compound
agagccagaggaaaacaagc

SEQ ID NO: 26549 - DNA, 20 bp, Artificial Sequence
  Antisense compound
aagagccagaggaaaacaag

SEQ ID NO: 26550 - DNA, 20 bp, Artificial Sequence
  Antisense compound
caagagccagaggaaaacaa

SEQ ID NO: 26551 - DNA, 20 bp, Artificial Sequence
  Antisense compound
acaagagccagaggaaaaca

SEQ ID NO: 26552 - DNA, 20 bp, Artificial Sequence
  Antisense compound
cacaagagccagaggaaaac

SEQ ID NO: 26553 - DNA, 20 bp, Artificial Sequence
  Antisense compound
ccacaagagccagaggaaaa

SEQ ID NO: 26554 - DNA, 20 bp, Artificial Sequence
  Antisense compound
gccacaagagccagaggaaa

SEQ ID NO: 26555 - DNA, 20 bp, Artificial Sequence
  Antisense compound
ggccacaagagccagaggaa

SEQ ID NO: 26556 - DNA, 20 bp, Artificial Sequence
  Antisense compound
tggccacaagagccagagga

SEQ ID NO: 26557 - DNA, 20 bp, Artificial Sequence
  Antisense compound
ctggccacaagagccagagg

SEQ ID NO: 26558 - DNA, 20 bp, Artificial Sequence
  Antisense compound
actggccacaagagccagag

SEQ ID NO: 26559 - DNA, 20 bp, Artificial Sequence
  Antisense compound
tactggccacaagagccaga

SEQ ID NO: 26560 - DNA, 20 bp, Artificial Sequence
  Antisense compound
ttactggccacaagagccag

SEQ ID NO: 26561 - DNA, 20 bp, Artificial Sequence
  Antisense compound
gttactggccacaagagcca

SEQ ID NO: 26562 - DNA, 20 bp, Artificial Sequence
  Antisense compound
tgttactggccacaagagcc

SEQ ID NO: 26563 - DNA, 20 bp, Artificial Sequence
  Antisense compound
gtgttactggccacaagagc

SEQ ID NO: 26564 - DNA, 20 bp, Artificial Sequence
  Antisense compound
agtgttactggccacaagag

SEQ ID NO: 26565 - DNA, 20 bp, Artificial Sequence
  Antisense compound
aagtgttactggccacaaga

SEQ ID NO: 26566 - DNA, 20 bp, Artificial Sequence
  Antisense compound
caagtgttactggccacaag

SEQ ID NO: 26567 - DNA, 20 bp, Artificial Sequence
  Antisense compound
gcaagtgttactggccacaa

SEQ ID NO: 26568 - DNA, 20 bp, Artificial Sequence
  Antisense compound
agcaagtgttactggccaca

SEQ ID NO: 26569 - DNA, 20 bp, Artificial Sequence
  Antisense compound
aagcaagtgttactggccac

SEQ ID NO: 26570 - DNA, 20 bp, Artificial Sequence
  Antisense compound
caagcaagtgttactggcca

SEQ ID NO: 26571 - DNA, 20 bp, Artificial Sequence
  Antisense compound
acaagcaagtgttactggcc

SEQ ID NO: 26572 - DNA, 20 bp, Artificial Sequence
  Antisense compound
aacaagcaagtgttactggc

SEQ ID NO: 26573 - DNA, 20 bp, Artificial Sequence
  Antisense compound
aaacaagcaagtgttactgg

SEQ ID NO: 26574 - DNA, 20 bp, Artificial Sequence
  Antisense compound
aaaacaagcaagtgttactg

SEQ ID NO: 26575 - DNA, 20 bp, Artificial Sequence
  Antisense compound
caaaacaagcaagtgttact

SEQ ID NO: 26576 - DNA, 20 bp, Artificial Sequence
  Antisense compound
acaaaacaagcaagtgttac

SEQ ID NO: 26577 - DNA, 20 bp, Artificial Sequence
  Antisense compound
cacaaaacaagcaagtgtta

SEQ ID NO: 26578 - DNA, 20 bp, Artificial Sequence
  Antisense compound
gcacaaaacaagcaagtgtt

SEQ ID NO: 26579 - DNA, 20 bp, Artificial Sequence
  Antisense compound
agcacaaaacaagcaagtgt

SEQ ID NO: 26580 - DNA, 20 bp, Artificial Sequence
  Antisense compound
aagcacaaaacaagcaagtg

SEQ ID NO: 26581 - DNA, 20 bp, Artificial Sequence
  Antisense compound
caagcacaaaacaagcaagt

SEQ ID NO: 26582 - DNA, 20 bp, Artificial Sequence
  Antisense compound
gcaagcacaaaacaagcaag

SEQ ID NO: 26583 - DNA, 20 bp, Artificial Sequence
  Antisense compound
agcaagcacaaaacaagcaa

SEQ ID NO: 26584 - DNA, 20 bp, Artificial Sequence
  Antisense compound
cagcaagcacaaaacaagca

SEQ ID NO: 26585 - DNA, 20 bp, Artificial Sequence
  Antisense compound
gcagcaagcacaaaacaagc

SEQ ID NO: 26586 - DNA, 20 bp, Artificial Sequence
  Antisense compound
agcagcaagcacaaaacaag

SEQ ID NO: 26587 - DNA, 20 bp, Artificial Sequence
  Antisense compound
cagcagcaagcacaaaacaa

SEQ ID NO: 26588 - DNA, 20 bp, Artificial Sequence
  Antisense compound
acagcagcaagcacaaaaca

SEQ ID NO: 26589 - DNA, 20 bp, Artificial Sequence
  Antisense compound
gacagcagcaagcacaaaac

SEQ ID NO: 26590 - DNA, 20 bp, Artificial Sequence
  Antisense compound
agacagcagcaagcacaaaa

SEQ ID NO: 26591 - DNA, 20 bp, Artificial Sequence
  Antisense compound
tagacagcagcaagcacaaa

SEQ ID NO: 26592 - DNA, 20 bp, Artificial Sequence
  Antisense compound
gtagacagcagcaagcacaa

SEQ ID NO: 26593 - DNA, 20 bp, Artificial Sequence
  Antisense compound
tgtagacagcagcaagcaca

SEQ ID NO: 26594 - DNA, 20 bp, Artificial Sequence
  Antisense compound
ctgtagacagcagcaagcac

SEQ ID NO: 26595 - DNA, 20 bp, Artificial Sequence
  Antisense compound
tctgtagacagcagcaagca

SEQ ID NO: 26596 - DNA, 20 bp, Artificial Sequence
  Antisense compound
ttctgtagacagcagcaagc

SEQ ID NO: 26597 - DNA, 20 bp, Artificial Sequence
  Antisense compound
attctgtagacagcagcaag

SEQ ID NO: 26598 - DNA, 20 bp, Artificial Sequence
  Antisense compound
aattctgtagacagcagcaa

SEQ ID NO: 26599 - DNA, 20 bp, Artificial Sequence
  Antisense compound
taattctgtagacagcagca

SEQ ID NO: 26600 - DNA, 20 bp, Artificial Sequence
  Antisense compound
ttaattctgtagacagcagc

SEQ ID NO: 26601 - DNA, 20 bp, Artificial Sequence
  Antisense compound
attaattctgtagacagcag

SEQ ID NO: 26602 - DNA, 20 bp, Artificial Sequence
  Antisense compound
aattaattctgtagacagca

SEQ ID NO: 26603 - DNA, 20 bp, Artificial Sequence
  Antisense compound
caattaattctgtagacagc

SEQ ID NO: 26604 - DNA, 20 bp, Artificial Sequence
  Antisense compound
ccaattaattctgtagacag

SEQ ID NO: 26605 - DNA, 20 bp, Artificial Sequence
  Antisense compound
cccaattaattctgtagaca

SEQ ID NO: 26606 - DNA, 20 bp, Artificial Sequence
  Antisense compound
acccaattaattctgtagac

SEQ ID NO: 26607 - DNA, 20 bp, Artificial Sequence
  Antisense compound
cacccaattaattctgtaga

SEQ ID NO: 26608 - DNA, 20 bp, Artificial Sequence
  Antisense compound
tcacccaattaattctgtag

SEQ ID NO: 26609 - DNA, 20 bp, Artificial Sequence
  Antisense compound
gtcacccaattaattctgta

SEQ ID NO: 26610 - DNA, 20 bp, Artificial Sequence
  Antisense compound
agtcacccaattaattctgt

SEQ ID NO: 26611 - DNA, 20 bp, Artificial Sequence
  Antisense compound
cagtcacccaattaattctg

SEQ ID NO: 26612 - DNA, 20 bp, Artificial Sequence
  Antisense compound
ccagtcacccaattaattct

SEQ ID NO: 26613 - DNA, 20 bp, Artificial Sequence
  Antisense compound
gccagtcacccaattaattc

SEQ ID NO: 26614 - DNA, 20 bp, Artificial Sequence
  Antisense compound
cgccagtcacccaattaatt

SEQ ID NO: 26615 - DNA, 20 bp, Artificial Sequence
  Antisense compound
ccgccagtcacccaattaat

SEQ ID NO: 26616 - DNA, 20 bp, Artificial Sequence
  Antisense compound
cccgccagtcacccaattaa

SEQ ID NO: 26617 - DNA, 20 bp, Artificial Sequence
  Antisense compound
tcccgccagtcacccaatta

SEQ ID NO: 26618 - DNA, 20 bp, Artificial Sequence
  Antisense compound
atcccgccagtcacccaatt

SEQ ID NO: 26619 - DNA, 20 bp, Artificial Sequence
  Antisense compound
aatcccgccagtcacccaat

SEQ ID NO: 26620 - DNA, 20 bp, Artificial Sequence
  Antisense compound
caatcccgccagtcacccaa

SEQ ID NO: 26621 - DNA, 20 bp, Artificial Sequence
  Antisense compound
gcaatcccgccagtcaccca

SEQ ID NO: 26622 - DNA, 20 bp, Artificial Sequence
  Antisense compound
cgcaatcccgccagtcaccc

SEQ ID NO: 26623 - DNA, 20 bp, Artificial Sequence
  Antisense compound
tcgcaatcccgccagtcacc

SEQ ID NO: 26624 - DNA, 20 bp, Artificial Sequence
  Antisense compound
atcgcaatcccgccagtcac

SEQ ID NO: 26625 - DNA, 20 bp, Artificial Sequence
  Antisense compound
aatcgcaatcccgccagtca

SEQ ID NO: 26626 - DNA, 20 bp, Artificial Sequence
  Antisense compound
caatcgcaatcccgccagtc

SEQ ID NO: 26627 - DNA, 20 bp, Artificial Sequence
  Antisense compound
gcaatcgcaatcccgccagt

SEQ ID NO: 26628 - DNA, 20 bp, Artificial Sequence
  Antisense compound
tgcaatcgcaatcccgccag

SEQ ID NO: 26629 - DNA, 20 bp, Artificial Sequence
  Antisense compound
ttgcaatcgcaatcccgcca

SEQ ID NO: 26630 - DNA, 20 bp, Artificial Sequence
  Antisense compound
attgcaatcgcaatcccgcc

SEQ ID NO: 26631 - DNA, 20 bp, Artificial Sequence
  Antisense compound
cattgcaatcgcaatcccgc

SEQ ID NO: 26632 - DNA, 20 bp, Artificial Sequence
  Antisense compound
ccattgcaatcgcaatcccg

SEQ ID NO: 26633 - DNA, 20 bp, Artificial Sequence
  Antisense compound
gccattgcaatcgcaatccc

SEQ ID NO: 26634 - DNA, 20 bp, Artificial Sequence
  Antisense compound
agccattgcaatcgcaatcc

SEQ ID NO: 26635 - DNA, 20 bp, Artificial Sequence
  Antisense compound
aagccattgcaatcgcaatc

SEQ ID NO: 26636 - DNA, 20 bp, Artificial Sequence
  Antisense compound
caagccattgcaatcgcaat

SEQ ID NO: 26637 - DNA, 20 bp, Artificial Sequence
  Antisense compound
acaagccattgcaatcgcaa

SEQ ID NO: 26638 - DNA, 20 bp, Artificial Sequence
  Antisense compound
tacaagccattgcaatcgca

SEQ ID NO: 26639 - DNA, 20 bp, Artificial Sequence
  Antisense compound
atacaagccattgcaatcgc

SEQ ID NO: 26640 - DNA, 20 bp, Artificial Sequence
  Antisense compound
aatacaagccattgcaatcg

SEQ ID NO: 26641 - DNA, 20 bp, Artificial Sequence
  Antisense compound
caatacaagccattgcaatc

SEQ ID NO: 26642 - DNA, 20 bp, Artificial Sequence
  Antisense compound
acaatacaagccattgcaat

SEQ ID NO: 26643 - DNA, 20 bp, Artificial Sequence
  Antisense compound
tacaatacaagccattgcaa

SEQ ID NO: 26644 - DNA, 20 bp, Artificial Sequence
  Antisense compound
ctacaatacaagccattgca

SEQ ID NO: 26645 - DNA, 20 bp, Artificial Sequence
  Antisense compound
cctacaatacaagccattgc

SEQ ID NO: 26646 - DNA, 20 bp, Artificial Sequence
  Antisense compound
gcctacaatacaagccattg

SEQ ID NO: 26647 - DNA, 20 bp, Artificial Sequence
  Antisense compound
agcctacaatacaagccatt

SEQ ID NO: 26648 - DNA, 20 bp, Artificial Sequence
  Antisense compound
aagcctacaatacaagccat

SEQ ID NO: 26649 - DNA, 20 bp, Artificial Sequence
  Antisense compound
caagcctacaatacaagcca

SEQ ID NO: 26650 - DNA, 20 bp, Artificial Sequence
  Antisense compound
tcaagcctacaatacaagcc

SEQ ID NO: 26651 - DNA, 20 bp, Artificial Sequence
  Antisense compound
atcaagcctacaatacaagc

SEQ ID NO: 26652 - DNA, 20 bp, Artificial Sequence
  Antisense compound
catcaagcctacaatacaag

SEQ ID NO: 26653 - DNA, 20 bp, Artificial Sequence
  Antisense compound
acatcaagcctacaatacaa

SEQ ID NO: 26654 - DNA, 20 bp, Artificial Sequence
  Antisense compound
cacatcaagcctacaataca

SEQ ID NO: 26655 - DNA, 20 bp, Artificial Sequence
  Antisense compound
ccacatcaagcctacaatac

SEQ ID NO: 26656 - DNA, 20 bp, Artificial Sequence
  Antisense compound
gccacatcaagcctacaata

SEQ ID NO: 26657 - DNA, 20 bp, Artificial Sequence
  Antisense compound
agccacatcaagcctacaat

SEQ ID NO: 26658 - DNA, 20 bp, Artificial Sequence
  Antisense compound
aagccacatcaagcctacaa

SEQ ID NO: 26659 - DNA, 20 bp, Artificial Sequence
  Antisense compound
taagccacatcaagcctaca

SEQ ID NO: 26660 - DNA, 20 bp, Artificial Sequence
  Antisense compound
ctaagccacatcaagcctac

SEQ ID NO: 26661 - DNA, 20 bp, Artificial Sequence
  Antisense compound
gctaagccacatcaagccta

SEQ ID NO: 26662 - DNA, 20 bp, Artificial Sequence
  Antisense compound
agctaagccacatcaagcct

SEQ ID NO: 26663 - DNA, 20 bp, Artificial Sequence
  Antisense compound
tagctaagccacatcaagcc

SEQ ID NO: 26664 - DNA, 20 bp, Artificial Sequence
  Antisense compound
gtagctaagccacatcaagc

SEQ ID NO: 26665 - DNA, 20 bp, Artificial Sequence
  Antisense compound
agtagctaagccacatcaag

SEQ ID NO: 26666 - DNA, 20 bp, Artificial Sequence
  Antisense compound
aagtagctaagccacatcaa

SEQ ID NO: 26667 - DNA, 20 bp, Artificial Sequence
  Antisense compound
gaagtagctaagccacatca

SEQ ID NO: 26668 - DNA, 20 bp, Artificial Sequence
  Antisense compound
cgaagtagctaagccacatc

SEQ ID NO: 26669 - DNA, 20 bp, Artificial Sequence
  Antisense compound
acgaagtagctaagccacat

SEQ ID NO: 26670 - DNA, 20 bp, Artificial Sequence
  Antisense compound
aacgaagtagctaagccaca

SEQ ID NO: 26671 - DNA, 20 bp, Artificial Sequence
  Antisense compound
caacgaagtagctaagccac

SEQ ID NO: 26672 - DNA, 20 bp, Artificial Sequence
  Antisense compound
gcaacgaagtagctaagcca

SEQ ID NO: 26673 - DNA, 20 bp, Artificial Sequence
  Antisense compound
agcaacgaagtagctaagcc

SEQ ID NO: 26674 - DNA, 20 bp, Artificial Sequence
  Antisense compound
aagcaacgaagtagctaagc

SEQ ID NO: 26675 - DNA, 20 bp, Artificial Sequence
  Antisense compound
gaagcaacgaagtagctaag

SEQ ID NO: 26676 - DNA, 20 bp, Artificial Sequence
  Antisense compound
ggaagcaacgaagtagctaa

SEQ ID NO: 26677 - DNA, 20 bp, Artificial Sequence
  Antisense compound
aggaagcaacgaagtagcta

SEQ ID NO: 26678 - DNA, 20 bp, Artificial Sequence
  Antisense compound
aaggaagcaacgaagtagct

SEQ ID NO: 26679 - DNA, 20 bp, Artificial Sequence
  Antisense compound
gaaggaagcaacgaagtagc

SEQ ID NO: 26680 - DNA, 20 bp, Artificial Sequence
  Antisense compound
tgaaggaagcaacgaagtag

SEQ ID NO: 26681 - DNA, 20 bp, Artificial Sequence
  Antisense compound
ctgaaggaagcaacgaagta

SEQ ID NO: 26682 - DNA, 20 bp, Artificial Sequence
  Antisense compound
cctgaaggaagcaacgaagt

SEQ ID NO: 26683 - DNA, 20 bp, Artificial Sequence
  Antisense compound
gcctgaaggaagcaacgaag

SEQ ID NO: 26684 - DNA, 20 bp, Artificial Sequence
  Antisense compound
agcctgaaggaagcaacgaa

SEQ ID NO: 26685 - DNA, 20 bp, Artificial Sequence
  Antisense compound
cagcctgaaggaagcaacga

SEQ ID NO: 26686 - DNA, 20 bp, Artificial Sequence
  Antisense compound
acagcctgaaggaagcaacg

SEQ ID NO: 26687 - DNA, 20 bp, Artificial Sequence
  Antisense compound
aacagcctgaaggaagcaac

SEQ ID NO: 26688 - DNA, 20 bp, Artificial Sequence
  Antisense compound
aaacagcctgaaggaagcaa

SEQ ID NO: 26689 - DNA, 20 bp, Artificial Sequence
  Antisense compound
caaacagcctgaaggaagca

SEQ ID NO: 26690 - DNA, 20 bp, Artificial Sequence
  Antisense compound
gcaaacagcctgaaggaagc

SEQ ID NO: 26691 - DNA, 20 bp, Artificial Sequence
  Antisense compound
agcaaacagcctgaaggaag

SEQ ID NO: 26692 - DNA, 20 bp, Artificial Sequence
  Antisense compound
gagcaaacagcctgaaggaa

SEQ ID NO: 26693 - DNA, 20 bp, Artificial Sequence
  Antisense compound
cgagcaaacagcctgaagga

SEQ ID NO: 26694 - DNA, 20 bp, Artificial Sequence
  Antisense compound
acgagcaaacagcctgaagg

SEQ ID NO: 26695 - DNA, 20 bp, Artificial Sequence
  Antisense compound
tacgagcaaacagcctgaag

SEQ ID NO: 26696 - DNA, 20 bp, Artificial Sequence
  Antisense compound
gtacgagcaaacagcctgaa

SEQ ID NO: 26697 - DNA, 20 bp, Artificial Sequence
  Antisense compound
ggtacgagcaaacagcctga

SEQ ID NO: 26698 - DNA, 20 bp, Artificial Sequence
  Antisense compound
gggtacgagcaaacagcctg

SEQ ID NO: 26699 - DNA, 20 bp, Artificial Sequence
  Antisense compound
cgggtacgagcaaacagcct

SEQ ID NO: 26700 - DNA, 20 bp, Artificial Sequence
  Antisense compound
gcgggtacgagcaaacagcc

SEQ ID NO: 26701 - DNA, 20 bp, Artificial Sequence
  Antisense compound
agcgggtacgagcaaacagc

SEQ ID NO: 26702 - DNA, 20 bp, Artificial Sequence
  Antisense compound
gagcgggtacgagcaaacag

SEQ ID NO: 26703 - DNA, 20 bp, Artificial Sequence
  Antisense compound
tgagcgggtacgagcaaaca

SEQ ID NO: 26704 - DNA, 20 bp, Artificial Sequence
  Antisense compound
ttgagcgggtacgagcaaac

SEQ ID NO: 26705 - DNA, 20 bp, Artificial Sequence
  Antisense compound
attgagcgggtacgagcaaa

SEQ ID NO: 26706 - DNA, 20 bp, Artificial Sequence
  Antisense compound
cattgagcgggtacgagcaa

SEQ ID NO: 26707 - DNA, 20 bp, Artificial Sequence
  Antisense compound
acattgagcgggtacgagca

SEQ ID NO: 26708 - DNA, 20 bp, Artificial Sequence
  Antisense compound
cacattgagcgggtacgagc

SEQ ID NO: 26709 - DNA, 20 bp, Artificial Sequence
  Antisense compound
ccacattgagcgggtacgag

SEQ ID NO: 26710 - DNA, 20 bp, Artificial Sequence
  Antisense compound
accacattgagcgggtacga

SEQ ID NO: 26711 - DNA, 20 bp, Artificial Sequence
  Antisense compound
gaccacattgagcgggtacg

SEQ ID NO: 26712 - DNA, 20 bp, Artificial Sequence
  Antisense compound
tgaccacattgagcgggtac

SEQ ID NO: 26713 - DNA, 20 bp, Artificial Sequence
  Antisense compound
atgaccacattgagcgggta

SEQ ID NO: 26714 - DNA, 20 bp, Artificial Sequence
  Antisense compound
aatgaccacattgagcgggt

SEQ ID NO: 26715 - DNA, 20 bp, Artificial Sequence
  Antisense compound
gaatgaccacattgagcggg

SEQ ID NO: 26716 - DNA, 20 bp, Artificial Sequence
  Antisense compound
tgaatgaccacattgagcgg

SEQ ID NO: 26717 - DNA, 20 bp, Artificial Sequence
  Antisense compound
ttgaatgaccacattgagcg

SEQ ID NO: 26718 - DNA, 20 bp, Artificial Sequence
  Antisense compound
gttgaatgaccacattgagc

SEQ ID NO: 26719 - DNA, 20 bp, Artificial Sequence
  Antisense compound
ggttgaatgaccacattgag

SEQ ID NO: 26720 - DNA, 20 bp, Artificial Sequence
  Antisense compound
gggttgaatgaccacattga

SEQ ID NO: 26721 - DNA, 20 bp, Artificial Sequence
  Antisense compound
tgggttgaatgaccacattg

SEQ ID NO: 26722 - DNA, 20 bp, Artificial Sequence
  Antisense compound
ctgggttgaatgaccacatt

SEQ ID NO: 26723 - DNA, 20 bp, Artificial Sequence
  Antisense compound
tctgggttgaatgaccacat

SEQ ID NO: 26724 - DNA, 20 bp, Artificial Sequence
  Antisense compound
ttctgggttgaatgaccaca

SEQ ID NO: 26725 - DNA, 20 bp, Artificial Sequence
  Antisense compound
tttctgggttgaatgaccac

SEQ ID NO: 26726 - DNA, 20 bp, Artificial Sequence
  Antisense compound
gtttctgggttgaatgacca

SEQ ID NO: 26727 - DNA, 20 bp, Artificial Sequence
  Antisense compound
tgtttctgggttgaatgacc

SEQ ID NO: 26728 - DNA, 20 bp, Artificial Sequence
  Antisense compound
ttgtttctgggttgaatgac

SEQ ID NO: 26729 - DNA, 20 bp, Artificial Sequence
  Antisense compound
tttgtttctgggttgaatga

SEQ ID NO: 26730 - DNA, 20 bp, Artificial Sequence
  Antisense compound
gtttgtttctgggttgaatg

SEQ ID NO: 26731 - DNA, 20 bp, Artificial Sequence
  Antisense compound
tgtttgtttctgggttgaat

SEQ ID NO: 26732 - DNA, 20 bp, Artificial Sequence
  Antisense compound
atgtttgtttctgggttgaa

SEQ ID NO: 26733 - DNA, 20 bp, Artificial Sequence
  Antisense compound
aatgtttgtttctgggttga

SEQ ID NO: 26734 - DNA, 20 bp, Artificial Sequence
  Antisense compound
gaatgtttgtttctgggttg

SEQ ID NO: 26735 - DNA, 20 bp, Artificial Sequence
  Antisense compound
agaatgtttgtttctgggtt

SEQ ID NO: 26736 - DNA, 20 bp, Artificial Sequence
  Antisense compound
aagaatgtttgtttctgggt

SEQ ID NO: 26737 - DNA, 20 bp, Artificial Sequence
  Antisense compound
gaagaatgtttgtttctggg

SEQ ID NO: 26738 - DNA, 20 bp, Artificial Sequence
  Antisense compound
agaagaatgtttgtttctgg

SEQ ID NO: 26739 - DNA, 20 bp, Artificial Sequence
  Antisense compound
gagaagaatgtttgtttctg

SEQ ID NO: 26740 - DNA, 20 bp, Artificial Sequence
  Antisense compound
tgagaagaatgtttgtttct

SEQ ID NO: 26741 - DNA, 20 bp, Artificial Sequence
  Antisense compound
ttgagaagaatgtttgtttc

SEQ ID NO: 26742 - DNA, 20 bp, Artificial Sequence
  Antisense compound
attgagaagaatgtttgttt

SEQ ID NO: 26743 - DNA, 20 bp, Artificial Sequence
  Antisense compound
cattgagaagaatgtttgtt

SEQ ID NO: 26744 - DNA, 20 bp, Artificial Sequence
  Antisense compound
acattgagaagaatgtttgt

SEQ ID NO: 26745 - DNA, 20 bp, Artificial Sequence
  Antisense compound
cacattgagaagaatgtttg

SEQ ID NO: 26746 - DNA, 20 bp, Artificial Sequence
  Antisense compound
gcacattgagaagaatgttt

SEQ ID NO: 26747 - DNA, 20 bp, Artificial Sequence
  Antisense compound
ggcacattgagaagaatgtt

SEQ ID NO: 26748 - DNA, 20 bp, Artificial Sequence
  Antisense compound
aggcacattgagaagaatgt

SEQ ID NO: 26749 - DNA, 20 bp, Artificial Sequence
  Antisense compound
gaggcacattgagaagaatg

SEQ ID NO: 26750 - DNA, 20 bp, Artificial Sequence
  Antisense compound
agaggcacattgagaagaat

SEQ ID NO: 26751 - DNA, 20 bp, Artificial Sequence
  Antisense compound
gagaggcacattgagaagaa

SEQ ID NO: 26752 - DNA, 20 bp, Artificial Sequence
  Antisense compound
ggagaggcacattgagaaga

SEQ ID NO: 26753 - DNA, 20 bp, Artificial Sequence
  Antisense compound
cggagaggcacattgagaag

SEQ ID NO: 26754 - DNA, 20 bp, Artificial Sequence
  Antisense compound
ccggagaggcacattgagaa

SEQ ID NO: 26755 - DNA, 20 bp, Artificial Sequence
  Antisense compound
cccggagaggcacattgaga

SEQ ID NO: 26756 - DNA, 20 bp, Artificial Sequence
  Antisense compound
ccccggagaggcacattgag

SEQ ID NO: 26757 - DNA, 20 bp, Artificial Sequence
  Antisense compound
cccccggagaggcacattga

SEQ ID NO: 26758 - DNA, 20 bp, Artificial Sequence
  Antisense compound
tcccccggagaggcacattg

SEQ ID NO: 26759 - DNA, 20 bp, Artificial Sequence
  Antisense compound
gtcccccggagaggcacatt

SEQ ID NO: 26760 - DNA, 20 bp, Artificial Sequence
  Antisense compound
tgtcccccggagaggcacat

SEQ ID NO: 26761 - DNA, 20 bp, Artificial Sequence
  Antisense compound
ttgtcccccggagaggcaca

SEQ ID NO: 26762 - DNA, 20 bp, Artificial Sequence
  Antisense compound
attgtcccccggagaggcac

SEQ ID NO: 26763 - DNA, 20 bp, Artificial Sequence
  Antisense compound
aattgtcccccggagaggca

SEQ ID NO: 26764 - DNA, 20 bp, Artificial Sequence
  Antisense compound
caattgtcccccggagaggc

SEQ ID NO: 26765 - DNA, 20 bp, Artificial Sequence
  Antisense compound
acaattgtcccccggagagg

SEQ ID NO: 26766 - DNA, 20 bp, Artificial Sequence
  Antisense compound
cacaattgtcccccggagag

SEQ ID NO: 26767 - DNA, 20 bp, Artificial Sequence
  Antisense compound
tcacaattgtcccccggaga

SEQ ID NO: 26768 - DNA, 20 bp, Artificial Sequence
  Antisense compound
gtcacaattgtcccccggag

SEQ ID NO: 26769 - DNA, 20 bp, Artificial Sequence
  Antisense compound
ggtcacaattgtcccccgga

SEQ ID NO: 26770 - DNA, 20 bp, Artificial Sequence
  Antisense compound
tggtcacaattgtcccccgg

SEQ ID NO: 26771 - DNA, 20 bp, Artificial Sequence
  Antisense compound
ctggtcacaattgtcccccg

SEQ ID NO: 26772 - DNA, 20 bp, Artificial Sequence
  Antisense compound
tctggtcacaattgtccccc

SEQ ID NO: 26773 - DNA, 20 bp, Artificial Sequence
  Antisense compound
gtctggtcacaattgtcccc

SEQ ID NO: 26774 - DNA, 20 bp, Artificial Sequence
  Antisense compound
ggtctggtcacaattgtccc

SEQ ID NO: 26775 - DNA, 20 bp, Artificial Sequence
  Antisense compound
cggtctggtcacaattgtcc

SEQ ID NO: 26776 - DNA, 20 bp, Artificial Sequence
  Antisense compound
gcggtctggtcacaattgtc

SEQ ID NO: 26777 - DNA, 20 bp, Artificial Sequence
  Antisense compound
agcggtctggtcacaattgt

SEQ ID NO: 26778 - DNA, 20 bp, Artificial Sequence
  Antisense compound
gagcggtctggtcacaattg

SEQ ID NO: 26779 - DNA, 20 bp, Artificial Sequence
  Antisense compound
tgagcggtctggtcacaatt

SEQ ID NO: 26780 - DNA, 20 bp, Artificial Sequence
  Antisense compound
atgagcggtctggtcacaat

SEQ ID NO: 26781 - DNA, 20 bp, Artificial Sequence
  Antisense compound
catgagcggtctggtcacaa

SEQ ID NO: 26782 - DNA, 20 bp, Artificial Sequence
  Antisense compound
ccatgagcggtctggtcaca

SEQ ID NO: 26783 - DNA, 20 bp, Artificial Sequence
  Antisense compound
tccatgagcggtctggtcac

SEQ ID NO: 26784 - DNA, 20 bp, Artificial Sequence
  Antisense compound
ttccatgagcggtctggtca

SEQ ID NO: 26785 - DNA, 20 bp, Artificial Sequence
  Antisense compound
tttccatgagcggtctggtc

SEQ ID NO: 26786 - DNA, 20 bp, Artificial Sequence
  Antisense compound
ctttccatgagcggtctggt

SEQ ID NO: 26787 - DNA, 20 bp, Artificial Sequence
  Antisense compound
actttccatgagcggtctgg

SEQ ID NO: 26788 - DNA, 20 bp, Artificial Sequence
  Antisense compound
cactttccatgagcggtctg

SEQ ID NO: 26789 - DNA, 20 bp, Artificial Sequence
  Antisense compound
tcactttccatgagcggtct

SEQ ID NO: 26790 - DNA, 20 bp, Artificial Sequence
  Antisense compound
ttcactttccatgagcggtc

SEQ ID NO: 26791 - DNA, 20 bp, Artificial Sequence
  Antisense compound
gttcactttccatgagcggt

SEQ ID NO: 26792 - DNA, 20 bp, Artificial Sequence
  Antisense compound
agttcactttccatgagcgg

SEQ ID NO: 26793 - DNA, 20 bp, Artificial Sequence
  Antisense compound
aagttcactttccatgagcg

SEQ ID NO: 26794 - DNA, 20 bp, Artificial Sequence
  Antisense compound
caagttcactttccatgagc

SEQ ID NO: 26795 - DNA, 20 bp, Artificial Sequence
  Antisense compound
acaagttcactttccatgag

SEQ ID NO: 26796 - DNA, 20 bp, Artificial Sequence
  Antisense compound
gacaagttcactttccatga

SEQ ID NO: 26797 - DNA, 20 bp, Artificial Sequence
  Antisense compound
tgacaagttcactttccatg

SEQ ID NO: 26798 - DNA, 20 bp, Artificial Sequence
  Antisense compound
atgacaagttcactttccat

SEQ ID NO: 26799 - DNA, 20 bp, Artificial Sequence
  Antisense compound
aatgacaagttcactttcca

SEQ ID NO: 26800 - DNA, 20 bp, Artificial Sequence
  Antisense compound
caatgacaagttcactttcc

SEQ ID NO: 26801 - DNA, 20 bp, Artificial Sequence
  Antisense compound
ccaatgacaagttcactttc

SEQ ID NO: 26802 - DNA, 20 bp, Artificial Sequence
  Antisense compound
accaatgacaagttcacttt

SEQ ID NO: 26803 - DNA, 20 bp, Artificial Sequence
  Antisense compound
caccaatgacaagttcactt

SEQ ID NO: 26804 - DNA, 20 bp, Artificial Sequence
  Antisense compound
gcaccaatgacaagttcact

SEQ ID NO: 26805 - DNA, 20 bp, Artificial Sequence
  Antisense compound
agcaccaatgacaagttcac

SEQ ID NO: 26806 - DNA, 20 bp, Artificial Sequence
  Antisense compound
cagcaccaatgacaagttca

SEQ ID NO: 26807 - DNA, 20 bp, Artificial Sequence
  Antisense compound
acagcaccaatgacaagttc

SEQ ID NO: 26808 - DNA, 20 bp, Artificial Sequence
  Antisense compound
cacagcaccaatgacaagtt

SEQ ID NO: 26809 - DNA, 20 bp, Artificial Sequence
  Antisense compound
tcacagcaccaatgacaagt

SEQ ID NO: 26810 - DNA, 20 bp, Artificial Sequence
  Antisense compound
atcacagcaccaatgacaag

SEQ ID NO: 26811 - DNA, 20 bp, Artificial Sequence
  Antisense compound
gatcacagcaccaatgacaa

SEQ ID NO: 26812 - DNA, 20 bp, Artificial Sequence
  Antisense compound
tgatcacagcaccaatgaca

SEQ ID NO: 26813 - DNA, 20 bp, Artificial Sequence
  Antisense compound
atgatcacagcaccaatgac

SEQ ID NO: 26814 - DNA, 20 bp, Artificial Sequence
  Antisense compound
aatgatcacagcaccaatga

SEQ ID NO: 26815 - DNA, 20 bp, Artificial Sequence
  Antisense compound
gaatgatcacagcaccaatg

SEQ ID NO: 26816 - DNA, 20 bp, Artificial Sequence
  Antisense compound
cgaatgatcacagcaccaat

SEQ ID NO: 26817 - DNA, 20 bp, Artificial Sequence
  Antisense compound
acgaatgatcacagcaccaa

SEQ ID NO: 26818 - DNA, 20 bp, Artificial Sequence
  Antisense compound
cacgaatgatcacagcacca

SEQ ID NO: 26819 - DNA, 20 bp, Artificial Sequence
  Antisense compound
ccacgaatgatcacagcacc

SEQ ID NO: 26820 - DNA, 20 bp, Artificial Sequence
  Antisense compound
accacgaatgatcacagcac

SEQ ID NO: 26821 - DNA, 20 bp, Artificial Sequence
  Antisense compound
gaccacgaatgatcacagca

SEQ ID NO: 26822 - DNA, 20 bp, Artificial Sequence
  Antisense compound
tgaccacgaatgatcacagc

SEQ ID NO: 26823 - DNA, 20 bp, Artificial Sequence
  Antisense compound
gtgaccacgaatgatcacag

SEQ ID NO: 26824 - DNA, 20 bp, Artificial Sequence
  Antisense compound
agtgaccacgaatgatcaca

SEQ ID NO: 26825 - DNA, 20 bp, Artificial Sequence
  Antisense compound
aagtgaccacgaatgatcac

SEQ ID NO: 26826 - DNA, 20 bp, Artificial Sequence
  Antisense compound
caagtgaccacgaatgatca

SEQ ID NO: 26827 - DNA, 20 bp, Artificial Sequence
  Antisense compound
gcaagtgaccacgaatgatc

SEQ ID NO: 26828 - DNA, 20 bp, Artificial Sequence
  Antisense compound
cgcaagtgaccacgaatgat

SEQ ID NO: 26829 - DNA, 20 bp, Artificial Sequence
  Antisense compound
tcgcaagtgaccacgaatga

SEQ ID NO: 26830 - DNA, 20 bp, Artificial Sequence
  Antisense compound
ttcgcaagtgaccacgaatg

SEQ ID NO: 26831 - DNA, 20 bp, Artificial Sequence
  Antisense compound
attcgcaagtgaccacgaat

SEQ ID NO: 26832 - DNA, 20 bp, Artificial Sequence
  Antisense compound
cattcgcaagtgaccacgaa

SEQ ID NO: 26833 - DNA, 20 bp, Artificial Sequence
  Antisense compound
ccattcgcaagtgaccacga

SEQ ID NO: 26834 - DNA, 20 bp, Artificial Sequence
  Antisense compound
gccattcgcaagtgaccacg

SEQ ID NO: 26835 - DNA, 20 bp, Artificial Sequence
  Antisense compound
ggccattcgcaagtgaccac

SEQ ID NO: 26836 - DNA, 20 bp, Artificial Sequence
  Antisense compound
cggccattcgcaagtgacca

SEQ ID NO: 26837 - DNA, 20 bp, Artificial Sequence
  Antisense compound
ccggccattcgcaagtgacc

SEQ ID NO: 26838 - DNA, 20 bp, Artificial Sequence
  Antisense compound
tccggccattcgcaagtgac

SEQ ID NO: 26839 - DNA, 20 bp, Artificial Sequence
  Antisense compound
gtccggccattcgcaagtga

SEQ ID NO: 26840 - DNA, 20 bp, Artificial Sequence
  Antisense compound
tgtccggccattcgcaagtg

SEQ ID NO: 26841 - DNA, 20 bp, Artificial Sequence
  Antisense compound
gtgtccggccattcgcaagt

SEQ ID NO: 26842 - DNA, 20 bp, Artificial Sequence
  Antisense compound
agtgtccggccattcgcaag

SEQ ID NO: 26843 - DNA, 20 bp, Artificial Sequence
  Antisense compound
gagtgtccggccattcgcaa

SEQ ID NO: 26844 - DNA, 20 bp, Artificial Sequence
  Antisense compound
ggagtgtccggccattcgca

SEQ ID NO: 26845 - DNA, 20 bp, Artificial Sequence
  Antisense compound
gggagtgtccggccattcgc

SEQ ID NO: 26846 - DNA, 20 bp, Artificial Sequence
  Antisense compound
agggagtgtccggccattcg

SEQ ID NO: 26847 - DNA, 20 bp, Artificial Sequence
  Antisense compound
tagggagtgtccggccattc

SEQ ID NO: 26848 - DNA, 20 bp, Artificial Sequence
  Antisense compound
ctagggagtgtccggccatt

SEQ ID NO: 26849 - DNA, 20 bp, Artificial Sequence
  Antisense compound
cctagggagtgtccggccat

SEQ ID NO: 26850 - DNA, 20 bp, Artificial Sequence
  Antisense compound
ccctagggagtgtccggcca

SEQ ID NO: 26851 - DNA, 20 bp, Artificial Sequence
  Antisense compound
gccctagggagtgtccggcc

SEQ ID NO: 26852 - DNA, 20 bp, Artificial Sequence
  Antisense compound
cgccctagggagtgtccggc

SEQ ID NO: 26853 - DNA, 20 bp, Artificial Sequence
  Antisense compound
gcgccctagggagtgtccgg

SEQ ID NO: 26854 - DNA, 20 bp, Artificial Sequence
  Antisense compound
agcgccctagggagtgtccg

SEQ ID NO: 26855 - DNA, 20 bp, Artificial Sequence
  Antisense compound
cagcgccctagggagtgtcc

SEQ ID NO: 26856 - DNA, 20 bp, Artificial Sequence
  Antisense compound
acagcgccctagggagtgtc

SEQ ID NO: 26857 - DNA, 20 bp, Artificial Sequence
  Antisense compound
cacagcgccctagggagtgt

SEQ ID NO: 26858 - DNA, 20 bp, Artificial Sequence
  Antisense compound
tcacagcgccctagggagtg

SEQ ID NO: 26859 - DNA, 20 bp, Artificial Sequence
  Antisense compound
gtcacagcgccctagggagt

SEQ ID NO: 26860 - DNA, 20 bp, Artificial Sequence
  Antisense compound
tgtcacagcgccctagggag

SEQ ID NO: 26861 - DNA, 20 bp, Artificial Sequence
  Antisense compound
atgtcacagcgccctaggga

SEQ ID NO: 26862 - DNA, 20 bp, Artificial Sequence
  Antisense compound
aatgtcacagcgccctaggg

SEQ ID NO: 26863 - DNA, 20 bp, Artificial Sequence
  Antisense compound
taatgtcacagcgccctagg

SEQ ID NO: 26864 - DNA, 20 bp, Artificial Sequence
  Antisense compound
ttaatgtcacagcgccctag

SEQ ID NO: 26865 - DNA, 20 bp, Artificial Sequence
  Antisense compound
cttaatgtcacagcgcccta

SEQ ID NO: 26866 - DNA, 20 bp, Artificial Sequence
  Antisense compound
ccttaatgtcacagcgccct

SEQ ID NO: 26867 - DNA, 20 bp, Artificial Sequence
  Antisense compound
tccttaatgtcacagcgccc

SEQ ID NO: 26868 - DNA, 20 bp, Artificial Sequence
  Antisense compound
gtccttaatgtcacagcgcc

SEQ ID NO: 26869 - DNA, 20 bp, Artificial Sequence
  Antisense compound
ggtccttaatgtcacagcgc

SEQ ID NO: 26870 - DNA, 20 bp, Artificial Sequence
  Antisense compound
aggtccttaatgtcacagcg

SEQ ID NO: 26871 - DNA, 20 bp, Artificial Sequence
  Antisense compound
caggtccttaatgtcacagc

SEQ ID NO: 26872 - DNA, 20 bp, Artificial Sequence
  Antisense compound
gcaggtccttaatgtcacag

SEQ ID NO: 26873 - DNA, 20 bp, Artificial Sequence
  Antisense compound
ggcaggtccttaatgtcaca

SEQ ID NO: 26874 - DNA, 20 bp, Artificial Sequence
  Antisense compound
tggcaggtccttaatgtcac

SEQ ID NO: 26875 - DNA, 20 bp, Artificial Sequence
  Antisense compound
ttggcaggtccttaatgtca

SEQ ID NO: 26876 - DNA, 20 bp, Artificial Sequence
  Antisense compound
tttggcaggtccttaatgtc

SEQ ID NO: 26877 - DNA, 20 bp, Artificial Sequence
  Antisense compound
ttttggcaggtccttaatgt

SEQ ID NO: 26878 - DNA, 20 bp, Artificial Sequence
  Antisense compound
cttttggcaggtccttaatg

SEQ ID NO: 26879 - DNA, 20 bp, Artificial Sequence
  Antisense compound
tcttttggcaggtccttaat

SEQ ID NO: 26880 - DNA, 20 bp, Artificial Sequence
  Antisense compound
ctcttttggcaggtccttaa

SEQ ID NO: 26881 - DNA, 20 bp, Artificial Sequence
  Antisense compound
tctcttttggcaggtcctta

SEQ ID NO: 26882 - DNA, 20 bp, Artificial Sequence
  Antisense compound
atctcttttggcaggtcctt

SEQ ID NO: 26883 - DNA, 20 bp, Artificial Sequence
  Antisense compound
gatctcttttggcaggtcct

SEQ ID NO: 26884 - DNA, 20 bp, Artificial Sequence
  Antisense compound
tgatctcttttggcaggtcc

SEQ ID NO: 26885 - DNA, 20 bp, Artificial Sequence
  Antisense compound
gtgatctcttttggcaggtc

SEQ ID NO: 26886 - DNA, 20 bp, Artificial Sequence
  Antisense compound
agtgatctcttttggcaggt

SEQ ID NO: 26887 - DNA, 20 bp, Artificial Sequence
  Antisense compound
cagtgatctcttttggcagg

SEQ ID NO: 26888 - DNA, 20 bp, Artificial Sequence
  Antisense compound
acagtgatctcttttggcag

SEQ ID NO: 26889 - DNA, 20 bp, Artificial Sequence
  Antisense compound
cacagtgatctcttttggca

SEQ ID NO: 26890 - DNA, 20 bp, Artificial Sequence
  Antisense compound
ccacagtgatctcttttggc

SEQ ID NO: 26891 - DNA, 20 bp, Artificial Sequence
  Antisense compound
gccacagtgatctcttttgg

SEQ ID NO: 26892 - DNA, 20 bp, Artificial Sequence
  Antisense compound
agccacagtgatctcttttg

SEQ ID NO: 26893 - DNA, 20 bp, Artificial Sequence
  Antisense compound
tagccacagtgatctctttt

SEQ ID NO: 26894 - DNA, 20 bp, Artificial Sequence
  Antisense compound
gtagccacagtgatctcttt

SEQ ID NO: 26895 - DNA, 20 bp, Artificial Sequence
  Antisense compound
tgtagccacagtgatctctt

SEQ ID NO: 26896 - DNA, 20 bp, Artificial Sequence
  Antisense compound
atgtagccacagtgatctct

SEQ ID NO: 26897 - DNA, 20 bp, Artificial Sequence
  Antisense compound
gatgtagccacagtgatctc

SEQ ID NO: 26898 - DNA, 20 bp, Artificial Sequence
  Antisense compound
tgatgtagccacagtgatct

SEQ ID NO: 26899 - DNA, 20 bp, Artificial Sequence
  Antisense compound
gtgatgtagccacagtgatc

SEQ ID NO: 26900 - DNA, 20 bp, Artificial Sequence
  Antisense compound
cgtgatgtagccacagtgat

SEQ ID NO: 26901 - DNA, 20 bp, Artificial Sequence
  Antisense compound
tcgtgatgtagccacagtga

SEQ ID NO: 26902 - DNA, 20 bp, Artificial Sequence
  Antisense compound
ttcgtgatgtagccacagtg

SEQ ID NO: 26903 - DNA, 20 bp, Artificial Sequence
  Antisense compound
gttcgtgatgtagccacagt

SEQ ID NO: 26904 - DNA, 20 bp, Artificial Sequence
  Antisense compound
cgttcgtgatgtagccacag

SEQ ID NO: 26905 - DNA, 20 bp, Artificial Sequence
  Antisense compound
gcgttcgtgatgtagccaca

SEQ ID NO: 26906 - DNA, 20 bp, Artificial Sequence
  Antisense compound
agcgttcgtgatgtagccac

SEQ ID NO: 26907 - DNA, 20 bp, Artificial Sequence
  Antisense compound
aagcgttcgtgatgtagcca

SEQ ID NO: 26908 - DNA, 20 bp, Artificial Sequence
  Antisense compound
aaagcgttcgtgatgtagcc

SEQ ID NO: 26909 - DNA, 20 bp, Artificial Sequence
  Antisense compound
gaaagcgttcgtgatgtagc

SEQ ID NO: 26910 - DNA, 20 bp, Artificial Sequence
  Antisense compound
agaaagcgttcgtgatgtag

SEQ ID NO: 26911 - DNA, 20 bp, Artificial Sequence
  Antisense compound
aagaaagcgttcgtgatgta

SEQ ID NO: 26912 - DNA, 20 bp, Artificial Sequence
  Antisense compound
taagaaagcgttcgtgatgt

SEQ ID NO: 26913 - DNA, 20 bp, Artificial Sequence
  Antisense compound
ataagaaagcgttcgtgatg

SEQ ID NO: 26914 - DNA, 20 bp, Artificial Sequence
  Antisense compound
aataagaaagcgttcgtgat

SEQ ID NO: 26915 - DNA, 20 bp, Artificial Sequence
  Antisense compound
taataagaaagcgttcgtga

SEQ ID NO: 26916 - DNA, 20 bp, Artificial Sequence
  Antisense compound
gtaataagaaagcgttcgtg

SEQ ID NO: 26917 - DNA, 20 bp, Artificial Sequence
  Antisense compound
tgtaataagaaagcgttcgt

SEQ ID NO: 26918 - DNA, 20 bp, Artificial Sequence
  Antisense compound
ttgtaataagaaagcgttcg

SEQ ID NO: 26919 - DNA, 20 bp, Artificial Sequence
  Antisense compound
tttgtaataagaaagcgttc

SEQ ID NO: 26920 - DNA, 20 bp, Artificial Sequence
  Antisense compound
atttgtaataagaaagcgtt

SEQ ID NO: 26921 - DNA, 20 bp, Artificial Sequence
  Antisense compound
aatttgtaataagaaagcgt

SEQ ID NO: 26922 - DNA, 20 bp, Artificial Sequence
  Antisense compound
taatttgtaataagaaagcg

SEQ ID NO: 26923 - DNA, 20 bp, Artificial Sequence
  Antisense compound
ctaatttgtaataagaaagc

SEQ ID NO: 26924 - DNA, 20 bp, Artificial Sequence
  Antisense compound
cctaatttgtaataagaaag

SEQ ID NO: 26925 - DNA, 20 bp, Artificial Sequence
  Antisense compound
tcctaatttgtaataagaaa

SEQ ID NO: 26926 - DNA, 20 bp, Artificial Sequence
  Antisense compound
ctcctaatttgtaataagaa

SEQ ID NO: 26927 - DNA, 20 bp, Artificial Sequence
  Antisense compound
gctcctaatttgtaataaga

SEQ ID NO: 26928 - DNA, 20 bp, Artificial Sequence
  Antisense compound
cgctcctaatttgtaataag

SEQ ID NO: 26929 - DNA, 20 bp, Artificial Sequence
  Antisense compound
acgctcctaatttgtaataa

SEQ ID NO: 26930 - DNA, 20 bp, Artificial Sequence
  Antisense compound
gacgctcctaatttgtaata

SEQ ID NO: 26931 - DNA, 20 bp, Artificial Sequence
  Antisense compound
cgacgctcctaatttgtaat

SEQ ID NO: 26932 - DNA, 20 bp, Artificial Sequence
  Antisense compound
gcgacgctcctaatttgtaa

SEQ ID NO: 26933 - DNA, 20 bp, Artificial Sequence
  Antisense compound
tgcgacgctcctaatttgta

SEQ ID NO: 26934 - DNA, 20 bp, Artificial Sequence
  Antisense compound
ctgcgacgctcctaatttgt

SEQ ID NO: 26935 - DNA, 20 bp, Artificial Sequence
  Antisense compound
gctgcgacgctcctaatttg

SEQ ID NO: 26936 - DNA, 20 bp, Artificial Sequence
  Antisense compound
cgctgcgacgctcctaattt

SEQ ID NO: 26937 - DNA, 20 bp, Artificial Sequence
  Antisense compound
acgctgcgacgctcctaatt

SEQ ID NO: 26938 - DNA, 20 bp, Artificial Sequence
  Antisense compound
cacgctgcgacgctcctaat

SEQ ID NO: 26939 - DNA, 20 bp, Artificial Sequence
  Antisense compound
acacgctgcgacgctcctaa

SEQ ID NO: 26940 - DNA, 20 bp, Artificial Sequence
  Antisense compound
tacacgctgcgacgctccta

SEQ ID NO: 26941 - DNA, 20 bp, Artificial Sequence
  Antisense compound
ctacacgctgcgacgctcct

SEQ ID NO: 26942 - DNA, 20 bp, Artificial Sequence
  Antisense compound
cctacacgctgcgacgctcc

SEQ ID NO: 26943 - DNA, 20 bp, Artificial Sequence
  Antisense compound
gcctacacgctgcgacgctc

SEQ ID NO: 26944 - DNA, 20 bp, Artificial Sequence
  Antisense compound
tgcctacacgctgcgacgct

SEQ ID NO: 26945 - DNA, 20 bp, Artificial Sequence
  Antisense compound
gtgcctacacgctgcgacgc

SEQ ID NO: 26946 - DNA, 20 bp, Artificial Sequence
  Antisense compound
agtgcctacacgctgcgacg

SEQ ID NO: 26947 - DNA, 20 bp, Artificial Sequence
  Antisense compound
cagtgcctacacgctgcgac

SEQ ID NO: 26948 - DNA, 20 bp, Artificial Sequence
  Antisense compound
tcagtgcctacacgctgcga

SEQ ID NO: 26949 - DNA, 20 bp, Artificial Sequence
  Antisense compound
atcagtgcctacacgctgcg

SEQ ID NO: 26950 - DNA, 20 bp, Artificial Sequence
  Antisense compound
aatcagtgcctacacgctgc

SEQ ID NO: 26951 - DNA, 20 bp, Artificial Sequence
  Antisense compound
gaatcagtgcctacacgctg

SEQ ID NO: 26952 - DNA, 20 bp, Artificial Sequence
  Antisense compound
tgaatcagtgcctacacgct

SEQ ID NO: 26953 - DNA, 20 bp, Artificial Sequence
  Antisense compound
ctgaatcagtgcctacacgc

SEQ ID NO: 26954 - DNA, 20 bp, Artificial Sequence
  Antisense compound
cctgaatcagtgcctacacg

SEQ ID NO: 26955 - DNA, 20 bp, Artificial Sequence
  Antisense compound
acctgaatcagtgcctacac

SEQ ID NO: 26956 - DNA, 20 bp, Artificial Sequence
  Antisense compound
aacctgaatcagtgcctaca

SEQ ID NO: 26957 - DNA, 20 bp, Artificial Sequence
  Antisense compound
aaacctgaatcagtgcctac

SEQ ID NO: 26958 - DNA, 20 bp, Artificial Sequence
  Antisense compound
aaaacctgaatcagtgccta

SEQ ID NO: 26959 - DNA, 20 bp, Artificial Sequence
  Antisense compound
caaaacctgaatcagtgcct

SEQ ID NO: 26960 - DNA, 20 bp, Artificial Sequence
  Antisense compound
gcaaaacctgaatcagtgcc

SEQ ID NO: 26961 - DNA, 20 bp, Artificial Sequence
  Antisense compound
agcaaaacctgaatcagtgc

SEQ ID NO: 26962 - DNA, 20 bp, Artificial Sequence
  Antisense compound
cagcaaaacctgaatcagtg

SEQ ID NO: 26963 - DNA, 20 bp, Artificial Sequence
  Antisense compound
gcagcaaaacctgaatcagt

SEQ ID NO: 26964 - DNA, 20 bp, Artificial Sequence
  Antisense compound
tgcagcaaaacctgaatcag

SEQ ID NO: 26965 - DNA, 20 bp, Artificial Sequence
  Antisense compound
atgcagcaaaacctgaatca

SEQ ID NO: 26966 - DNA, 20 bp, Artificial Sequence
  Antisense compound
tatgcagcaaaacctgaatc

SEQ ID NO: 26967 - DNA, 20 bp, Artificial Sequence
  Antisense compound
gtatgcagcaaaacctgaat

SEQ ID NO: 26968 - DNA, 20 bp, Artificial Sequence
  Antisense compound
tgtatgcagcaaaacctgaa

SEQ ID NO: 26969 - DNA, 20 bp, Artificial Sequence
  Antisense compound
ttgtatgcagcaaaacctga

SEQ ID NO: 26970 - DNA, 20 bp, Artificial Sequence
  Antisense compound
gttgtatgcagcaaaacctg

SEQ ID NO: 26971 - DNA, 20 bp, Artificial Sequence
  Antisense compound
ggttgtatgcagcaaaacct

SEQ ID NO: 26972 - DNA, 20 bp, Artificial Sequence
  Antisense compound
cggttgtatgcagcaaaacc

SEQ ID NO: 26973 - DNA, 20 bp, Artificial Sequence
  Antisense compound
gcggttgtatgcagcaaaac

SEQ ID NO: 26974 - DNA, 20 bp, Artificial Sequence
  Antisense compound
agcggttgtatgcagcaaaa

SEQ ID NO: 26975 - DNA, 20 bp, Artificial Sequence
  Antisense compound
tagcggttgtatgcagcaaa

SEQ ID NO: 26976 - DNA, 20 bp, Artificial Sequence
  Antisense compound
gtagcggttgtatgcagcaa

SEQ ID NO: 26977 - DNA, 20 bp, Artificial Sequence
  Antisense compound
ggtagcggttgtatgcagca

SEQ ID NO: 26978 - DNA, 20 bp, Artificial Sequence
  Antisense compound
cggtagcggttgtatgcagc

SEQ ID NO: 26979 - DNA, 20 bp, Artificial Sequence
  Antisense compound
acggtagcggttgtatgcag

SEQ ID NO: 26980 - DNA, 20 bp, Artificial Sequence
  Antisense compound
tacggtagcggttgtatgca

SEQ ID NO: 26981 - DNA, 20 bp, Artificial Sequence
  Antisense compound
atacggtagcggttgtatgc

SEQ ID NO: 26982 - DNA, 20 bp, Artificial Sequence
  Antisense compound
aatacggtagcggttgtatg

SEQ ID NO: 26983 - DNA, 20 bp, Artificial Sequence
  Antisense compound
caatacggtagcggttgtat

SEQ ID NO: 26984 - DNA, 20 bp, Artificial Sequence
  Antisense compound
ccaatacggtagcggttgta

SEQ ID NO: 26985 - DNA, 20 bp, Artificial Sequence
  Antisense compound
tccaatacggtagcggttgt

SEQ ID NO: 26986 - DNA, 20 bp, Artificial Sequence
  Antisense compound
ttccaatacggtagcggttg

SEQ ID NO: 26987 - DNA, 20 bp, Artificial Sequence
  Antisense compound
tttccaatacggtagcggtt

SEQ ID NO: 26988 - DNA, 20 bp, Artificial Sequence
  Antisense compound
gtttccaatacggtagcggt

SEQ ID NO: 26989 - DNA, 20 bp, Artificial Sequence
  Antisense compound
agtttccaatacggtagcgg

SEQ ID NO: 26990 - DNA, 20 bp, Artificial Sequence
  Antisense compound
tagtttccaatacggtagcg

SEQ ID NO: 26991 - DNA, 20 bp, Artificial Sequence
  Antisense compound
atagtttccaatacggtagc

SEQ ID NO: 26992 - DNA, 20 bp, Artificial Sequence
  Antisense compound
tatagtttccaatacggtag

SEQ ID NO: 26993 - DNA, 20 bp, Artificial Sequence
  Antisense compound
ttatagtttccaatacggta

SEQ ID NO: 26994 - DNA, 20 bp, Artificial Sequence
  Antisense compound
tttatagtttccaatacggt

SEQ ID NO: 26995 - DNA, 20 bp, Artificial Sequence
  Antisense compound
atttatagtttccaatacgg

SEQ ID NO: 26996 - DNA, 20 bp, Artificial Sequence
  Antisense compound
aatttatagtttccaatacg

SEQ ID NO: 26997 - DNA, 20 bp, Artificial Sequence
  Antisense compound
taatttatagtttccaatac

SEQ ID NO: 26998 - DNA, 20 bp, Artificial Sequence
  Antisense compound
ttaatttatagtttccaata

SEQ ID NO: 26999 - DNA, 20 bp, Artificial Sequence
  Antisense compound
tttaatttatagtttccaat

SEQ ID NO: 27000 - DNA, 20 bp, Artificial Sequence
  Antisense compound
atttaatttatagtttccaa

SEQ ID NO: 27001 - DNA, 20 bp, Artificial Sequence
  Antisense compound
tatttaatttatagtttcca

SEQ ID NO: 27002 - DNA, 20 bp, Artificial Sequence
  Antisense compound
gtatttaatttatagtttcc

SEQ ID NO: 27003 - DNA, 20 bp, Artificial Sequence
  Antisense compound
tgtatttaatttatagtttc

SEQ ID NO: 27004 - DNA, 20 bp, Artificial Sequence
  Antisense compound
ctgtatttaatttatagttt

SEQ ID NO: 27005 - DNA, 20 bp, Artificial Sequence
  Antisense compound
tctgtatttaatttatagtt

SEQ ID NO: 27006 - DNA, 20 bp, Artificial Sequence
  Antisense compound
gtctgtatttaatttatagt

SEQ ID NO: 27007 - DNA, 20 bp, Artificial Sequence
  Antisense compound
ggtctgtatttaatttatag

SEQ ID NO: 27008 - DNA, 20 bp, Artificial Sequence
  Antisense compound
tggtctgtatttaatttata

SEQ ID NO: 27009 - DNA, 20 bp, Artificial Sequence
  Antisense compound
gtggtctgtatttaatttat

SEQ ID NO: 27010 - DNA, 20 bp, Artificial Sequence
  Antisense compound
cgtggtctgtatttaattta

SEQ ID NO: 27011 - DNA, 20 bp, Artificial Sequence
  Antisense compound
gcgtggtctgtatttaattt

SEQ ID NO: 27012 - DNA, 20 bp, Artificial Sequence
  Antisense compound
ggcgtggtctgtatttaatt

SEQ ID NO: 27013 - DNA, 20 bp, Artificial Sequence
  Antisense compound
cggcgtggtctgtatttaat

SEQ ID NO: 27014 - DNA, 20 bp, Artificial Sequence
  Antisense compound
ccggcgtggtctgtatttaa

SEQ ID NO: 27015 - DNA, 20 bp, Artificial Sequence
  Antisense compound
accggcgtggtctgtattta

SEQ ID NO: 27016 - DNA, 20 bp, Artificial Sequence
  Antisense compound
taccggcgtggtctgtattt

SEQ ID NO: 27017 - DNA, 20 bp, Artificial Sequence
  Antisense compound
ctaccggcgtggtctgtatt

SEQ ID NO: 27018 - DNA, 20 bp, Artificial Sequence
  Antisense compound
gctaccggcgtggtctgtat

SEQ ID NO: 27019 - DNA, 20 bp, Artificial Sequence
  Antisense compound
tgctaccggcgtggtctgta

SEQ ID NO: 27020 - DNA, 20 bp, Artificial Sequence
  Antisense compound
ttgctaccggcgtggtctgt

SEQ ID NO: 27021 - DNA, 20 bp, Artificial Sequence
  Antisense compound
gttgctaccggcgtggtctg

SEQ ID NO: 27022 - DNA, 20 bp, Artificial Sequence
  Antisense compound
cgttgctaccggcgtggtct

SEQ ID NO: 27023 - DNA, 20 bp, Artificial Sequence
  Antisense compound
tcgttgctaccggcgtggtc

SEQ ID NO: 27024 - DNA, 20 bp, Artificial Sequence
  Antisense compound
gtcgttgctaccggcgtggt

SEQ ID NO: 27025 - DNA, 20 bp, Artificial Sequence
  Antisense compound
tgtcgttgctaccggcgtgg

SEQ ID NO: 27026 - DNA, 20 bp, Artificial Sequence
  Antisense compound
ttgtcgttgctaccggcgtg

SEQ ID NO: 27027 - DNA, 20 bp, Artificial Sequence
  Antisense compound
attgtcgttgctaccggcgt

SEQ ID NO: 27028 - DNA, 20 bp, Artificial Sequence
  Antisense compound
tattgtcgttgctaccggcg

SEQ ID NO: 27029 - DNA, 20 bp, Artificial Sequence
  Antisense compound
atattgtcgttgctaccggc

SEQ ID NO: 27030 - DNA, 20 bp, Artificial Sequence
  Antisense compound
aatattgtcgttgctaccgg

SEQ ID NO: 27031 - DNA, 20 bp, Artificial Sequence
  Antisense compound
caatattgtcgttgctaccg

SEQ ID NO: 27032 - DNA, 20 bp, Artificial Sequence
  Antisense compound
gcaatattgtcgttgctacc

SEQ ID NO: 27033 - DNA, 20 bp, Artificial Sequence
  Antisense compound
agcaatattgtcgttgctac

SEQ ID NO: 27034 - DNA, 20 bp, Artificial Sequence
  Antisense compound
aagcaatattgtcgttgcta

SEQ ID NO: 27035 - DNA, 20 bp, Artificial Sequence
  Antisense compound
aaagcaatattgtcgttgct

SEQ ID NO: 27036 - DNA, 20 bp, Artificial Sequence
  Antisense compound
caaagcaatattgtcgttgc

SEQ ID NO: 27037 - DNA, 20 bp, Artificial Sequence
  Antisense compound
gcaaagcaatattgtcgttg

SEQ ID NO: 27038 - DNA, 20 bp, Artificial Sequence
  Antisense compound
agcaaagcaatattgtcgtt

SEQ ID NO: 27039 - DNA, 20 bp, Artificial Sequence
  Antisense compound
tagcaaagcaatattgtcgt

SEQ ID NO: 27040 - DNA, 20 bp, Artificial Sequence
  Antisense compound
ctagcaaagcaatattgtcg

SEQ ID NO: 27041 - DNA, 20 bp, Artificial Sequence
  Antisense compound
actagcaaagcaatattgtc

SEQ ID NO: 27042 - DNA, 20 bp, Artificial Sequence
  Antisense compound
tactagcaaagcaatattgt

SEQ ID NO: 27043 - DNA, 20 bp, Artificial Sequence
  Antisense compound
gtactagcaaagcaatattg

SEQ ID NO: 27044 - DNA, 20 bp, Artificial Sequence
  Antisense compound
tgtactagcaaagcaatatt

SEQ ID NO: 27045 - DNA, 20 bp, Artificial Sequence
  Antisense compound
ctgtactagcaaagcaatat

SEQ ID NO: 27046 - DNA, 20 bp, Artificial Sequence
  Antisense compound
actgtactagcaaagcaata

SEQ ID NO: 27047 - DNA, 20 bp, Artificial Sequence
  Antisense compound
tactgtactagcaaagcaat

SEQ ID NO: 27048 - DNA, 20 bp, Artificial Sequence
  Antisense compound
ttactgtactagcaaagcaa

SEQ ID NO: 27049 - DNA, 20 bp, Artificial Sequence
  Antisense compound
cttactgtactagcaaagca

SEQ ID NO: 27050 - DNA, 20 bp, Artificial Sequence
  Antisense compound
acttactgtactagcaaagc

SEQ ID NO: 27051 - DNA, 20 bp, Artificial Sequence
  Antisense compound
cacttactgtactagcaaag

SEQ ID NO: 27052 - DNA, 20 bp, Artificial Sequence
  Antisense compound
tcacttactgtactagcaaa

SEQ ID NO: 27053 - DNA, 20 bp, Artificial Sequence
  Antisense compound
gtcacttactgtactagcaa

SEQ ID NO: 27054 - DNA, 20 bp, Artificial Sequence
  Antisense compound
tgtcacttactgtactagca

SEQ ID NO: 27055 - DNA, 20 bp, Artificial Sequence
  Antisense compound
ttgtcacttactgtactagc

SEQ ID NO: 27056 - DNA, 20 bp, Artificial Sequence
  Antisense compound
gttgtcacttactgtactag

SEQ ID NO: 27057 - DNA, 20 bp, Artificial Sequence
  Antisense compound
tgttgtcacttactgtacta

SEQ ID NO: 27058 - DNA, 20 bp, Artificial Sequence
  Antisense compound
ctgttgtcacttactgtact

SEQ ID NO: 27059 - DNA, 20 bp, Artificial Sequence
  Antisense compound
tctgttgtcacttactgtac

SEQ ID NO: 27060 - DNA, 20 bp, Artificial Sequence
  Antisense compound
atctgttgtcacttactgta

SEQ ID NO: 27061 - DNA, 20 bp, Artificial Sequence
  Antisense compound
catctgttgtcacttactgt

SEQ ID NO: 27062 - DNA, 20 bp, Artificial Sequence
  Antisense compound
acatctgttgtcacttactg

SEQ ID NO: 27063 - DNA, 20 bp, Artificial Sequence
  Antisense compound
aacatctgttgtcacttact

SEQ ID NO: 27064 - DNA, 20 bp, Artificial Sequence
  Antisense compound
aaacatctgttgtcacttac

SEQ ID NO: 27065 - DNA, 20 bp, Artificial Sequence
  Antisense compound
gaaacatctgttgtcactta

SEQ ID NO: 27066 - DNA, 20 bp, Artificial Sequence
  Antisense compound
tgaaacatctgttgtcactt

SEQ ID NO: 27067 - DNA, 20 bp, Artificial Sequence
  Antisense compound
atgaaacatctgttgtcact

SEQ ID NO: 27068 - DNA, 20 bp, Artificial Sequence
  Antisense compound
gatgaaacatctgttgtcac

SEQ ID NO: 27069 - DNA, 20 bp, Artificial Sequence
  Antisense compound
agatgaaacatctgttgtca

SEQ ID NO: 27070 - DNA, 20 bp, Artificial Sequence
  Antisense compound
aagatgaaacatctgttgtc

SEQ ID NO: 27071 - DNA, 20 bp, Artificial Sequence
  Antisense compound
caagatgaaacatctgttgt

SEQ ID NO: 27072 - DNA, 20 bp, Artificial Sequence
  Antisense compound
acaagatgaaacatctgttg

SEQ ID NO: 27073 - DNA, 20 bp, Artificial Sequence
  Antisense compound
aacaagatgaaacatctgtt

SEQ ID NO: 27074 - DNA, 20 bp, Artificial Sequence
  Antisense compound
caacaagatgaaacatctgt

SEQ ID NO: 27075 - DNA, 20 bp, Artificial Sequence
  Antisense compound
tcaacaagatgaaacatctg

SEQ ID NO: 27076 - DNA, 20 bp, Artificial Sequence
  Antisense compound
gtcaacaagatgaaacatct

SEQ ID NO: 27077 - DNA, 20 bp, Artificial Sequence
  Antisense compound
agtcaacaagatgaaacatc

SEQ ID NO: 27078 - DNA, 20 bp, Artificial Sequence
  Antisense compound
aagtcaacaagatgaaacat

SEQ ID NO: 27079 - DNA, 20 bp, Artificial Sequence
  Antisense compound
gaagtcaacaagatgaaaca

SEQ ID NO: 27080 - DNA, 20 bp, Artificial Sequence
  Antisense compound
ggaagtcaacaagatgaaac

SEQ ID NO: 27081 - DNA, 20 bp, Artificial Sequence
  Antisense compound
tggaagtcaacaagatgaaa

SEQ ID NO: 27082 - DNA, 20 bp, Artificial Sequence
  Antisense compound
ctggaagtcaacaagatgaa

SEQ ID NO: 27083 - DNA, 20 bp, Artificial Sequence
  Antisense compound
cctggaagtcaacaagatga

SEQ ID NO: 27084 - DNA, 20 bp, Artificial Sequence
  Antisense compound
acctggaagtcaacaagatg

SEQ ID NO: 27085 - DNA, 20 bp, Artificial Sequence
  Antisense compound
aacctggaagtcaacaagat

SEQ ID NO: 27086 - DNA, 20 bp, Artificial Sequence
  Antisense compound
taacctggaagtcaacaaga

SEQ ID NO: 27087 - DNA, 20 bp, Artificial Sequence
  Antisense compound
gtaacctggaagtcaacaag

SEQ ID NO: 27088 - DNA, 20 bp, Artificial Sequence
  Antisense compound
tgtaacctggaagtcaacaa

SEQ ID NO: 27089 - DNA, 20 bp, Artificial Sequence
  Antisense compound
ttgtaacctggaagtcaaca

SEQ ID NO: 27090 - DNA, 20 bp, Artificial Sequence
  Antisense compound
attgtaacctggaagtcaac

SEQ ID NO: 27091 - DNA, 20 bp, Artificial Sequence
  Antisense compound
tattgtaacctggaagtcaa

SEQ ID NO: 27092 - DNA, 20 bp, Artificial Sequence
  Antisense compound
ctattgtaacctggaagtca

SEQ ID NO: 27093 - DNA, 20 bp, Artificial Sequence
  Antisense compound
gctattgtaacctggaagtc

SEQ ID NO: 27094 - DNA, 20 bp, Artificial Sequence
  Antisense compound
tgctattgtaacctggaagt

SEQ ID NO: 27095 - DNA, 20 bp, Artificial Sequence
  Antisense compound
ctgctattgtaacctggaag

SEQ ID NO: 27096 - DNA, 20 bp, Artificial Sequence
  Antisense compound
tctgctattgtaacctggaa

SEQ ID NO: 27097 - DNA, 20 bp, Artificial Sequence
  Antisense compound
ctctgctattgtaacctgga

SEQ ID NO: 27098 - DNA, 20 bp, Artificial Sequence
  Antisense compound
tctctgctattgtaacctgg

SEQ ID NO: 27099 - DNA, 20 bp, Artificial Sequence
  Antisense compound
atctctgctattgtaacctg

SEQ ID NO: 27100 - DNA, 20 bp, Artificial Sequence
  Antisense compound
tatctctgctattgtaacct

SEQ ID NO: 27101 - DNA, 20 bp, Artificial Sequence
  Antisense compound
atatctctgctattgtaacc

SEQ ID NO: 27102 - DNA, 20 bp, Artificial Sequence
  Antisense compound
aatatctctgctattgtaac

SEQ ID NO: 27103 - DNA, 20 bp, Artificial Sequence
  Antisense compound
caatatctctgctattgtaa

SEQ ID NO: 27104 - DNA, 20 bp, Artificial Sequence
  Antisense compound
tcaatatctctgctattgta

SEQ ID NO: 27105 - DNA, 20 bp, Artificial Sequence
  Antisense compound
atcaatatctctgctattgt

SEQ ID NO: 27106 - DNA, 20 bp, Artificial Sequence
  Antisense compound
aatcaatatctctgctattg

SEQ ID NO: 27107 - DNA, 20 bp, Artificial Sequence
  Antisense compound
taatcaatatctctgctatt

SEQ ID NO: 27108 - DNA, 20 bp, Artificial Sequence
  Antisense compound
ataatcaatatctctgctat

SEQ ID NO: 27109 - DNA, 20 bp, Artificial Sequence
  Antisense compound
gataatcaatatctctgcta

SEQ ID NO: 27110 - DNA, 20 bp, Artificial Sequence
  Antisense compound
tgataatcaatatctctgct

SEQ ID NO: 27111 - DNA, 20 bp, Artificial Sequence
  Antisense compound
atgataatcaatatctctgc

SEQ ID NO: 27112 - DNA, 20 bp, Artificial Sequence
  Antisense compound
aatgataatcaatatctctg

SEQ ID NO: 27113 - DNA, 20 bp, Artificial Sequence
  Antisense compound
taatgataatcaatatctct

SEQ ID NO: 27114 - DNA, 20 bp, Artificial Sequence
  Antisense compound
ataatgataatcaatatctc

SEQ ID NO: 27115 - DNA, 20 bp, Artificial Sequence
  Antisense compound
cataatgataatcaatatct

SEQ ID NO: 27116 - DNA, 20 bp, Artificial Sequence
  Antisense compound
tcataatgataatcaatatc

SEQ ID NO: 27117 - DNA, 20 bp, Artificial Sequence
  Antisense compound
ctcataatgataatcaatat

SEQ ID NO: 27118 - DNA, 20 bp, Artificial Sequence
  Antisense compound
cctcataatgataatcaata

SEQ ID NO: 27119 - DNA, 20 bp, Artificial Sequence
  Antisense compound
tcctcataatgataatcaat

SEQ ID NO: 27120 - DNA, 20 bp, Artificial Sequence
  Antisense compound
gtcctcataatgataatcaa

SEQ ID NO: 27121 - DNA, 20 bp, Artificial Sequence
  Antisense compound
agtcctcataatgataatca

SEQ ID NO: 27122 - DNA, 20 bp, Artificial Sequence
  Antisense compound
aagtcctcataatgataatc

SEQ ID NO: 27123 - DNA, 20 bp, Artificial Sequence
  Antisense compound
aaagtcctcataatgataat

SEQ ID NO: 27124 - DNA, 20 bp, Artificial Sequence
  Antisense compound
gaaagtcctcataatgataa

SEQ ID NO: 27125 - DNA, 20 bp, Artificial Sequence
  Antisense compound
tgaaagtcctcataatgata

SEQ ID NO: 27126 - DNA, 20 bp, Artificial Sequence
  Antisense compound
ctgaaagtcctcataatgat

SEQ ID NO: 27127 - DNA, 20 bp, Artificial Sequence
  Antisense compound
cctgaaagtcctcataatga

SEQ ID NO: 27128 - DNA, 20 bp, Artificial Sequence
  Antisense compound
tcctgaaagtcctcataatg

SEQ ID NO: 27129 - DNA, 20 bp, Artificial Sequence
  Antisense compound
atcctgaaagtcctcataat

SEQ ID NO: 27130 - DNA, 20 bp, Artificial Sequence
  Antisense compound
aatcctgaaagtcctcataa

SEQ ID NO: 27131 - DNA, 20 bp, Artificial Sequence
  Antisense compound
caatcctgaaagtcctcata

SEQ ID NO: 27132 - DNA, 20 bp, Artificial Sequence
  Antisense compound
gcaatcctgaaagtcctcat

SEQ ID NO: 27133 - DNA, 20 bp, Artificial Sequence
  Antisense compound
agcaatcctgaaagtcctca

SEQ ID NO: 27134 - DNA, 20 bp, Artificial Sequence
  Antisense compound
tagcaatcctgaaagtcctc

SEQ ID NO: 27135 - DNA, 20 bp, Artificial Sequence
  Antisense compound
atagcaatcctgaaagtcct

SEQ ID NO: 27136 - DNA, 20 bp, Artificial Sequence
  Antisense compound
aatagcaatcctgaaagtcc

SEQ ID NO: 27137 - DNA, 20 bp, Artificial Sequence
  Antisense compound
aaatagcaatcctgaaagtc

SEQ ID NO: 27138 - DNA, 20 bp, Artificial Sequence
  Antisense compound
caaatagcaatcctgaaagt

SEQ ID NO: 27139 - DNA, 20 bp, Artificial Sequence
  Antisense compound
ccaaatagcaatcctgaaag

SEQ ID NO: 27140 - DNA, 20 bp, Artificial Sequence
  Antisense compound
tccaaatagcaatcctgaaa

SEQ ID NO: 27141 - DNA, 20 bp, Artificial Sequence
  Antisense compound
ttccaaatagcaatcctgaa

SEQ ID NO: 27142 - DNA, 20 bp, Artificial Sequence
  Antisense compound
attccaaatagcaatcctga

SEQ ID NO: 27143 - DNA, 20 bp, Artificial Sequence
  Antisense compound
gattccaaatagcaatcctg

SEQ ID NO: 27144 - DNA, 20 bp, Artificial Sequence
  Antisense compound
agattccaaatagcaatcct

SEQ ID NO: 27145 - DNA, 20 bp, Artificial Sequence
  Antisense compound
aagattccaaatagcaatcc

SEQ ID NO: 27146 - DNA, 20 bp, Artificial Sequence
  Antisense compound
caagattccaaatagcaatc

SEQ ID NO: 27147 - DNA, 20 bp, Artificial Sequence
  Antisense compound
tcaagattccaaatagcaat

SEQ ID NO: 27148 - DNA, 20 bp, Artificial Sequence
  Antisense compound
gtcaagattccaaatagcaa

SEQ ID NO: 27149 - DNA, 20 bp, Artificial Sequence
  Antisense compound
cgtcaagattccaaatagca

SEQ ID NO: 27150 - DNA, 20 bp, Artificial Sequence
  Antisense compound
acgtcaagattccaaatagc

SEQ ID NO: 27151 - DNA, 20 bp, Artificial Sequence
  Antisense compound
aacgtcaagattccaaatag

SEQ ID NO: 27152 - DNA, 20 bp, Artificial Sequence
  Antisense compound
taacgtcaagattccaaata

SEQ ID NO: 27153 - DNA, 20 bp, Artificial Sequence
  Antisense compound
ataacgtcaagattccaaat

SEQ ID NO: 27154 - DNA, 20 bp, Artificial Sequence
  Antisense compound
tataacgtcaagattccaaa

SEQ ID NO: 27155 - DNA, 20 bp, Artificial Sequence
  Antisense compound
ttataacgtcaagattccaa

SEQ ID NO: 27156 - DNA, 20 bp, Artificial Sequence
  Antisense compound
attataacgtcaagattcca

SEQ ID NO: 27157 - DNA, 20 bp, Artificial Sequence
  Antisense compound
tattataacgtcaagattcc

SEQ ID NO: 27158 - DNA, 20 bp, Artificial Sequence
  Antisense compound
ttattataacgtcaagattc

SEQ ID NO: 27159 - DNA, 20 bp, Artificial Sequence
  Antisense compound
cttattataacgtcaagatt

SEQ ID NO: 27160 - DNA, 20 bp, Artificial Sequence
  Antisense compound
acttattataacgtcaagat

SEQ ID NO: 27161 - DNA, 20 bp, Artificial Sequence
  Antisense compound
aacttattataacgtcaaga

SEQ ID NO: 27162 - DNA, 20 bp, Artificial Sequence
  Antisense compound
gaacttattataacgtcaag

SEQ ID NO: 27163 - DNA, 20 bp, Artificial Sequence
  Antisense compound
tgaacttattataacgtcaa

SEQ ID NO: 27164 - DNA, 20 bp, Artificial Sequence
  Antisense compound
ttgaacttattataacgtca

SEQ ID NO: 27165 - DNA, 20 bp, Artificial Sequence
  Antisense compound
attgaacttattataacgtc

SEQ ID NO: 27166 - DNA, 20 bp, Artificial Sequence
  Antisense compound
tattgaacttattataacgt

SEQ ID NO: 27167 - DNA, 20 bp, Artificial Sequence
  Antisense compound
ctattgaacttattataacg

SEQ ID NO: 27168 - DNA, 20 bp, Artificial Sequence
  Antisense compound
actattgaacttattataac

SEQ ID NO: 27169 - DNA, 20 bp, Artificial Sequence
  Antisense compound
cactattgaacttattataa

SEQ ID NO: 27170 - DNA, 20 bp, Artificial Sequence
  Antisense compound
tcactattgaacttattata

SEQ ID NO: 27171 - DNA, 20 bp, Artificial Sequence
  Antisense compound
ctcactattgaacttattat

SEQ ID NO: 27172 - DNA, 20 bp, Artificial Sequence
  Antisense compound
tctcactattgaacttatta

SEQ ID NO: 27173 - DNA, 20 bp, Artificial Sequence
  Antisense compound
gtctcactattgaacttatt

SEQ ID NO: 27174 - DNA, 20 bp, Artificial Sequence
  Antisense compound
tgtctcactattgaacttat

SEQ ID NO: 27175 - DNA, 20 bp, Artificial Sequence
  Antisense compound
ttgtctcactattgaactta

SEQ ID NO: 27176 - DNA, 20 bp, Artificial Sequence
  Antisense compound
attgtctcactattgaactt

SEQ ID NO: 27177 - DNA, 20 bp, Artificial Sequence
  Antisense compound
aattgtctcactattgaact

SEQ ID NO: 27178 - DNA, 20 bp, Artificial Sequence
  Antisense compound
taattgtctcactattgaac

SEQ ID NO: 27179 - DNA, 20 bp, Artificial Sequence
  Antisense compound
ataattgtctcactattgaa

SEQ ID NO: 27180 - DNA, 20 bp, Artificial Sequence
  Antisense compound
aataattgtctcactattga

SEQ ID NO: 27181 - DNA, 20 bp, Artificial Sequence
  Antisense compound
aaataattgtctcactattg

SEQ ID NO: 27182 - DNA, 20 bp, Artificial Sequence
  Antisense compound
taaataattgtctcactatt

SEQ ID NO: 27183 - DNA, 20 bp, Artificial Sequence
  Antisense compound
ttaaataattgtctcactat

SEQ ID NO: 27184 - DNA, 20 bp, Artificial Sequence
  Antisense compound
cttaaataattgtctcacta

SEQ ID NO: 27185 - DNA, 20 bp, Artificial Sequence
  Antisense compound
gcttaaataattgtctcact

SEQ ID NO: 27186 - DNA, 20 bp, Artificial Sequence
  Antisense compound
ggcttaaataattgtctcac

SEQ ID NO: 27187 - DNA, 20 bp, Artificial Sequence
  Antisense compound
aggcttaaataattgtctca

SEQ ID NO: 27188 - DNA, 20 bp, Artificial Sequence
  Antisense compound
gaggcttaaataattgtctc

SEQ ID NO: 27189 - DNA, 20 bp, Artificial Sequence
  Antisense compound
agaggcttaaataattgtct

SEQ ID NO: 27190 - DNA, 20 bp, Artificial Sequence
  Antisense compound
tagaggcttaaataattgtc

SEQ ID NO: 27191 - DNA, 20 bp, Artificial Sequence
  Antisense compound
ttagaggcttaaataattgt

SEQ ID NO: 27192 - DNA, 20 bp, Artificial Sequence
  Antisense compound
gttagaggcttaaataattg

SEQ ID NO: 27193 - DNA, 20 bp, Artificial Sequence
  Antisense compound
agttagaggcttaaataatt

SEQ ID NO: 27194 - DNA, 20 bp, Artificial Sequence
  Antisense compound
tagttagaggcttaaataat

SEQ ID NO: 27195 - DNA, 20 bp, Artificial Sequence
  Antisense compound
ttagttagaggcttaaataa

SEQ ID NO: 27196 - DNA, 20 bp, Artificial Sequence
  Antisense compound
cttagttagaggcttaaata

SEQ ID NO: 27197 - DNA, 20 bp, Artificial Sequence
  Antisense compound
tcttagttagaggcttaaat

SEQ ID NO: 27198 - DNA, 20 bp, Artificial Sequence
  Antisense compound
ttcttagttagaggcttaaa

SEQ ID NO: 27199 - DNA, 20 bp, Artificial Sequence
  Antisense compound
cttcttagttagaggcttaa

SEQ ID NO: 27200 - DNA, 20 bp, Artificial Sequence
  Antisense compound
tcttcttagttagaggctta

SEQ ID NO: 27201 - DNA, 20 bp, Artificial Sequence
  Antisense compound
ttcttcttagttagaggctt

SEQ ID NO: 27202 - DNA, 20 bp, Artificial Sequence
  Antisense compound
attcttcttagttagaggct

SEQ ID NO: 27203 - DNA, 20 bp, Artificial Sequence
  Antisense compound
aattcttcttagttagaggc

SEQ ID NO: 27204 - DNA, 20 bp, Artificial Sequence
  Antisense compound
taattcttcttagttagagg

SEQ ID NO: 27205 - DNA, 20 bp, Artificial Sequence
  Antisense compound
ataattcttcttagttagag

SEQ ID NO: 27206 - DNA, 20 bp, Artificial Sequence
  Antisense compound
aataattcttcttagttaga

SEQ ID NO: 27207 - DNA, 20 bp, Artificial Sequence
  Antisense compound
gaataattcttcttagttag

SEQ ID NO: 27208 - DNA, 20 bp, Artificial Sequence
  Antisense compound
cgaataattcttcttagtta

SEQ ID NO: 27209 - DNA, 20 bp, Artificial Sequence
  Antisense compound
ccgaataattcttcttagtt

SEQ ID NO: 27210 - DNA, 20 bp, Artificial Sequence
  Antisense compound
tccgaataattcttcttagt

SEQ ID NO: 27211 - DNA, 20 bp, Artificial Sequence
  Antisense compound
ctccgaataattcttcttag

SEQ ID NO: 27212 - DNA, 20 bp, Artificial Sequence
  Antisense compound
actccgaataattcttctta

SEQ ID NO: 27213 - DNA, 20 bp, Artificial Sequence
  Antisense compound
aactccgaataattcttctt

SEQ ID NO: 27214 - DNA, 20 bp, Artificial Sequence
  Antisense compound
taactccgaataattcttct

SEQ ID NO: 27215 - DNA, 20 bp, Artificial Sequence
  Antisense compound
ctaactccgaataattcttc

SEQ ID NO: 27216 - DNA, 20 bp, Artificial Sequence
  Antisense compound
tctaactccgaataattctt

SEQ ID NO: 27217 - DNA, 20 bp, Artificial Sequence
  Antisense compound
atctaactccgaataattct

SEQ ID NO: 27218 - DNA, 20 bp, Artificial Sequence
  Antisense compound
catctaactccgaataattc

SEQ ID NO: 27219 - DNA, 20 bp, Artificial Sequence
  Antisense compound
tcatctaactccgaataatt

SEQ ID NO: 27220 - DNA, 20 bp, Artificial Sequence
  Antisense compound
atcatctaactccgaataat

SEQ ID NO: 27221 - DNA, 20 bp, Artificial Sequence
  Antisense compound
catcatctaactccgaataa

SEQ ID NO: 27222 - DNA, 20 bp, Artificial Sequence
  Antisense compound
tcatcatctaactccgaata

SEQ ID NO: 27223 - DNA, 20 bp, Artificial Sequence
  Antisense compound
ttcatcatctaactccgaat

SEQ ID NO: 27224 - DNA, 20 bp, Artificial Sequence
  Antisense compound
cttcatcatctaactccgaa

SEQ ID NO: 27225 - DNA, 20 bp, Artificial Sequence
  Antisense compound
tcttcatcatctaactccga

SEQ ID NO: 27226 - DNA, 20 bp, Artificial Sequence
  Antisense compound
ttcttcatcatctaactccg

SEQ ID NO: 27227 - DNA, 20 bp, Artificial Sequence
  Antisense compound
gttcttcatcatctaactcc

SEQ ID NO: 27228 - DNA, 20 bp, Artificial Sequence
  Antisense compound
ggttcttcatcatctaactc

SEQ ID NO: 27229 - DNA, 20 bp, Artificial Sequence
  Antisense compound
aggttcttcatcatctaact

SEQ ID NO: 27230 - DNA, 20 bp, Artificial Sequence
  Antisense compound
taggttcttcatcatctaac

SEQ ID NO: 27231 - DNA, 20 bp, Artificial Sequence
  Antisense compound
ataggttcttcatcatctaa

SEQ ID NO: 27232 - DNA, 20 bp, Artificial Sequence
  Antisense compound
cataggttcttcatcatcta

SEQ ID NO: 27233 - DNA, 20 bp, Artificial Sequence
  Antisense compound
ccataggttcttcatcatct

SEQ ID NO: 27234 - DNA, 20 bp, Artificial Sequence
  Antisense compound
tccataggttcttcatcatc

SEQ ID NO: 27235 - DNA, 20 bp, Artificial Sequence
  Antisense compound
ctccataggttcttcatcat

SEQ ID NO: 27236 - DNA, 20 bp, Artificial Sequence
  Antisense compound
actccataggttcttcatca

SEQ ID NO: 27237 - DNA, 20 bp, Artificial Sequence
  Antisense compound
aactccataggttcttcatc

SEQ ID NO: 27238 - DNA, 20 bp, Artificial Sequence
  Antisense compound
taactccataggttcttcat

SEQ ID NO: 27239 - DNA, 20 bp, Artificial Sequence
  Antisense compound
ctaactccataggttcttca

SEQ ID NO: 27240 - DNA, 20 bp, Artificial Sequence
  Antisense compound
tctaactccataggttcttc

SEQ ID NO: 27241 - DNA, 20 bp, Artificial Sequence
  Antisense compound
atctaactccataggttctt

SEQ ID NO: 27242 - DNA, 20 bp, Artificial Sequence
  Antisense compound
aatctaactccataggttct

SEQ ID NO: 27243 - DNA, 20 bp, Artificial Sequence
  Antisense compound
taatctaactccataggttc

SEQ ID NO: 27244 - DNA, 20 bp, Artificial Sequence
  Antisense compound
ataatctaactccataggtt

SEQ ID NO: 27245 - DNA, 20 bp, Artificial Sequence
  Antisense compound
gataatctaactccataggt

SEQ ID NO: 27246 - DNA, 20 bp, Artificial Sequence
  Antisense compound
ggataatctaactccatagg

SEQ ID NO: 27247 - DNA, 20 bp, Artificial Sequence
  Antisense compound
tggataatctaactccatag

SEQ ID NO: 27248 - DNA, 20 bp, Artificial Sequence
  Antisense compound
atggataatctaactccata

SEQ ID NO: 27249 - DNA, 20 bp, Artificial Sequence
  Antisense compound
tatggataatctaactccat

SEQ ID NO: 27250 - DNA, 20 bp, Artificial Sequence
  Antisense compound
ttatggataatctaactcca

SEQ ID NO: 27251 - DNA, 20 bp, Artificial Sequence
  Antisense compound
tttatggataatctaactcc

SEQ ID NO: 27252 - DNA, 20 bp, Artificial Sequence
  Antisense compound
ttttatggataatctaactc

SEQ ID NO: 27253 - DNA, 20 bp, Artificial Sequence
  Antisense compound
gttttatggataatctaact

SEQ ID NO: 27254 - DNA, 20 bp, Artificial Sequence
  Antisense compound
cgttttatggataatctaac

SEQ ID NO: 27255 - DNA, 20 bp, Artificial Sequence
  Antisense compound
tcgttttatggataatctaa

SEQ ID NO: 27256 - DNA, 20 bp, Artificial Sequence
  Antisense compound
ttcgttttatggataatcta

SEQ ID NO: 27257 - DNA, 20 bp, Artificial Sequence
  Antisense compound
gttcgttttatggataatct

SEQ ID NO: 27258 - DNA, 20 bp, Artificial Sequence
  Antisense compound
tgttcgttttatggataatc

SEQ ID NO: 27259 - DNA, 20 bp, Artificial Sequence
  Antisense compound
atgttcgttttatggataat

SEQ ID NO: 27260 - DNA, 20 bp, Artificial Sequence
  Antisense compound
catgttcgttttatggataa

SEQ ID NO: 27261 - DNA, 20 bp, Artificial Sequence
  Antisense compound
tcatgttcgttttatggata

SEQ ID NO: 27262 - DNA, 20 bp, Artificial Sequence
  Antisense compound
ttcatgttcgttttatggat

SEQ ID NO: 27263 - DNA, 20 bp, Artificial Sequence
  Antisense compound
tttcatgttcgttttatgga

SEQ ID NO: 27264 - DNA, 20 bp, Artificial Sequence
  Antisense compound
ttttcatgttcgttttatgg

SEQ ID NO: 27265 - DNA, 20 bp, Artificial Sequence
  Antisense compound
attttcatgttcgttttatg

SEQ ID NO: 27266 - DNA, 20 bp, Artificial Sequence
  Antisense compound
aattttcatgttcgttttat

SEQ ID NO: 27267 - DNA, 20 bp, Artificial Sequence
  Antisense compound
taattttcatgttcgtttta

SEQ ID NO: 27268 - DNA, 20 bp, Artificial Sequence
  Antisense compound
ataattttcatgttcgtttt

SEQ ID NO: 27269 - DNA, 20 bp, Artificial Sequence
  Antisense compound
aataattttcatgttcgttt

SEQ ID NO: 27270 - DNA, 20 bp, Artificial Sequence
  Antisense compound
gaataattttcatgttcgtt

SEQ ID NO: 27271 - DNA, 20 bp, Artificial Sequence
  Antisense compound
agaataattttcatgttcgt

SEQ ID NO: 27272 - DNA, 20 bp, Artificial Sequence
  Antisense compound
gagaataattttcatgttcg

SEQ ID NO: 27273 - DNA, 20 bp, Artificial Sequence
  Antisense compound
agagaataattttcatgttc

SEQ ID NO: 27274 - DNA, 20 bp, Artificial Sequence
  Antisense compound
aagagaataattttcatgtt

SEQ ID NO: 27275 - DNA, 20 bp, Artificial Sequence
  Antisense compound
gaagagaataattttcatgt

SEQ ID NO: 27276 - DNA, 20 bp, Artificial Sequence
  Antisense compound
ggaagagaataattttcatg

SEQ ID NO: 27277 - DNA, 20 bp, Artificial Sequence
  Antisense compound
aggaagagaataattttcat

SEQ ID NO: 27278 - DNA, 20 bp, Artificial Sequence
  Antisense compound
caggaagagaataattttca

SEQ ID NO: 27279 - DNA, 20 bp, Artificial Sequence
  Antisense compound
tcaggaagagaataattttc

SEQ ID NO: 27280 - DNA, 20 bp, Artificial Sequence
  Antisense compound
gtcaggaagagaataatttt

SEQ ID NO: 27281 - DNA, 20 bp, Artificial Sequence
  Antisense compound
tgtcaggaagagaataattt

SEQ ID NO: 27282 - DNA, 20 bp, Artificial Sequence
  Antisense compound
atgtcaggaagagaataatt

SEQ ID NO: 27283 - DNA, 20 bp, Artificial Sequence
  Antisense compound
aatgtcaggaagagaataat

SEQ ID NO: 27284 - DNA, 20 bp, Artificial Sequence
  Antisense compound
caatgtcaggaagagaataa

SEQ ID NO: 27285 - DNA, 20 bp, Artificial Sequence
  Antisense compound
tcaatgtcaggaagagaata

SEQ ID NO: 27286 - DNA, 20 bp, Artificial Sequence
  Antisense compound
atcaatgtcaggaagagaat

SEQ ID NO: 27287 - DNA, 20 bp, Artificial Sequence
  Antisense compound
aatcaatgtcaggaagagaa

SEQ ID NO: 27288 - DNA, 20 bp, Artificial Sequence
  Antisense compound
caatcaatgtcaggaagaga

SEQ ID NO: 27289 - DNA, 20 bp, Artificial Sequence
  Antisense compound
acaatcaatgtcaggaagag

SEQ ID NO: 27290 - DNA, 20 bp, Artificial Sequence
  Antisense compound
tacaatcaatgtcaggaaga

SEQ ID NO: 27291 - DNA, 20 bp, Artificial Sequence
  Antisense compound
atacaatcaatgtcaggaag

SEQ ID NO: 27292 - DNA, 20 bp, Artificial Sequence
  Antisense compound
aatacaatcaatgtcaggaa

SEQ ID NO: 27293 - DNA, 20 bp, Artificial Sequence
  Antisense compound
aaatacaatcaatgtcagga

SEQ ID NO: 27294 - DNA, 20 bp, Artificial Sequence
  Antisense compound
taaatacaatcaatgtcagg

SEQ ID NO: 27295 - DNA, 20 bp, Artificial Sequence
  Antisense compound
gtaaatacaatcaatgtcag

SEQ ID NO: 27296 - DNA, 20 bp, Artificial Sequence
  Antisense compound
tgtaaatacaatcaatgtca

SEQ ID NO: 27297 - DNA, 20 bp, Artificial Sequence
  Antisense compound
atgtaaatacaatcaatgtc

SEQ ID NO: 27298 - DNA, 20 bp, Artificial Sequence
  Antisense compound
gatgtaaatacaatcaatgt

SEQ ID NO: 27299 - DNA, 20 bp, Artificial Sequence
  Antisense compound
agatgtaaatacaatcaatg

SEQ ID NO: 27300 - DNA, 20 bp, Artificial Sequence
  Antisense compound
aagatgtaaatacaatcaat

SEQ ID NO: 27301 - DNA, 20 bp, Artificial Sequence
  Antisense compound
caagatgtaaatacaatcaa

SEQ ID NO: 27302 - DNA, 20 bp, Artificial Sequence
  Antisense compound
gcaagatgtaaatacaatca

SEQ ID NO: 27303 - DNA, 20 bp, Artificial Sequence
  Antisense compound
cgcaagatgtaaatacaatc

SEQ ID NO: 27304 - DNA, 20 bp, Artificial Sequence
  Antisense compound
tcgcaagatgtaaatacaat

SEQ ID NO: 27305 - DNA, 20 bp, Artificial Sequence
  Antisense compound
ctcgcaagatgtaaatacaa

SEQ ID NO: 27306 - DNA, 20 bp, Artificial Sequence
  Antisense compound
gctcgcaagatgtaaataca

SEQ ID NO: 27307 - DNA, 20 bp, Artificial Sequence
  Antisense compound
agctcgcaagatgtaaatac

SEQ ID NO: 27308 - DNA, 20 bp, Artificial Sequence
  Antisense compound
tagctcgcaagatgtaaata

SEQ ID NO: 27309 - DNA, 20 bp, Artificial Sequence
  Antisense compound
atagctcgcaagatgtaaat

SEQ ID NO: 27310 - DNA, 20 bp, Artificial Sequence
  Antisense compound
tatagctcgcaagatgtaaa

SEQ ID NO: 27311 - DNA, 20 bp, Artificial Sequence
  Antisense compound
atatagctcgcaagatgtaa

SEQ ID NO: 27312 - DNA, 20 bp, Artificial Sequence
  Antisense compound
gatatagctcgcaagatgta

SEQ ID NO: 27313 - DNA, 20 bp, Artificial Sequence
  Antisense compound
tgatatagctcgcaagatgt

SEQ ID NO: 27314 - DNA, 20 bp, Artificial Sequence
  Antisense compound
gtgatatagctcgcaagatg

SEQ ID NO: 27315 - DNA, 20 bp, Artificial Sequence
  Antisense compound
agtgatatagctcgcaagat

SEQ ID NO: 27316 - DNA, 20 bp, Artificial Sequence
  Antisense compound
tagtgatatagctcgcaaga

SEQ ID NO: 27317 - DNA, 20 bp, Artificial Sequence
  Antisense compound
atagtgatatagctcgcaag

SEQ ID NO: 27318 - DNA, 20 bp, Artificial Sequence
  Antisense compound
gatagtgatatagctcgcaa

SEQ ID NO: 27319 - DNA, 20 bp, Artificial Sequence
  Antisense compound
tgatagtgatatagctcgca

SEQ ID NO: 27320 - DNA, 20 bp, Artificial Sequence
  Antisense compound
ctgatagtgatatagctcgc

SEQ ID NO: 27321 - DNA, 20 bp, Artificial Sequence
  Antisense compound
cctgatagtgatatagctcg

SEQ ID NO: 27322 - DNA, 20 bp, Artificial Sequence
  Antisense compound
tcctgatagtgatatagctc

SEQ ID NO: 27323 - DNA, 20 bp, Artificial Sequence
  Antisense compound
ctcctgatagtgatatagct

SEQ ID NO: 27324 - DNA, 20 bp, Artificial Sequence
  Antisense compound
actcctgatagtgatatagc

SEQ ID NO: 27325 - DNA, 20 bp, Artificial Sequence
  Antisense compound
cactcctgatagtgatatag

SEQ ID NO: 27326 - DNA, 20 bp, Artificial Sequence
  Antisense compound
acactcctgatagtgatata

SEQ ID NO: 27327 - DNA, 20 bp, Artificial Sequence
  Antisense compound
cacactcctgatagtgatat

SEQ ID NO: 27328 - DNA, 20 bp, Artificial Sequence
  Antisense compound
acacactcctgatagtgata

SEQ ID NO: 27329 - DNA, 20 bp, Artificial Sequence
  Antisense compound
aacacactcctgatagtgat

SEQ ID NO: 27330 - DNA, 20 bp, Artificial Sequence
  Antisense compound
taacacactcctgatagtga

SEQ ID NO: 27331 - DNA, 20 bp, Artificial Sequence
  Antisense compound
ctaacacactcctgatagtg

SEQ ID NO: 27332 - DNA, 20 bp, Artificial Sequence
  Antisense compound
tctaacacactcctgatagt

SEQ ID NO: 27333 - DNA, 20 bp, Artificial Sequence
  Antisense compound
ctctaacacactcctgatag

SEQ ID NO: 27334 - DNA, 20 bp, Artificial Sequence
  Antisense compound
cctctaacacactcctgata

SEQ ID NO: 27335 - DNA, 20 bp, Artificial Sequence
  Antisense compound
acctctaacacactcctgat

SEQ ID NO: 27336 - DNA, 20 bp, Artificial Sequence
  Antisense compound
tacctctaacacactcctga

SEQ ID NO: 27337 - DNA, 20 bp, Artificial Sequence
  Antisense compound
gtacctctaacacactcctg

SEQ ID NO: 27338 - DNA, 20 bp, Artificial Sequence
  Antisense compound
cgtacctctaacacactcct

SEQ ID NO: 27339 - DNA, 20 bp, Artificial Sequence
  Antisense compound
tcgtacctctaacacactcc

SEQ ID NO: 27340 - DNA, 20 bp, Artificial Sequence
  Antisense compound
gtcgtacctctaacacactc

SEQ ID NO: 27341 - DNA, 20 bp, Artificial Sequence
  Antisense compound
agtcgtacctctaacacact

SEQ ID NO: 27342 - DNA, 20 bp, Artificial Sequence
  Antisense compound
cagtcgtacctctaacacac

SEQ ID NO: 27343 - DNA, 20 bp, Artificial Sequence
  Antisense compound
acagtcgtacctctaacaca

SEQ ID NO: 27344 - DNA, 20 bp, Artificial Sequence
  Antisense compound
tacagtcgtacctctaacac

SEQ ID NO: 27345 - DNA, 20 bp, Artificial Sequence
  Antisense compound
gtacagtcgtacctctaaca

SEQ ID NO: 27346 - DNA, 20 bp, Artificial Sequence
  Antisense compound
agtacagtcgtacctctaac

SEQ ID NO: 27347 - DNA, 20 bp, Artificial Sequence
  Antisense compound
tagtacagtcgtacctctaa

SEQ ID NO: 27348 - DNA, 20 bp, Artificial Sequence
  Antisense compound
gtagtacagtcgtacctcta

SEQ ID NO: 27349 - DNA, 20 bp, Artificial Sequence
  Antisense compound
agtagtacagtcgtacctct

SEQ ID NO: 27350 - DNA, 20 bp, Artificial Sequence
  Antisense compound
tagtagtacagtcgtacctc

SEQ ID NO: 27351 - DNA, 20 bp, Artificial Sequence
  Antisense compound
ttagtagtacagtcgtacct

SEQ ID NO: 27352 - DNA, 20 bp, Artificial Sequence
  Antisense compound
tttagtagtacagtcgtacc

SEQ ID NO: 27353 - DNA, 20 bp, Artificial Sequence
  Antisense compound
ttttagtagtacagtcgtac

SEQ ID NO: 27354 - DNA, 20 bp, Artificial Sequence
  Antisense compound
cttttagtagtacagtcgta

SEQ ID NO: 27355 - DNA, 20 bp, Artificial Sequence
  Antisense compound
tcttttagtagtacagtcgt

SEQ ID NO: 27356 - DNA, 20 bp, Artificial Sequence
  Antisense compound
ttcttttagtagtacagtcg

SEQ ID NO: 27357 - DNA, 20 bp, Artificial Sequence
  Antisense compound
gttcttttagtagtacagtc

SEQ ID NO: 27358 - DNA, 20 bp, Artificial Sequence
  Antisense compound
ggttcttttagtagtacagt

SEQ ID NO: 27359 - DNA, 20 bp, Artificial Sequence
  Antisense compound
aggttcttttagtagtacag

SEQ ID NO: 27360 - DNA, 20 bp, Artificial Sequence
  Antisense compound
aaggttcttttagtagtaca

SEQ ID NO: 27361 - DNA, 20 bp, Artificial Sequence
  Antisense compound
caaggttcttttagtagtac

SEQ ID NO: 27362 - DNA, 20 bp, Artificial Sequence
  Antisense compound
gcaaggttcttttagtagta

SEQ ID NO: 27363 - DNA, 20 bp, Artificial Sequence
  Antisense compound
ggcaaggttcttttagtagt

SEQ ID NO: 27364 - DNA, 20 bp, Artificial Sequence
  Antisense compound
gggcaaggttcttttagtag

SEQ ID NO: 27365 - DNA, 20 bp, Artificial Sequence
  Antisense compound
tgggcaaggttcttttagta

SEQ ID NO: 27366 - DNA, 20 bp, Artificial Sequence
  Antisense compound
atgggcaaggttcttttagt

SEQ ID NO: 27367 - DNA, 20 bp, Artificial Sequence
  Antisense compound
gatgggcaaggttcttttag

SEQ ID NO: 27368 - DNA, 20 bp, Artificial Sequence
  Antisense compound
tgatgggcaaggttctttta

SEQ ID NO: 27369 - DNA, 20 bp, Artificial Sequence
  Antisense compound
ctgatgggcaaggttctttt

SEQ ID NO: 27370 - DNA, 20 bp, Artificial Sequence
  Antisense compound
cctgatgggcaaggttcttt

SEQ ID NO: 27371 - DNA, 20 bp, Artificial Sequence
  Antisense compound
tcctgatgggcaaggttctt

SEQ ID NO: 27372 - DNA, 20 bp, Artificial Sequence
  Antisense compound
ttcctgatgggcaaggttct

SEQ ID NO: 27373 - DNA, 20 bp, Artificial Sequence
  Antisense compound
gttcctgatgggcaaggttc

SEQ ID NO: 27374 - DNA, 20 bp, Artificial Sequence
  Antisense compound
tgttcctgatgggcaaggtt

SEQ ID NO: 27375 - DNA, 20 bp, Artificial Sequence
  Antisense compound
atgttcctgatgggcaaggt

SEQ ID NO: 27376 - DNA, 20 bp, Artificial Sequence
  Antisense compound
tatgttcctgatgggcaagg

SEQ ID NO: 27377 - DNA, 20 bp, Artificial Sequence
  Antisense compound
gtatgttcctgatgggcaag

SEQ ID NO: 27378 - DNA, 20 bp, Artificial Sequence
  Antisense compound
cgtatgttcctgatgggcaa

SEQ ID NO: 27379 - DNA, 20 bp, Artificial Sequence
  Antisense compound
tcgtatgttcctgatgggca

SEQ ID NO: 27380 - DNA, 20 bp, Artificial Sequence
  Antisense compound
ctcgtatgttcctgatgggc

SEQ ID NO: 27381 - DNA, 20 bp, Artificial Sequence
  Antisense compound
cctcgtatgttcctgatggg

SEQ ID NO: 27382 - DNA, 20 bp, Artificial Sequence
  Antisense compound
ccctcgtatgttcctgatgg

SEQ ID NO: 27383 - DNA, 20 bp, Artificial Sequence
  Antisense compound
gccctcgtatgttcctgatg

SEQ ID NO: 27384 - DNA, 20 bp, Artificial Sequence
  Antisense compound
tgccctcgtatgttcctgat

SEQ ID NO: 27385 - DNA, 20 bp, Artificial Sequence
  Antisense compound
ttgccctcgtatgttcctga

SEQ ID NO: 27386 - DNA, 20 bp, Artificial Sequence
  Antisense compound
attgccctcgtatgttcctg

SEQ ID NO: 27387 - DNA, 20 bp, Artificial Sequence
  Antisense compound
aattgccctcgtatgttcct

SEQ ID NO: 27388 - DNA, 20 bp, Artificial Sequence
  Antisense compound
gaattgccctcgtatgttcc

SEQ ID NO: 27389 - DNA, 20 bp, Artificial Sequence
  Antisense compound
tgaattgccctcgtatgttc

SEQ ID NO: 27390 - DNA, 20 bp, Artificial Sequence
  Antisense compound
gtgaattgccctcgtatgtt

SEQ ID NO: 27391 - DNA, 20 bp, Artificial Sequence
  Antisense compound
ggtgaattgccctcgtatgt

SEQ ID NO: 27392 - DNA, 20 bp, Artificial Sequence
  Antisense compound
tggtgaattgccctcgtatg

SEQ ID NO: 27393 - DNA, 20 bp, Artificial Sequence
  Antisense compound
atggtgaattgccctcgtat

SEQ ID NO: 27394 - DNA, 20 bp, Artificial Sequence
  Antisense compound
aatggtgaattgccctcgta

SEQ ID NO: 27395 - DNA, 20 bp, Artificial Sequence
  Antisense compound
aaatggtgaattgccctcgt

SEQ ID NO: 27396 - DNA, 20 bp, Artificial Sequence
  Antisense compound
gaaatggtgaattgccctcg

SEQ ID NO: 27397 - DNA, 20 bp, Artificial Sequence
  Antisense compound
tgaaatggtgaattgccctc

SEQ ID NO: 27398 - DNA, 20 bp, Artificial Sequence
  Antisense compound
gtgaaatggtgaattgccct

SEQ ID NO: 27399 - DNA, 20 bp, Artificial Sequence
  Antisense compound
ggtgaaatggtgaattgccc

SEQ ID NO: 27400 - DNA, 20 bp, Artificial Sequence
  Antisense compound
gggtgaaatggtgaattgcc

SEQ ID NO: 27401 - DNA, 20 bp, Artificial Sequence
  Antisense compound
agggtgaaatggtgaattgc

SEQ ID NO: 27402 - DNA, 20 bp, Artificial Sequence
  Antisense compound
gagggtgaaatggtgaattg

SEQ ID NO: 27403 - DNA, 20 bp, Artificial Sequence
  Antisense compound
agagggtgaaatggtgaatt

SEQ ID NO: 27404 - DNA, 20 bp, Artificial Sequence
  Antisense compound
aagagggtgaaatggtgaat

SEQ ID NO: 27405 - DNA, 20 bp, Artificial Sequence
  Antisense compound
caagagggtgaaatggtgaa

SEQ ID NO: 27406 - DNA, 20 bp, Artificial Sequence
  Antisense compound
gcaagagggtgaaatggtga

SEQ ID NO: 27407 - DNA, 20 bp, Artificial Sequence
  Antisense compound
agcaagagggtgaaatggtg

SEQ ID NO: 27408 - DNA, 20 bp, Artificial Sequence
  Antisense compound
cagcaagagggtgaaatggt

SEQ ID NO: 27409 - DNA, 20 bp, Artificial Sequence
  Antisense compound
tcagcaagagggtgaaatgg

SEQ ID NO: 27410 - DNA, 20 bp, Artificial Sequence
  Antisense compound
gtcagcaagagggtgaaatg

SEQ ID NO: 27411 - DNA, 20 bp, Artificial Sequence
  Antisense compound
tgtcagcaagagggtgaaat

SEQ ID NO: 27412 - DNA, 20 bp, Artificial Sequence
  Antisense compound
ttgtcagcaagagggtgaaa

SEQ ID NO: 27413 - DNA, 20 bp, Artificial Sequence
  Antisense compound
attgtcagcaagagggtgaa

SEQ ID NO: 27414 - DNA, 20 bp, Artificial Sequence
  Antisense compound
tattgtcagcaagagggtga

SEQ ID NO: 27415 - DNA, 20 bp, Artificial Sequence
  Antisense compound
ttattgtcagcaagagggtg

SEQ ID NO: 27416 - DNA, 20 bp, Artificial Sequence
  Antisense compound
tttattgtcagcaagagggt

SEQ ID NO: 27417 - DNA, 20 bp, Artificial Sequence
  Antisense compound
atttattgtcagcaagaggg

SEQ ID NO: 27418 - DNA, 20 bp, Artificial Sequence
  Antisense compound
aatttattgtcagcaagagg

SEQ ID NO: 27419 - DNA, 20 bp, Artificial Sequence
  Antisense compound
aaatttattgtcagcaagag

SEQ ID NO: 27420 - DNA, 20 bp, Artificial Sequence
  Antisense compound
caaatttattgtcagcaaga

SEQ ID NO: 27421 - DNA, 20 bp, Artificial Sequence
  Antisense compound
gcaaatttattgtcagcaag

SEQ ID NO: 27422 - DNA, 20 bp, Artificial Sequence
  Antisense compound
tgcaaatttattgtcagcaa

SEQ ID NO: 27423 - DNA, 20 bp, Artificial Sequence
  Antisense compound
gtgcaaatttattgtcagca

SEQ ID NO: 27424 - DNA, 20 bp, Artificial Sequence
  Antisense compound
agtgcaaatttattgtcagc

SEQ ID NO: 27425 - DNA, 20 bp, Artificial Sequence
  Antisense compound
tagtgcaaatttattgtcag

SEQ ID NO: 27426 - DNA, 20 bp, Artificial Sequence
  Antisense compound
ttagtgcaaatttattgtca

SEQ ID NO: 27427 - DNA, 20 bp, Artificial Sequence
  Antisense compound
gttagtgcaaatttattgtc

SEQ ID NO: 27428 - DNA, 20 bp, Artificial Sequence
  Antisense compound
agttagtgcaaatttattgt

SEQ ID NO: 27429 - DNA, 20 bp, Artificial Sequence
  Antisense compound
aagttagtgcaaatttattg

SEQ ID NO: 27430 - DNA, 20 bp, Artificial Sequence
  Antisense compound
caagttagtgcaaatttatt

SEQ ID NO: 27431 - DNA, 20 bp, Artificial Sequence
  Antisense compound
gcaagttagtgcaaatttat

SEQ ID NO: 27432 - DNA, 20 bp, Artificial Sequence
  Antisense compound
tgcaagttagtgcaaattta

SEQ ID NO: 27433 - DNA, 20 bp, Artificial Sequence
  Antisense compound
gtgcaagttagtgcaaattt

SEQ ID NO: 27434 - DNA, 20 bp, Artificial Sequence
  Antisense compound
agtgcaagttagtgcaaatt

SEQ ID NO: 27435 - DNA, 20 bp, Artificial Sequence
  Antisense compound
tagtgcaagttagtgcaaat

SEQ ID NO: 27436 - DNA, 20 bp, Artificial Sequence
  Antisense compound
ctagtgcaagttagtgcaaa

SEQ ID NO: 27437 - DNA, 20 bp, Artificial Sequence
  Antisense compound
gctagtgcaagttagtgcaa

SEQ ID NO: 27438 - DNA, 20 bp, Artificial Sequence
  Antisense compound
tgctagtgcaagttagtgca

SEQ ID NO: 27439 - DNA, 20 bp, Artificial Sequence
  Antisense compound
gtgctagtgcaagttagtgc

SEQ ID NO: 27440 - DNA, 20 bp, Artificial Sequence
  Antisense compound
tgtgctagtgcaagttagtg

SEQ ID NO: 27441 - DNA, 20 bp, Artificial Sequence
  Antisense compound
gtgtgctagtgcaagttagt

SEQ ID NO: 27442 - DNA, 20 bp, Artificial Sequence
  Antisense compound
tgtgtgctagtgcaagttag

SEQ ID NO: 27443 - DNA, 20 bp, Artificial Sequence
  Antisense compound
gtgtgtgctagtgcaagtta

SEQ ID NO: 27444 - DNA, 20 bp, Artificial Sequence
  Antisense compound
agtgtgtgctagtgcaagtt

SEQ ID NO: 27445 - DNA, 20 bp, Artificial Sequence
  Antisense compound
aagtgtgtgctagtgcaagt

SEQ ID NO: 27446 - DNA, 20 bp, Artificial Sequence
  Antisense compound
aaagtgtgtgctagtgcaag

SEQ ID NO: 27447 - DNA, 20 bp, Artificial Sequence
  Antisense compound
caaagtgtgtgctagtgcaa

SEQ ID NO: 27448 - DNA, 20 bp, Artificial Sequence
  Antisense compound
gcaaagtgtgtgctagtgca

SEQ ID NO: 27449 - DNA, 20 bp, Artificial Sequence
  Antisense compound
agcaaagtgtgtgctagtgc

SEQ ID NO: 27450 - DNA, 20 bp, Artificial Sequence
  Antisense compound
aagcaaagtgtgtgctagtg

SEQ ID NO: 27451 - DNA, 20 bp, Artificial Sequence
  Antisense compound
aaagcaaagtgtgtgctagt

SEQ ID NO: 27452 - DNA, 20 bp, Artificial Sequence
  Antisense compound
aaaagcaaagtgtgtgctag

SEQ ID NO: 27453 - DNA, 20 bp, Artificial Sequence
  Antisense compound
caaaagcaaagtgtgtgcta

SEQ ID NO: 27454 - DNA, 20 bp, Artificial Sequence
  Antisense compound
gcaaaagcaaagtgtgtgct

SEQ ID NO: 27455 - DNA, 20 bp, Artificial Sequence
  Antisense compound
agcaaaagcaaagtgtgtgc

SEQ ID NO: 27456 - DNA, 20 bp, Artificial Sequence
  Antisense compound
aagcaaaagcaaagtgtgtg

SEQ ID NO: 27457 - DNA, 20 bp, Artificial Sequence
  Antisense compound
caagcaaaagcaaagtgtgt

SEQ ID NO: 27458 - DNA, 20 bp, Artificial Sequence
  Antisense compound
acaagcaaaagcaaagtgtg

SEQ ID NO: 27459 - DNA, 20 bp, Artificial Sequence
  Antisense compound
cacaagcaaaagcaaagtgt

SEQ ID NO: 27460 - DNA, 20 bp, Artificial Sequence
  Antisense compound
gcacaagcaaaagcaaagtg

SEQ ID NO: 27461 - DNA, 20 bp, Artificial Sequence
  Antisense compound
agcacaagcaaaagcaaagt

SEQ ID NO: 27462 - DNA, 20 bp, Artificial Sequence
  Antisense compound
cagcacaagcaaaagcaaag

SEQ ID NO: 27463 - DNA, 20 bp, Artificial Sequence
  Antisense compound
tcagcacaagcaaaagcaaa

SEQ ID NO: 27464 - DNA, 20 bp, Artificial Sequence
  Antisense compound
gtcagcacaagcaaaagcaa

SEQ ID NO: 27465 - DNA, 20 bp, Artificial Sequence
  Antisense compound
cgtcagcacaagcaaaagca

SEQ ID NO: 27466 - DNA, 20 bp, Artificial Sequence
  Antisense compound
ccgtcagcacaagcaaaagc

SEQ ID NO: 27467 - DNA, 20 bp, Artificial Sequence
  Antisense compound
accgtcagcacaagcaaaag

SEQ ID NO: 27468 - DNA, 20 bp, Artificial Sequence
  Antisense compound
taccgtcagcacaagcaaaa

SEQ ID NO: 27469 - DNA, 20 bp, Artificial Sequence
  Antisense compound
gtaccgtcagcacaagcaaa

SEQ ID NO: 27470 - DNA, 20 bp, Artificial Sequence
  Antisense compound
agtaccgtcagcacaagcaa

SEQ ID NO: 27471 - DNA, 20 bp, Artificial Sequence
  Antisense compound
gagtaccgtcagcacaagca

SEQ ID NO: 27472 - DNA, 20 bp, Artificial Sequence
  Antisense compound
cgagtaccgtcagcacaagc

SEQ ID NO: 27473 - DNA, 20 bp, Artificial Sequence
  Antisense compound
tcgagtaccgtcagcacaag

SEQ ID NO: 27474 - DNA, 20 bp, Artificial Sequence
  Antisense compound
gtcgagtaccgtcagcacaa

SEQ ID NO: 27475 - DNA, 20 bp, Artificial Sequence
  Antisense compound
tgtcgagtaccgtcagcaca

SEQ ID NO: 27476 - DNA, 20 bp, Artificial Sequence
  Antisense compound
atgtcgagtaccgtcagcac

SEQ ID NO: 27477 - DNA, 20 bp, Artificial Sequence
  Antisense compound
tatgtcgagtaccgtcagca

SEQ ID NO: 27478 - DNA, 20 bp, Artificial Sequence
  Antisense compound
gtatgtcgagtaccgtcagc

SEQ ID NO: 27479 - DNA, 20 bp, Artificial Sequence
  Antisense compound
ggtatgtcgagtaccgtcag

SEQ ID NO: 27480 - DNA, 20 bp, Artificial Sequence
  Antisense compound
aggtatgtcgagtaccgtca

SEQ ID NO: 27481 - DNA, 20 bp, Artificial Sequence
  Antisense compound
taggtatgtcgagtaccgtc

SEQ ID NO: 27482 - DNA, 20 bp, Artificial Sequence
  Antisense compound
ataggtatgtcgagtaccgt

SEQ ID NO: 27483 - DNA, 20 bp, Artificial Sequence
  Antisense compound
gataggtatgtcgagtaccg

SEQ ID NO: 27484 - DNA, 20 bp, Artificial Sequence
  Antisense compound
tgataggtatgtcgagtacc

SEQ ID NO: 27485 - DNA, 20 bp, Artificial Sequence
  Antisense compound
ctgataggtatgtcgagtac

SEQ ID NO: 27486 - DNA, 20 bp, Artificial Sequence
  Antisense compound
gctgataggtatgtcgagta

SEQ ID NO: 27487 - DNA, 20 bp, Artificial Sequence
  Antisense compound
agctgataggtatgtcgagt

SEQ ID NO: 27488 - DNA, 20 bp, Artificial Sequence
  Antisense compound
cagctgataggtatgtcgag

SEQ ID NO: 27489 - DNA, 20 bp, Artificial Sequence
  Antisense compound
gcagctgataggtatgtcga

SEQ ID NO: 27490 - DNA, 20 bp, Artificial Sequence
  Antisense compound
cgcagctgataggtatgtcg

SEQ ID NO: 27491 - DNA, 20 bp, Artificial Sequence
  Antisense compound
acgcagctgataggtatgtc

SEQ ID NO: 27492 - DNA, 20 bp, Artificial Sequence
  Antisense compound
cacgcagctgataggtatgt

SEQ ID NO: 27493 - DNA, 20 bp, Artificial Sequence
  Antisense compound
gcacgcagctgataggtatg

SEQ ID NO: 27494 - DNA, 20 bp, Artificial Sequence
  Antisense compound
tgcacgcagctgataggtat

SEQ ID NO: 27495 - DNA, 20 bp, Artificial Sequence
  Antisense compound
ttgcacgcagctgataggta

SEQ ID NO: 27496 - DNA, 20 bp, Artificial Sequence
  Antisense compound
cttgcacgcagctgataggt

SEQ ID NO: 27497 - DNA, 20 bp, Artificial Sequence
  Antisense compound
tcttgcacgcagctgatagg

SEQ ID NO: 27498 - DNA, 20 bp, Artificial Sequence
  Antisense compound
atcttgcacgcagctgatag

SEQ ID NO: 27499 - DNA, 20 bp, Artificial Sequence
  Antisense compound
gatcttgcacgcagctgata

SEQ ID NO: 27500 - DNA, 20 bp, Artificial Sequence
  Antisense compound
tgatcttgcacgcagctgat

SEQ ID NO: 27501 - DNA, 20 bp, Artificial Sequence
  Antisense compound
ctgatcttgcacgcagctga

SEQ ID NO: 27502 - DNA, 20 bp, Artificial Sequence
  Antisense compound
actgatcttgcacgcagctg

SEQ ID NO: 27503 - DNA, 20 bp, Artificial Sequence
  Antisense compound
aactgatcttgcacgcagct

SEQ ID NO: 27504 - DNA, 20 bp, Artificial Sequence
  Antisense compound
aaactgatcttgcacgcagc

SEQ ID NO: 27505 - DNA, 20 bp, Artificial Sequence
  Antisense compound
gaaactgatcttgcacgcag

SEQ ID NO: 27506 - DNA, 20 bp, Artificial Sequence
  Antisense compound
tgaaactgatcttgcacgca

SEQ ID NO: 27507 - DNA, 20 bp, Artificial Sequence
  Antisense compound
gtgaaactgatcttgcacgc

SEQ ID NO: 27508 - DNA, 20 bp, Artificial Sequence
  Antisense compound
ggtgaaactgatcttgcacg

SEQ ID NO: 27509 - DNA, 20 bp, Artificial Sequence
  Antisense compound
tggtgaaactgatcttgcac

SEQ ID NO: 27510 - DNA, 20 bp, Artificial Sequence
  Antisense compound
ttggtgaaactgatcttgca

SEQ ID NO: 27511 - DNA, 20 bp, Artificial Sequence
  Antisense compound
tttggtgaaactgatcttgc

SEQ ID NO: 27512 - DNA, 20 bp, Artificial Sequence
  Antisense compound
ttttggtgaaactgatcttg

SEQ ID NO: 27513 - DNA, 20 bp, Artificial Sequence
  Antisense compound
gttttggtgaaactgatctt

SEQ ID NO: 27514 - DNA, 20 bp, Artificial Sequence
  Antisense compound
agttttggtgaaactgatct

SEQ ID NO: 27515 - DNA, 20 bp, Artificial Sequence
  Antisense compound
aagttttggtgaaactgatc

SEQ ID NO: 27516 - DNA, 20 bp, Artificial Sequence
  Antisense compound
aaagttttggtgaaactgat

SEQ ID NO: 27517 - DNA, 20 bp, Artificial Sequence
  Antisense compound
aaaagttttggtgaaactga

SEQ ID NO: 27518 - DNA, 20 bp, Artificial Sequence
  Antisense compound
gaaaagttttggtgaaactg

SEQ ID NO: 27519 - DNA, 20 bp, Artificial Sequence
  Antisense compound
tgaaaagttttggtgaaact

SEQ ID NO: 27520 - DNA, 20 bp, Artificial Sequence
  Antisense compound
atgaaaagttttggtgaaac

SEQ ID NO: 27521 - DNA, 20 bp, Artificial Sequence
  Antisense compound
gatgaaaagttttggtgaaa

SEQ ID NO: 27522 - DNA, 20 bp, Artificial Sequence
  Antisense compound
tgatgaaaagttttggtgaa

SEQ ID NO: 27523 - DNA, 20 bp, Artificial Sequence
  Antisense compound
ctgatgaaaagttttggtga

SEQ ID NO: 27524 - DNA, 20 bp, Artificial Sequence
  Antisense compound
tctgatgaaaagttttggtg

SEQ ID NO: 27525 - DNA, 20 bp, Artificial Sequence
  Antisense compound
gtctgatgaaaagttttggt

SEQ ID NO: 27526 - DNA, 20 bp, Artificial Sequence
  Antisense compound
tgtctgatgaaaagttttgg

SEQ ID NO: 27527 - DNA, 20 bp, Artificial Sequence
  Antisense compound
ttgtctgatgaaaagttttg

SEQ ID NO: 27528 - DNA, 20 bp, Artificial Sequence
  Antisense compound
cttgtctgatgaaaagtttt

SEQ ID NO: 27529 - DNA, 20 bp, Artificial Sequence
  Antisense compound
tcttgtctgatgaaaagttt

SEQ ID NO: 27530 - DNA, 20 bp, Artificial Sequence
  Antisense compound
ctcttgtctgatgaaaagtt

SEQ ID NO: 27531 - DNA, 20 bp, Artificial Sequence
  Antisense compound
cctcttgtctgatgaaaagt

SEQ ID NO: 27532 - DNA, 20 bp, Artificial Sequence
  Antisense compound
tcctcttgtctgatgaaaag

SEQ ID NO: 27533 - DNA, 20 bp, Artificial Sequence
  Antisense compound
ctcctcttgtctgatgaaaa

SEQ ID NO: 27534 - DNA, 20 bp, Artificial Sequence
  Antisense compound
cctcctcttgtctgatgaaa

SEQ ID NO: 27535 - DNA, 20 bp, Artificial Sequence
  Antisense compound
acctcctcttgtctgatgaa

SEQ ID NO: 27536 - DNA, 20 bp, Artificial Sequence
  Antisense compound
aacctcctcttgtctgatga

SEQ ID NO: 27537 - DNA, 20 bp, Artificial Sequence
  Antisense compound
gaacctcctcttgtctgatg

SEQ ID NO: 27538 - DNA, 20 bp, Artificial Sequence
  Antisense compound
tgaacctcctcttgtctgat

SEQ ID NO: 27539 - DNA, 20 bp, Artificial Sequence
  Antisense compound
ttgaacctcctcttgtctga

SEQ ID NO: 27540 - DNA, 20 bp, Artificial Sequence
  Antisense compound
gttgaacctcctcttgtctg

SEQ ID NO: 27541 - DNA, 20 bp, Artificial Sequence
  Antisense compound
tgttgaacctcctcttgtct

SEQ ID NO: 27542 - DNA, 20 bp, Artificial Sequence
  Antisense compound
ttgttgaacctcctcttgtc

SEQ ID NO: 27543 - DNA, 20 bp, Artificial Sequence
  Antisense compound
cttgttgaacctcctcttgt

SEQ ID NO: 27544 - DNA, 20 bp, Artificial Sequence
  Antisense compound
tcttgttgaacctcctcttg

SEQ ID NO: 27545 - DNA, 20 bp, Artificial Sequence
  Antisense compound
ctcttgttgaacctcctctt

SEQ ID NO: 27546 - DNA, 20 bp, Artificial Sequence
  Antisense compound
gctcttgttgaacctcctct

SEQ ID NO: 27547 - DNA, 20 bp, Artificial Sequence
  Antisense compound
agctcttgttgaacctcctc

SEQ ID NO: 27548 - DNA, 20 bp, Artificial Sequence
  Antisense compound
gagctcttgttgaacctcct

SEQ ID NO: 27549 - DNA, 20 bp, Artificial Sequence
  Antisense compound
agagctcttgttgaacctcc

SEQ ID NO: 27550 - DNA, 20 bp, Artificial Sequence
  Antisense compound
tagagctcttgttgaacctc

SEQ ID NO: 27551 - DNA, 20 bp, Artificial Sequence
  Antisense compound
gtagagctcttgttgaacct

SEQ ID NO: 27552 - DNA, 20 bp, Artificial Sequence
  Antisense compound
agtagagctcttgttgaacc

SEQ ID NO: 27553 - DNA, 20 bp, Artificial Sequence
  Antisense compound
gagtagagctcttgttgaac

SEQ ID NO: 27554 - DNA, 20 bp, Artificial Sequence
  Antisense compound
cgagtagagctcttgttgaa

SEQ ID NO: 27555 - DNA, 20 bp, Artificial Sequence
  Antisense compound
gcgagtagagctcttgttga

SEQ ID NO: 27556 - DNA, 20 bp, Artificial Sequence
  Antisense compound
ggcgagtagagctcttgttg

SEQ ID NO: 27557 - DNA, 20 bp, Artificial Sequence
  Antisense compound
tggcgagtagagctcttgtt

SEQ ID NO: 27558 - DNA, 20 bp, Artificial Sequence
  Antisense compound
gtggcgagtagagctcttgt

SEQ ID NO: 27559 - DNA, 20 bp, Artificial Sequence
  Antisense compound
agtggcgagtagagctcttg

SEQ ID NO: 27560 - DNA, 20 bp, Artificial Sequence
  Antisense compound
aagtggcgagtagagctctt

SEQ ID NO: 27561 - DNA, 20 bp, Artificial Sequence
  Antisense compound
aaagtggcgagtagagctct

SEQ ID NO: 27562 - DNA, 20 bp, Artificial Sequence
  Antisense compound
aaaagtggcgagtagagctc

SEQ ID NO: 27563 - DNA, 20 bp, Artificial Sequence
  Antisense compound
aaaaagtggcgagtagagct

SEQ ID NO: 27564 - DNA, 20 bp, Artificial Sequence
  Antisense compound
gaaaaagtggcgagtagagc

SEQ ID NO: 27565 - DNA, 20 bp, Artificial Sequence
  Antisense compound
agaaaaagtggcgagtagag

SEQ ID NO: 27566 - DNA, 20 bp, Artificial Sequence
  Antisense compound
gagaaaaagtggcgagtaga

SEQ ID NO: 27567 - DNA, 20 bp, Artificial Sequence
  Antisense compound
tgagaaaaagtggcgagtag

SEQ ID NO: 27568 - DNA, 20 bp, Artificial Sequence
  Antisense compound
atgagaaaaagtggcgagta

SEQ ID NO: 27569 - DNA, 20 bp, Artificial Sequence
  Antisense compound
aatgagaaaaagtggcgagt

SEQ ID NO: 27570 - DNA, 20 bp, Artificial Sequence
  Antisense compound
caatgagaaaaagtggcgag

SEQ ID NO: 27571 - DNA, 20 bp, Artificial Sequence
  Antisense compound
acaatgagaaaaagtggcga

SEQ ID NO: 27572 - DNA, 20 bp, Artificial Sequence
  Antisense compound
aacaatgagaaaaagtggcg

SEQ ID NO: 27573 - DNA, 20 bp, Artificial Sequence
  Antisense compound
caacaatgagaaaaagtggc

SEQ ID NO: 27574 - DNA, 20 bp, Artificial Sequence
  Antisense compound
gcaacaatgagaaaaagtgg

SEQ ID NO: 27575 - DNA, 20 bp, Artificial Sequence
  Antisense compound
agcaacaatgagaaaaagtg

SEQ ID NO: 27576 - DNA, 20 bp, Artificial Sequence
  Antisense compound
cagcaacaatgagaaaaagt

SEQ ID NO: 27577 - DNA, 20 bp, Artificial Sequence
  Antisense compound
gcagcaacaatgagaaaaag

SEQ ID NO: 27578 - DNA, 20 bp, Artificial Sequence
  Antisense compound
agcagcaacaatgagaaaaa

SEQ ID NO: 27579 - DNA, 20 bp, Artificial Sequence
  Antisense compound
gagcagcaacaatgagaaaa

SEQ ID NO: 27580 - DNA, 20 bp, Artificial Sequence
  Antisense compound
agagcagcaacaatgagaaa

SEQ ID NO: 27581 - DNA, 20 bp, Artificial Sequence
  Antisense compound
tagagcagcaacaatgagaa

SEQ ID NO: 27582 - DNA, 20 bp, Artificial Sequence
  Antisense compound
ctagagcagcaacaatgaga

SEQ ID NO: 27583 - DNA, 20 bp, Artificial Sequence
  Antisense compound
actagagcagcaacaatgag

SEQ ID NO: 27584 - DNA, 20 bp, Artificial Sequence
  Antisense compound
tactagagcagcaacaatga

SEQ ID NO: 27585 - DNA, 20 bp, Artificial Sequence
  Antisense compound
atactagagcagcaacaatg

SEQ ID NO: 27586 - DNA, 20 bp, Artificial Sequence
  Antisense compound
aatactagagcagcaacaat

SEQ ID NO: 27587 - DNA, 20 bp, Artificial Sequence
  Antisense compound
aaatactagagcagcaacaa

SEQ ID NO: 27588 - DNA, 20 bp, Artificial Sequence
  Antisense compound
aaaatactagagcagcaaca

SEQ ID NO: 27589 - DNA, 20 bp, Artificial Sequence
  Antisense compound
aaaaatactagagcagcaac

SEQ ID NO: 27590 - DNA, 20 bp, Artificial Sequence
  Antisense compound
taaaaatactagagcagcaa

SEQ ID NO: 27591 - DNA, 20 bp, Artificial Sequence
  Antisense compound
ttaaaaatactagagcagca

SEQ ID NO: 27592 - DNA, 20 bp, Artificial Sequence
  Antisense compound
attaaaaatactagagcagc

SEQ ID NO: 27593 - DNA, 20 bp, Artificial Sequence
  Antisense compound
tattaaaaatactagagcag

SEQ ID NO: 27594 - DNA, 20 bp, Artificial Sequence
  Antisense compound
gtattaaaaatactagagca

SEQ ID NO: 27595 - DNA, 20 bp, Artificial Sequence
  Antisense compound
agtattaaaaatactagagc

SEQ ID NO: 27596 - DNA, 20 bp, Artificial Sequence
  Antisense compound
aagtattaaaaatactagag

SEQ ID NO: 27597 - DNA, 20 bp, Artificial Sequence
  Antisense compound
aaagtattaaaaatactaga

SEQ ID NO: 27598 - DNA, 20 bp, Artificial Sequence
  Antisense compound
caaagtattaaaaatactag

SEQ ID NO: 27599 - DNA, 20 bp, Artificial Sequence
  Antisense compound
gcaaagtattaaaaatacta

SEQ ID NO: 27600 - DNA, 20 bp, Artificial Sequence
  Antisense compound
agcaaagtattaaaaatact

SEQ ID NO: 27601 - DNA, 20 bp, Artificial Sequence
  Antisense compound
aagcaaagtattaaaaatac

SEQ ID NO: 27602 - DNA, 20 bp, Artificial Sequence
  Antisense compound
gaagcaaagtattaaaaata

SEQ ID NO: 27603 - DNA, 20 bp, Artificial Sequence
  Antisense compound
tgaagcaaagtattaaaaat

SEQ ID NO: 27604 - DNA, 20 bp, Artificial Sequence
  Antisense compound
gtgaagcaaagtattaaaaa

SEQ ID NO: 27605 - DNA, 20 bp, Artificial Sequence
  Antisense compound
ggtgaagcaaagtattaaaa

SEQ ID NO: 27606 - DNA, 20 bp, Artificial Sequence
  Antisense compound
tggtgaagcaaagtattaaa

SEQ ID NO: 27607 - DNA, 20 bp, Artificial Sequence
  Antisense compound
atggtgaagcaaagtattaa

SEQ ID NO: 27608 - DNA, 20 bp, Artificial Sequence
  Antisense compound
aatggtgaagcaaagtatta

SEQ ID NO: 27609 - DNA, 20 bp, Artificial Sequence
  Antisense compound
taatggtgaagcaaagtatt

SEQ ID NO: 27610 - DNA, 20 bp, Artificial Sequence
  Antisense compound
ttaatggtgaagcaaagtat

SEQ ID NO: 27611 - DNA, 20 bp, Artificial Sequence
  Antisense compound
cttaatggtgaagcaaagta

SEQ ID NO: 27612 - DNA, 20 bp, Artificial Sequence
  Antisense compound
tcttaatggtgaagcaaagt

SEQ ID NO: 27613 - DNA, 20 bp, Artificial Sequence
  Antisense compound
ctcttaatggtgaagcaaag

SEQ ID NO: 27614 - DNA, 20 bp, Artificial Sequence
  Antisense compound
tctcttaatggtgaagcaaa

SEQ ID NO: 27615 - DNA, 20 bp, Artificial Sequence
  Antisense compound
ttctcttaatggtgaagcaa

SEQ ID NO: 27616 - DNA, 20 bp, Artificial Sequence
  Antisense compound
tttctcttaatggtgaagca

SEQ ID NO: 27617 - DNA, 20 bp, Artificial Sequence
  Antisense compound
ctttctcttaatggtgaagc

SEQ ID NO: 27618 - DNA, 20 bp, Artificial Sequence
  Antisense compound
tctttctcttaatggtgaag

SEQ ID NO: 27619 - DNA, 20 bp, Artificial Sequence
  Antisense compound
gtctttctcttaatggtgaa

SEQ ID NO: 27620 - DNA, 20 bp, Artificial Sequence
  Antisense compound
tgtctttctcttaatggtga

SEQ ID NO: 27621 - DNA, 20 bp, Artificial Sequence
  Antisense compound
ctgtctttctcttaatggtg

SEQ ID NO: 27622 - DNA, 20 bp, Artificial Sequence
  Antisense compound
tctgtctttctcttaatggt

SEQ ID NO: 27623 - DNA, 20 bp, Artificial Sequence
  Antisense compound
ttctgtctttctcttaatgg

SEQ ID NO: 27624 - DNA, 20 bp, Artificial Sequence
  Antisense compound
attctgtctttctcttaatg

SEQ ID NO: 27625 - DNA, 20 bp, Artificial Sequence
  Antisense compound
cattctgtctttctcttaat

SEQ ID NO: 27626 - DNA, 20 bp, Artificial Sequence
  Antisense compound
tcattctgtctttctcttaa

SEQ ID NO: 27627 - DNA, 20 bp, Artificial Sequence
  Antisense compound
ttcattctgtctttctctta

SEQ ID NO: 27628 - DNA, 20 bp, Artificial Sequence
  Antisense compound
attcattctgtctttctctt

SEQ ID NO: 27629 - DNA, 20 bp, Artificial Sequence
  Antisense compound
cattcattctgtctttctct

SEQ ID NO: 27630 - DNA, 20 bp, Artificial Sequence
  Antisense compound
tcattcattctgtctttctc

SEQ ID NO: 27631 - DNA, 20 bp, Artificial Sequence
  Antisense compound
ctcattcattctgtctttct

SEQ ID NO: 27632 - DNA, 20 bp, Artificial Sequence
  Antisense compound
gctcattcattctgtctttc

SEQ ID NO: 27633 - DNA, 20 bp, Artificial Sequence
  Antisense compound
agctcattcattctgtcttt

SEQ ID NO: 27634 - DNA, 20 bp, Artificial Sequence
  Antisense compound
gagctcattcattctgtctt

SEQ ID NO: 27635 - DNA, 20 bp, Artificial Sequence
  Antisense compound
tgagctcattcattctgtct

SEQ ID NO: 27636 - DNA, 20 bp, Artificial Sequence
  Antisense compound
gtgagctcattcattctgtc

SEQ ID NO: 27637 - DNA, 20 bp, Artificial Sequence
  Antisense compound
agtgagctcattcattctgt

SEQ ID NO: 27638 - DNA, 20 bp, Artificial Sequence
  Antisense compound
aagtgagctcattcattctg

SEQ ID NO: 27639 - DNA, 20 bp, Artificial Sequence
  Antisense compound
aaagtgagctcattcattct

SEQ ID NO: 27640 - DNA, 20 bp, Artificial Sequence
  Antisense compound
taaagtgagctcattcattc

SEQ ID NO: 27641 - DNA, 20 bp, Artificial Sequence
  Antisense compound
ttaaagtgagctcattcatt

SEQ ID NO: 27642 - DNA, 20 bp, Artificial Sequence
  Antisense compound
attaaagtgagctcattcat

SEQ ID NO: 27643 - DNA, 20 bp, Artificial Sequence
  Antisense compound
aattaaagtgagctcattca

SEQ ID NO: 27644 - DNA, 20 bp, Artificial Sequence
  Antisense compound
caattaaagtgagctcattc

SEQ ID NO: 27645 - DNA, 20 bp, Artificial Sequence
  Antisense compound
tcaattaaagtgagctcatt

SEQ ID NO: 27646 - DNA, 20 bp, Artificial Sequence
  Antisense compound
gtcaattaaagtgagctcat

SEQ ID NO: 27647 - DNA, 20 bp, Artificial Sequence
  Antisense compound
agtcaattaaagtgagctca

SEQ ID NO: 27648 - DNA, 20 bp, Artificial Sequence
  Antisense compound
aagtcaattaaagtgagctc

SEQ ID NO: 27649 - DNA, 20 bp, Artificial Sequence
  Antisense compound
gaagtcaattaaagtgagct

SEQ ID NO: 27650 - DNA, 20 bp, Artificial Sequence
  Antisense compound
agaagtcaattaaagtgagc

SEQ ID NO: 27651 - DNA, 20 bp, Artificial Sequence
  Antisense compound
tagaagtcaattaaagtgag

SEQ ID NO: 27652 - DNA, 20 bp, Artificial Sequence
  Antisense compound
atagaagtcaattaaagtga

SEQ ID NO: 27653 - DNA, 20 bp, Artificial Sequence
  Antisense compound
aatagaagtcaattaaagtg

SEQ ID NO: 27654 - DNA, 20 bp, Artificial Sequence
  Antisense compound
aaatagaagtcaattaaagt

SEQ ID NO: 27655 - DNA, 20 bp, Artificial Sequence
  Antisense compound
caaatagaagtcaattaaag

SEQ ID NO: 27656 - DNA, 20 bp, Artificial Sequence
  Antisense compound
acaaatagaagtcaattaaa

SEQ ID NO: 27657 - DNA, 20 bp, Artificial Sequence
  Antisense compound
cacaaatagaagtcaattaa

SEQ ID NO: 27658 - DNA, 20 bp, Artificial Sequence
  Antisense compound
gcacaaatagaagtcaatta

SEQ ID NO: 27659 - DNA, 20 bp, Artificial Sequence
  Antisense compound
agcacaaatagaagtcaatt

SEQ ID NO: 27660 - DNA, 20 bp, Artificial Sequence
  Antisense compound
aagcacaaatagaagtcaat

SEQ ID NO: 27661 - DNA, 20 bp, Artificial Sequence
  Antisense compound
aaagcacaaatagaagtcaa

SEQ ID NO: 27662 - DNA, 20 bp, Artificial Sequence
  Antisense compound
aaaagcacaaatagaagtca

SEQ ID NO: 27663 - DNA, 20 bp, Artificial Sequence
  Antisense compound
aaaaagcacaaatagaagtc

SEQ ID NO: 27664 - DNA, 20 bp, Artificial Sequence
  Antisense compound
taaaaagcacaaatagaagt

SEQ ID NO: 27665 - DNA, 20 bp, Artificial Sequence
  Antisense compound
ctaaaaagcacaaatagaag

SEQ ID NO: 27666 - DNA, 20 bp, Artificial Sequence
  Antisense compound
gctaaaaagcacaaatagaa

SEQ ID NO: 27667 - DNA, 20 bp, Artificial Sequence
  Antisense compound
ggctaaaaagcacaaataga

SEQ ID NO: 27668 - DNA, 20 bp, Artificial Sequence
  Antisense compound
aggctaaaaagcacaaatag

SEQ ID NO: 27669 - DNA, 20 bp, Artificial Sequence
  Antisense compound
aaggctaaaaagcacaaata

SEQ ID NO: 27670 - DNA, 20 bp, Artificial Sequence
  Antisense compound
aaaggctaaaaagcacaaat

SEQ ID NO: 27671 - DNA, 20 bp, Artificial Sequence
  Antisense compound
gaaaggctaaaaagcacaaa

SEQ ID NO: 27672 - DNA, 20 bp, Artificial Sequence
  Antisense compound
agaaaggctaaaaagcacaa

SEQ ID NO: 27673 - DNA, 20 bp, Artificial Sequence
  Antisense compound
cagaaaggctaaaaagcaca

SEQ ID NO: 27674 - DNA, 20 bp, Artificial Sequence
  Antisense compound
gcagaaaggctaaaaagcac

SEQ ID NO: 27675 - DNA, 20 bp, Artificial Sequence
  Antisense compound
agcagaaaggctaaaaagca

SEQ ID NO: 27676 - DNA, 20 bp, Artificial Sequence
  Antisense compound
tagcagaaaggctaaaaagc

SEQ ID NO: 27677 - DNA, 20 bp, Artificial Sequence
  Antisense compound
atagcagaaaggctaaaaag

SEQ ID NO: 27678 - DNA, 20 bp, Artificial Sequence
  Antisense compound
aatagcagaaaggctaaaaa

SEQ ID NO: 27679 - DNA, 20 bp, Artificial Sequence
  Antisense compound
gaatagcagaaaggctaaaa

SEQ ID NO: 27680 - DNA, 20 bp, Artificial Sequence
  Antisense compound
ggaatagcagaaaggctaaa

SEQ ID NO: 27681 - DNA, 20 bp, Artificial Sequence
  Antisense compound
aggaatagcagaaaggctaa

SEQ ID NO: 27682 - DNA, 20 bp, Artificial Sequence
  Antisense compound
aaggaatagcagaaaggcta

SEQ ID NO: 27683 - DNA, 20 bp, Artificial Sequence
  Antisense compound
caaggaatagcagaaaggct

SEQ ID NO: 27684 - DNA, 20 bp, Artificial Sequence
  Antisense compound
acaaggaatagcagaaaggc

SEQ ID NO: 27685 - DNA, 20 bp, Artificial Sequence
  Antisense compound
aacaaggaatagcagaaagg

SEQ ID NO: 27686 - DNA, 20 bp, Artificial Sequence
  Antisense compound
aaacaaggaatagcagaaag

SEQ ID NO: 27687 - DNA, 20 bp, Artificial Sequence
  Antisense compound
aaaacaaggaatagcagaaa

SEQ ID NO: 27688 - DNA, 20 bp, Artificial Sequence
  Antisense compound
taaaacaaggaatagcagaa

SEQ ID NO: 27689 - DNA, 20 bp, Artificial Sequence
  Antisense compound
ttaaaacaaggaatagcaga

SEQ ID NO: 27690 - DNA, 20 bp, Artificial Sequence
  Antisense compound
attaaaacaaggaatagcag

SEQ ID NO: 27691 - DNA, 20 bp, Artificial Sequence
  Antisense compound
tattaaaacaaggaatagca

SEQ ID NO: 27692 - DNA, 20 bp, Artificial Sequence
  Antisense compound
ttattaaaacaaggaatagc

SEQ ID NO: 27693 - DNA, 20 bp, Artificial Sequence
  Antisense compound
attattaaaacaaggaatag

SEQ ID NO: 27694 - DNA, 20 bp, Artificial Sequence
  Antisense compound
cattattaaaacaaggaata

SEQ ID NO: 27695 - DNA, 20 bp, Artificial Sequence
  Antisense compound
gcattattaaaacaaggaat

SEQ ID NO: 27696 - DNA, 20 bp, Artificial Sequence
  Antisense compound
agcattattaaaacaaggaa

SEQ ID NO: 27697 - DNA, 20 bp, Artificial Sequence
  Antisense compound
aagcattattaaaacaagga

SEQ ID NO: 27698 - DNA, 20 bp, Artificial Sequence
  Antisense compound
taagcattattaaaacaagg

SEQ ID NO: 27699 - DNA, 20 bp, Artificial Sequence
  Antisense compound
ataagcattattaaaacaag

SEQ ID NO: 27700 - DNA, 20 bp, Artificial Sequence
  Antisense compound
aataagcattattaaaacaa

SEQ ID NO: 27701 - DNA, 20 bp, Artificial Sequence
  Antisense compound
taataagcattattaaaaca

SEQ ID NO: 27702 - DNA, 20 bp, Artificial Sequence
  Antisense compound
ataataagcattattaaaac

SEQ ID NO: 27703 - DNA, 20 bp, Artificial Sequence
  Antisense compound
tataataagcattattaaaa

SEQ ID NO: 27704 - DNA, 20 bp, Artificial Sequence
  Antisense compound
atataataagcattattaaa

SEQ ID NO: 27705 - DNA, 20 bp, Artificial Sequence
  Antisense compound
aatataataagcattattaa

SEQ ID NO: 27706 - DNA, 20 bp, Artificial Sequence
  Antisense compound
aaatataataagcattatta

SEQ ID NO: 27707 - DNA, 20 bp, Artificial Sequence
  Antisense compound
aaaatataataagcattatt

SEQ ID NO: 27708 - DNA, 20 bp, Artificial Sequence
  Antisense compound
caaaatataataagcattat

SEQ ID NO: 27709 - DNA, 20 bp, Artificial Sequence
  Antisense compound
ccaaaatataataagcatta

SEQ ID NO: 27710 - DNA, 20 bp, Artificial Sequence
  Antisense compound
accaaaatataataagcatt

SEQ ID NO: 27711 - DNA, 20 bp, Artificial Sequence
  Antisense compound
aaccaaaatataataagcat

SEQ ID NO: 27712 - DNA, 20 bp, Artificial Sequence
  Antisense compound
aaaccaaaatataataagca

SEQ ID NO: 27713 - DNA, 20 bp, Artificial Sequence
  Antisense compound
aaaaccaaaatataataagc

SEQ ID NO: 27714 - DNA, 20 bp, Artificial Sequence
  Antisense compound
gaaaaccaaaatataataag

SEQ ID NO: 27715 - DNA, 20 bp, Artificial Sequence
  Antisense compound
tgaaaaccaaaatataataa

SEQ ID NO: 27716 - DNA, 20 bp, Artificial Sequence
  Antisense compound
gtgaaaaccaaaatataata

SEQ ID NO: 27717 - DNA, 20 bp, Artificial Sequence
  Antisense compound
agtgaaaaccaaaatataat

SEQ ID NO: 27718 - DNA, 20 bp, Artificial Sequence
  Antisense compound
gagtgaaaaccaaaatataa

SEQ ID NO: 27719 - DNA, 20 bp, Artificial Sequence
  Antisense compound
cgagtgaaaaccaaaatata

SEQ ID NO: 27720 - DNA, 20 bp, Artificial Sequence
  Antisense compound
tcgagtgaaaaccaaaatat

SEQ ID NO: 27721 - DNA, 20 bp, Artificial Sequence
  Antisense compound
ttcgagtgaaaaccaaaata

SEQ ID NO: 27722 - DNA, 20 bp, Artificial Sequence
  Antisense compound
tttcgagtgaaaaccaaaat

SEQ ID NO: 27723 - DNA, 20 bp, Artificial Sequence
  Antisense compound
atttcgagtgaaaaccaaaa

SEQ ID NO: 27724 - DNA, 20 bp, Artificial Sequence
  Antisense compound
gatttcgagtgaaaaccaaa

SEQ ID NO: 27725 - DNA, 20 bp, Artificial Sequence
  Antisense compound
ggatttcgagtgaaaaccaa

SEQ ID NO: 27726 - DNA, 20 bp, Artificial Sequence
  Antisense compound
tggatttcgagtgaaaacca

SEQ ID NO: 27727 - DNA, 20 bp, Artificial Sequence
  Antisense compound
ctggatttcgagtgaaaacc

SEQ ID NO: 27728 - DNA, 20 bp, Artificial Sequence
  Antisense compound
cctggatttcgagtgaaaac

SEQ ID NO: 27729 - DNA, 20 bp, Artificial Sequence
  Antisense compound
tcctggatttcgagtgaaaa

SEQ ID NO: 27730 - DNA, 20 bp, Artificial Sequence
  Antisense compound
atcctggatttcgagtgaaa

SEQ ID NO: 27731 - DNA, 20 bp, Artificial Sequence
  Antisense compound
gatcctggatttcgagtgaa

SEQ ID NO: 27732 - DNA, 20 bp, Artificial Sequence
  Antisense compound
agatcctggatttcgagtga

SEQ ID NO: 27733 - DNA, 20 bp, Artificial Sequence
  Antisense compound
tagatcctggatttcgagtg

SEQ ID NO: 27734 - DNA, 20 bp, Artificial Sequence
  Antisense compound
ctagatcctggatttcgagt

SEQ ID NO: 27735 - DNA, 20 bp, Artificial Sequence
  Antisense compound
tctagatcctggatttcgag

SEQ ID NO: 27736 - DNA, 20 bp, Artificial Sequence
  Antisense compound
ttctagatcctggatttcga

SEQ ID NO: 27737 - DNA, 20 bp, Artificial Sequence
  Antisense compound
cttctagatcctggatttcg

SEQ ID NO: 27738 - DNA, 20 bp, Artificial Sequence
  Antisense compound
tcttctagatcctggatttc

SEQ ID NO: 27739 - DNA, 20 bp, Artificial Sequence
  Antisense compound
ttcttctagatcctggattt

SEQ ID NO: 27740 - DNA, 20 bp, Artificial Sequence
  Antisense compound
gttcttctagatcctggatt

SEQ ID NO: 27741 - DNA, 20 bp, Artificial Sequence
  Antisense compound
ggttcttctagatcctggat

SEQ ID NO: 27742 - DNA, 20 bp, Artificial Sequence
  Antisense compound
aggttcttctagatcctgga

SEQ ID NO: 27743 - DNA, 20 bp, Artificial Sequence
  Antisense compound
aaggttcttctagatcctgg

SEQ ID NO: 27744 - DNA, 20 bp, Artificial Sequence
  Antisense compound
caaggttcttctagatcctg

SEQ ID NO: 27745 - DNA, 20 bp, Artificial Sequence
  Antisense compound
acaaggttcttctagatcct

SEQ ID NO: 27746 - DNA, 20 bp, Artificial Sequence
  Antisense compound
tacaaggttcttctagatcc

SEQ ID NO: 27747 - DNA, 20 bp, Artificial Sequence
  Antisense compound
gtacaaggttcttctagatc

SEQ ID NO: 27748 - DNA, 20 bp, Artificial Sequence
  Antisense compound
ggtacaaggttcttctagat

SEQ ID NO: 27749 - DNA, 20 bp, Artificial Sequence
  Antisense compound
tggtacaaggttcttctaga

SEQ ID NO: 27750 - DNA, 20 bp, Artificial Sequence
  Antisense compound
ttggtacaaggttcttctag

SEQ ID NO: 27751 - DNA, 20 bp, Artificial Sequence
  Antisense compound
tttggtacaaggttcttcta

SEQ ID NO: 27752 - DNA, 20 bp, Artificial Sequence
  Antisense compound
ctttggtacaaggttcttct

SEQ ID NO: 27753 - DNA, 20 bp, Artificial Sequence
  Antisense compound
actttggtacaaggttcttc

SEQ ID NO: 27754 - DNA, 20 bp, Artificial Sequence
  Antisense compound
gactttggtacaaggttctt

SEQ ID NO: 27755 - DNA, 20 bp, Artificial Sequence
  Antisense compound
agactttggtacaaggttct

SEQ ID NO: 27756 - DNA, 20 bp, Artificial Sequence
  Antisense compound
tagactttggtacaaggttc

SEQ ID NO: 27757 - DNA, 20 bp, Artificial Sequence
  Antisense compound
ttagactttggtacaaggtt

SEQ ID NO: 27758 - DNA, 20 bp, Artificial Sequence
  Antisense compound
tttagactttggtacaaggt

SEQ ID NO: 27759 - DNA, 20 bp, Artificial Sequence
  Antisense compound
gtttagactttggtacaagg

SEQ ID NO: 27760 - DNA, 20 bp, Artificial Sequence
  Antisense compound
cgtttagactttggtacaag

SEQ ID NO: 27761 - DNA, 20 bp, Artificial Sequence
  Antisense compound
tcgtttagactttggtacaa

SEQ ID NO: 27762 - DNA, 20 bp, Artificial Sequence
  Antisense compound
ttcgtttagactttggtaca

SEQ ID NO: 27763 - DNA, 20 bp, Artificial Sequence
  Antisense compound
gttcgtttagactttggtac

SEQ ID NO: 27764 - DNA, 20 bp, Artificial Sequence
  Antisense compound
tgttcgtttagactttggta

SEQ ID NO: 27765 - DNA, 20 bp, Artificial Sequence
  Antisense compound
atgttcgtttagactttggt

SEQ ID NO: 27766 - DNA, 20 bp, Artificial Sequence
  Antisense compound
catgttcgtttagactttgg

SEQ ID NO: 27767 - DNA, 20 bp, Artificial Sequence
  Antisense compound
tcatgttcgtttagactttg

SEQ ID NO: 27768 - DNA, 20 bp, Artificial Sequence
  Antisense compound
ttcatgttcgtttagacttt

SEQ ID NO: 27769 - DNA, 20 bp, Artificial Sequence
  Antisense compound
tttcatgttcgtttagactt

SEQ ID NO: 27770 - DNA, 20 bp, Artificial Sequence
  Antisense compound
gtttcatgttcgtttagact

SEQ ID NO: 27771 - DNA, 20 bp, Artificial Sequence
  Antisense compound
agtttcatgttcgtttagac

SEQ ID NO: 27772 - DNA, 20 bp, Artificial Sequence
  Antisense compound
aagtttcatgttcgtttaga

SEQ ID NO: 27773 - DNA, 20 bp, Artificial Sequence
  Antisense compound
gaagtttcatgttcgtttag

SEQ ID NO: 27774 - DNA, 20 bp, Artificial Sequence
  Antisense compound
agaagtttcatgttcgttta

SEQ ID NO: 27775 - DNA, 20 bp, Artificial Sequence
  Antisense compound
gagaagtttcatgttcgttt

SEQ ID NO: 27776 - DNA, 20 bp, Artificial Sequence
  Antisense compound
tgagaagtttcatgttcgtt

SEQ ID NO: 27777 - DNA, 20 bp, Artificial Sequence
  Antisense compound
atgagaagtttcatgttcgt

SEQ ID NO: 27778 - DNA, 20 bp, Artificial Sequence
  Antisense compound
aatgagaagtttcatgttcg

SEQ ID NO: 27779 - DNA, 20 bp, Artificial Sequence
  Antisense compound
caatgagaagtttcatgttc

SEQ ID NO: 27780 - DNA, 20 bp, Artificial Sequence
  Antisense compound
acaatgagaagtttcatgtt

SEQ ID NO: 27781 - DNA, 20 bp, Artificial Sequence
  Antisense compound
aacaatgagaagtttcatgt

SEQ ID NO: 27782 - DNA, 20 bp, Artificial Sequence
  Antisense compound
aaacaatgagaagtttcatg

SEQ ID NO: 27783 - DNA, 20 bp, Artificial Sequence
  Antisense compound
aaaacaatgagaagtttcat

SEQ ID NO: 27784 - DNA, 20 bp, Artificial Sequence
  Antisense compound
caaaacaatgagaagtttca

SEQ ID NO: 27785 - DNA, 20 bp, Artificial Sequence
  Antisense compound
tcaaaacaatgagaagtttc

SEQ ID NO: 27786 - DNA, 20 bp, Artificial Sequence
  Antisense compound
gtcaaaacaatgagaagttt

SEQ ID NO: 27787 - DNA, 20 bp, Artificial Sequence
  Antisense compound
agtcaaaacaatgagaagtt

SEQ ID NO: 27788 - DNA, 20 bp, Artificial Sequence
  Antisense compound
aagtcaaaacaatgagaagt

SEQ ID NO: 27789 - DNA, 20 bp, Artificial Sequence
  Antisense compound
caagtcaaaacaatgagaag

SEQ ID NO: 27790 - DNA, 20 bp, Artificial Sequence
  Antisense compound
acaagtcaaaacaatgagaa

SEQ ID NO: 27791 - DNA, 20 bp, Artificial Sequence
  Antisense compound
tacaagtcaaaacaatgaga

SEQ ID NO: 27792 - DNA, 20 bp, Artificial Sequence
  Antisense compound
atacaagtcaaaacaatgag

SEQ ID NO: 27793 - DNA, 20 bp, Artificial Sequence
  Antisense compound
aatacaagtcaaaacaatga

SEQ ID NO: 27794 - DNA, 20 bp, Artificial Sequence
  Antisense compound
aaatacaagtcaaaacaatg

SEQ ID NO: 27795 - DNA, 20 bp, Artificial Sequence
  Antisense compound
gaaatacaagtcaaaacaat

SEQ ID NO: 27796 - DNA, 20 bp, Artificial Sequence
  Antisense compound
agaaatacaagtcaaaacaa

SEQ ID NO: 27797 - DNA, 20 bp, Artificial Sequence
  Antisense compound
gagaaatacaagtcaaaaca

SEQ ID NO: 27798 - DNA, 20 bp, Artificial Sequence
  Antisense compound
agagaaatacaagtcaaaac

SEQ ID NO: 27799 - DNA, 20 bp, Artificial Sequence
  Antisense compound
tagagaaatacaagtcaaaa

SEQ ID NO: 27800 - DNA, 20 bp, Artificial Sequence
  Antisense compound
atagagaaatacaagtcaaa

SEQ ID NO: 27801 - DNA, 20 bp, Artificial Sequence
  Antisense compound
catagagaaatacaagtcaa

SEQ ID NO: 27802 - DNA, 20 bp, Artificial Sequence
  Antisense compound
gcatagagaaatacaagtca

SEQ ID NO: 27803 - DNA, 20 bp, Artificial Sequence
  Antisense compound
tgcatagagaaatacaagtc

SEQ ID NO: 27804 - DNA, 20 bp, Artificial Sequence
  Antisense compound
ctgcatagagaaatacaagt

SEQ ID NO: 27805 - DNA, 20 bp, Artificial Sequence
  Antisense compound
actgcatagagaaatacaag

SEQ ID NO: 27806 - DNA, 20 bp, Artificial Sequence
  Antisense compound
aactgcatagagaaatacaa

SEQ ID NO: 27807 - DNA, 20 bp, Artificial Sequence
  Antisense compound
caactgcatagagaaataca

SEQ ID NO: 27808 - DNA, 20 bp, Artificial Sequence
  Antisense compound
gcaactgcatagagaaatac

SEQ ID NO: 27809 - DNA, 20 bp, Artificial Sequence
  Antisense compound
tgcaactgcatagagaaata

SEQ ID NO: 27810 - DNA, 20 bp, Artificial Sequence
  Antisense compound
atgcaactgcatagagaaat

SEQ ID NO: 27811 - DNA, 20 bp, Artificial Sequence
  Antisense compound
tatgcaactgcatagagaaa

SEQ ID NO: 27812 - DNA, 20 bp, Artificial Sequence
  Antisense compound
atatgcaactgcatagagaa

SEQ ID NO: 27813 - DNA, 20 bp, Artificial Sequence
  Antisense compound
catatgcaactgcatagaga

SEQ ID NO: 27814 - DNA, 20 bp, Artificial Sequence
  Antisense compound
gcatatgcaactgcatagag

SEQ ID NO: 27815 - DNA, 20 bp, Artificial Sequence
  Antisense compound
tgcatatgcaactgcataga

SEQ ID NO: 27816 - DNA, 20 bp, Artificial Sequence
  Antisense compound
gtgcatatgcaactgcatag

SEQ ID NO: 27817 - DNA, 20 bp, Artificial Sequence
  Antisense compound
agtgcatatgcaactgcata

SEQ ID NO: 27818 - DNA, 20 bp, Artificial Sequence
  Antisense compound
cagtgcatatgcaactgcat

SEQ ID NO: 27819 - DNA, 20 bp, Artificial Sequence
  Antisense compound
acagtgcatatgcaactgca

SEQ ID NO: 27820 - DNA, 20 bp, Artificial Sequence
  Antisense compound
tacagtgcatatgcaactgc

SEQ ID NO: 27821 - DNA, 20 bp, Artificial Sequence
  Antisense compound
ctacagtgcatatgcaactg

SEQ ID NO: 27822 - DNA, 20 bp, Artificial Sequence
  Antisense compound
actacagtgcatatgcaact

SEQ ID NO: 27823 - DNA, 20 bp, Artificial Sequence
  Antisense compound
tactacagtgcatatgcaac

SEQ ID NO: 27824 - DNA, 20 bp, Artificial Sequence
  Antisense compound
gtactacagtgcatatgcaa

SEQ ID NO: 27825 - DNA, 20 bp, Artificial Sequence
  Antisense compound
tgtactacagtgcatatgca

SEQ ID NO: 27826 - DNA, 20 bp, Artificial Sequence
  Antisense compound
ctgtactacagtgcatatgc

SEQ ID NO: 27827 - DNA, 20 bp, Artificial Sequence
  Antisense compound
gctgtactacagtgcatatg

SEQ ID NO: 27828 - DNA, 20 bp, Artificial Sequence
  Antisense compound
cgctgtactacagtgcatat

SEQ ID NO: 27829 - DNA, 20 bp, Artificial Sequence
  Antisense compound
gcgctgtactacagtgcata

SEQ ID NO: 27830 - DNA, 20 bp, Artificial Sequence
  Antisense compound
agcgctgtactacagtgcat

SEQ ID NO: 27831 - DNA, 20 bp, Artificial Sequence
  Antisense compound
cagcgctgtactacagtgca

SEQ ID NO: 27832 - DNA, 20 bp, Artificial Sequence
  Antisense compound
acagcgctgtactacagtgc

SEQ ID NO: 27833 - DNA, 20 bp, Artificial Sequence
  Antisense compound
cacagcgctgtactacagtg

SEQ ID NO: 27834 - DNA, 20 bp, Artificial Sequence
  Antisense compound
gcacagcgctgtactacagt

SEQ ID NO: 27835 - DNA, 20 bp, Artificial Sequence
  Antisense compound
tgcacagcgctgtactacag

SEQ ID NO: 27836 - DNA, 20 bp, Artificial Sequence
  Antisense compound
atgcacagcgctgtactaca

SEQ ID NO: 27837 - DNA, 20 bp, Artificial Sequence
  Antisense compound
gatgcacagcgctgtactac

SEQ ID NO: 27838 - DNA, 20 bp, Artificial Sequence
  Antisense compound
agatgcacagcgctgtacta

SEQ ID NO: 27839 - DNA, 20 bp, Artificial Sequence
  Antisense compound
tagatgcacagcgctgtact

SEQ ID NO: 27840 - DNA, 20 bp, Artificial Sequence
  Antisense compound
ttagatgcacagcgctgtac

SEQ ID NO: 27841 - DNA, 20 bp, Artificial Sequence
  Antisense compound
attagatgcacagcgctgta

SEQ ID NO: 27842 - DNA, 20 bp, Artificial Sequence
  Antisense compound
tattagatgcacagcgctgt

SEQ ID NO: 27843 - DNA, 20 bp, Artificial Sequence
  Antisense compound
ttattagatgcacagcgctg

SEQ ID NO: 27844 - DNA, 20 bp, Artificial Sequence
  Antisense compound
tttattagatgcacagcgct

SEQ ID NO: 27845 - DNA, 20 bp, Artificial Sequence
  Antisense compound
gtttattagatgcacagcgc

SEQ ID NO: 27846 - DNA, 20 bp, Artificial Sequence
  Antisense compound
ggtttattagatgcacagcg

SEQ ID NO: 27847 - DNA, 20 bp, Artificial Sequence
  Antisense compound
aggtttattagatgcacagc

SEQ ID NO: 27848 - DNA, 20 bp, Artificial Sequence
  Antisense compound
gaggtttattagatgcacag

SEQ ID NO: 27849 - DNA, 20 bp, Artificial Sequence
  Antisense compound
tgaggtttattagatgcaca

SEQ ID NO: 27850 - DNA, 20 bp, Artificial Sequence
  Antisense compound
atgaggtttattagatgcac

SEQ ID NO: 27851 - DNA, 20 bp, Artificial Sequence
  Antisense compound
catgaggtttattagatgca

SEQ ID NO: 27852 - DNA, 20 bp, Artificial Sequence
  Antisense compound
acatgaggtttattagatgc

SEQ ID NO: 27853 - DNA, 20 bp, Artificial Sequence
  Antisense compound
cacatgaggtttattagatg

SEQ ID NO: 27854 - DNA, 20 bp, Artificial Sequence
  Antisense compound
gcacatgaggtttattagat

SEQ ID NO: 27855 - DNA, 20 bp, Artificial Sequence
  Antisense compound
agcacatgaggtttattaga

SEQ ID NO: 27856 - DNA, 20 bp, Artificial Sequence
  Antisense compound
aagcacatgaggtttattag

SEQ ID NO: 27857 - DNA, 20 bp, Artificial Sequence
  Antisense compound
caagcacatgaggtttatta

SEQ ID NO: 27858 - DNA, 20 bp, Artificial Sequence
  Antisense compound
tcaagcacatgaggtttatt

SEQ ID NO: 27859 - DNA, 20 bp, Artificial Sequence
  Antisense compound
ttcaagcacatgaggtttat

SEQ ID NO: 27860 - DNA, 20 bp, Artificial Sequence
  Antisense compound
cttcaagcacatgaggttta

SEQ ID NO: 27861 - DNA, 20 bp, Artificial Sequence
  Antisense compound
tcttcaagcacatgaggttt

SEQ ID NO: 27862 - DNA, 20 bp, Artificial Sequence
  Antisense compound
atcttcaagcacatgaggtt

SEQ ID NO: 27863 - DNA, 20 bp, Artificial Sequence
  Antisense compound
gatcttcaagcacatgaggt

SEQ ID NO: 27864 - DNA, 20 bp, Artificial Sequence
  Antisense compound
ggatcttcaagcacatgagg

SEQ ID NO: 27865 - DNA, 20 bp, Artificial Sequence
  Antisense compound
aggatcttcaagcacatgag

SEQ ID NO: 27866 - DNA, 20 bp, Artificial Sequence
  Antisense compound
aaggatcttcaagcacatga

SEQ ID NO: 27867 - DNA, 20 bp, Artificial Sequence
  Antisense compound
caaggatcttcaagcacatg

SEQ ID NO: 27868 - DNA, 20 bp, Artificial Sequence
  Antisense compound
acaaggatcttcaagcacat

SEQ ID NO: 27869 - DNA, 20 bp, Artificial Sequence
  Antisense compound
tacaaggatcttcaagcaca

SEQ ID NO: 27870 - DNA, 20 bp, Artificial Sequence
  Antisense compound
ttacaaggatcttcaagcac

SEQ ID NO: 27871 - DNA, 20 bp, Artificial Sequence
  Antisense compound
cttacaaggatcttcaagca

SEQ ID NO: 27872 - DNA, 20 bp, Artificial Sequence
  Antisense compound
ccttacaaggatcttcaagc

SEQ ID NO: 27873 - DNA, 20 bp, Artificial Sequence
  Antisense compound
accttacaaggatcttcaag

SEQ ID NO: 27874 - DNA, 20 bp, Artificial Sequence
  Antisense compound
taccttacaaggatcttcaa

SEQ ID NO: 27875 - DNA, 20 bp, Artificial Sequence
  Antisense compound
gtaccttacaaggatcttca

SEQ ID NO: 27876 - DNA, 20 bp, Artificial Sequence
  Antisense compound
tgtaccttacaaggatcttc

SEQ ID NO: 27877 - DNA, 20 bp, Artificial Sequence
  Antisense compound
ttgtaccttacaaggatctt

SEQ ID NO: 27878 - DNA, 20 bp, Artificial Sequence
  Antisense compound
gttgtaccttacaaggatct

SEQ ID NO: 27879 - DNA, 20 bp, Artificial Sequence
  Antisense compound
tgttgtaccttacaaggatc

SEQ ID NO: 27880 - DNA, 20 bp, Artificial Sequence
  Antisense compound
gtgttgtaccttacaaggat

SEQ ID NO: 27881 - DNA, 20 bp, Artificial Sequence
  Antisense compound
agtgttgtaccttacaagga

SEQ ID NO: 27882 - DNA, 20 bp, Artificial Sequence
  Antisense compound
tagtgttgtaccttacaagg

SEQ ID NO: 27883 - DNA, 20 bp, Artificial Sequence
  Antisense compound
ctagtgttgtaccttacaag

SEQ ID NO: 27884 - DNA, 20 bp, Artificial Sequence
  Antisense compound
cctagtgttgtaccttacaa

SEQ ID NO: 27885 - DNA, 20 bp, Artificial Sequence
  Antisense compound
ccctagtgttgtaccttaca

SEQ ID NO: 27886 - DNA, 20 bp, Artificial Sequence
  Antisense compound
cccctagtgttgtaccttac

SEQ ID NO: 27887 - DNA, 20 bp, Artificial Sequence
  Antisense compound
acccctagtgttgtacctta

SEQ ID NO: 27888 - DNA, 20 bp, Artificial Sequence
  Antisense compound
tacccctagtgttgtacctt

SEQ ID NO: 27889 - DNA, 20 bp, Artificial Sequence
  Antisense compound
ttacccctagtgttgtacct

SEQ ID NO: 27890 - DNA, 20 bp, Artificial Sequence
  Antisense compound
attacccctagtgttgtacc

SEQ ID NO: 27891 - DNA, 20 bp, Artificial Sequence
  Antisense compound
tattacccctagtgttgtac

SEQ ID NO: 27892 - DNA, 20 bp, Artificial Sequence
  Antisense compound
gtattacccctagtgttgta

SEQ ID NO: 27893 - DNA, 20 bp, Artificial Sequence
  Antisense compound
agtattacccctagtgttgt

SEQ ID NO: 27894 - DNA, 20 bp, Artificial Sequence
  Antisense compound
aagtattacccctagtgttg

SEQ ID NO: 27895 - DNA, 20 bp, Artificial Sequence
  Antisense compound
taagtattacccctagtgtt

SEQ ID NO: 27896 - DNA, 20 bp, Artificial Sequence
  Antisense compound
ataagtattacccctagtgt

SEQ ID NO: 27897 - DNA, 20 bp, Artificial Sequence
  Antisense compound
tataagtattacccctagtg

SEQ ID NO: 27898 - DNA, 20 bp, Artificial Sequence
  Antisense compound
ctataagtattacccctagt

SEQ ID NO: 27899 - DNA, 20 bp, Artificial Sequence
  Antisense compound
gctataagtattacccctag

SEQ ID NO: 27900 - DNA, 20 bp, Artificial Sequence
  Antisense compound
tgctataagtattaccccta

SEQ ID NO: 27901 - DNA, 20 bp, Artificial Sequence
  Antisense compound
gtgctataagtattacccct

SEQ ID NO: 27902 - DNA, 20 bp, Artificial Sequence
  Antisense compound
agtgctataagtattacccc

SEQ ID NO: 27903 - DNA, 20 bp, Artificial Sequence
  Antisense compound
cagtgctataagtattaccc

SEQ ID NO: 27904 - DNA, 20 bp, Artificial Sequence
  Antisense compound
gcagtgctataagtattacc

SEQ ID NO: 27905 - DNA, 20 bp, Artificial Sequence
  Antisense compound
agcagtgctataagtattac

SEQ ID NO: 27906 - DNA, 20 bp, Artificial Sequence
  Antisense compound
aagcagtgctataagtatta

SEQ ID NO: 27907 - DNA, 20 bp, Artificial Sequence
  Antisense compound
caagcagtgctataagtatt

SEQ ID NO: 27908 - DNA, 20 bp, Artificial Sequence
  Antisense compound
ccaagcagtgctataagtat

SEQ ID NO: 27909 - DNA, 20 bp, Artificial Sequence
  Antisense compound
gccaagcagtgctataagta

SEQ ID NO: 27910 - DNA, 20 bp, Artificial Sequence
  Antisense compound
agccaagcagtgctataagt

SEQ ID NO: 27911 - DNA, 20 bp, Artificial Sequence
  Antisense compound
aagccaagcagtgctataag

SEQ ID NO: 27912 - DNA, 20 bp, Artificial Sequence
  Antisense compound
aaagccaagcagtgctataa

SEQ ID NO: 27913 - DNA, 20 bp, Artificial Sequence
  Antisense compound
caaagccaagcagtgctata

SEQ ID NO: 27914 - DNA, 20 bp, Artificial Sequence
  Antisense compound
acaaagccaagcagtgctat

SEQ ID NO: 27915 - DNA, 20 bp, Artificial Sequence
  Antisense compound
cacaaagccaagcagtgcta

SEQ ID NO: 27916 - DNA, 20 bp, Artificial Sequence
  Antisense compound
gcacaaagccaagcagtgct

SEQ ID NO: 27917 - DNA, 20 bp, Artificial Sequence
  Antisense compound
agcacaaagccaagcagtgc

SEQ ID NO: 27918 - DNA, 20 bp, Artificial Sequence
  Antisense compound
gagcacaaagccaagcagtg

SEQ ID NO: 27919 - DNA, 20 bp, Artificial Sequence
  Antisense compound
agagcacaaagccaagcagt

SEQ ID NO: 27920 - DNA, 20 bp, Artificial Sequence
  Antisense compound
tagagcacaaagccaagcag

SEQ ID NO: 27921 - DNA, 20 bp, Artificial Sequence
  Antisense compound
ctagagcacaaagccaagca

SEQ ID NO: 27922 - DNA, 20 bp, Artificial Sequence
  Antisense compound
cctagagcacaaagccaagc

SEQ ID NO: 27923 - DNA, 20 bp, Artificial Sequence
  Antisense compound
tcctagagcacaaagccaag

SEQ ID NO: 27924 - DNA, 20 bp, Artificial Sequence
  Antisense compound
ttcctagagcacaaagccaa

SEQ ID NO: 27925 - DNA, 20 bp, Artificial Sequence
  Antisense compound
tttcctagagcacaaagcca

SEQ ID NO: 27926 - DNA, 20 bp, Artificial Sequence
  Antisense compound
ctttcctagagcacaaagcc

SEQ ID NO: 27927 - DNA, 20 bp, Artificial Sequence
  Antisense compound
cctttcctagagcacaaagc

SEQ ID NO: 27928 - DNA, 20 bp, Artificial Sequence
  Antisense compound
acctttcctagagcacaaag

SEQ ID NO: 27929 - DNA, 20 bp, Artificial Sequence
  Antisense compound
aacctttcctagagcacaaa

SEQ ID NO: 27930 - DNA, 20 bp, Artificial Sequence
  Antisense compound
aaacctttcctagagcacaa

SEQ ID NO: 27931 - DNA, 20 bp, Artificial Sequence
  Antisense compound
aaaacctttcctagagcaca

SEQ ID NO: 27932 - DNA, 20 bp, Artificial Sequence
  Antisense compound
taaaacctttcctagagcac

SEQ ID NO: 27933 - DNA, 20 bp, Artificial Sequence
  Antisense compound
gtaaaacctttcctagagca

SEQ ID NO: 27934 - DNA, 20 bp, Artificial Sequence
  Antisense compound
ggtaaaacctttcctagagc

SEQ ID NO: 27935 - DNA, 20 bp, Artificial Sequence
  Antisense compound
aggtaaaacctttcctagag

SEQ ID NO: 27936 - DNA, 20 bp, Artificial Sequence
  Antisense compound
aaggtaaaacctttcctaga

SEQ ID NO: 27937 - DNA, 20 bp, Artificial Sequence
  Antisense compound
aaaggtaaaacctttcctag

SEQ ID NO: 27938 - DNA, 20 bp, Artificial Sequence
  Antisense compound
aaaaggtaaaacctttccta

SEQ ID NO: 27939 - DNA, 20 bp, Artificial Sequence
  Antisense compound
gaaaaggtaaaacctttcct

SEQ ID NO: 27940 - DNA, 20 bp, Artificial Sequence
  Antisense compound
tgaaaaggtaaaacctttcc

SEQ ID NO: 27941 - DNA, 20 bp, Artificial Sequence
  Antisense compound
atgaaaaggtaaaacctttc

SEQ ID NO: 27942 - DNA, 20 bp, Artificial Sequence
  Antisense compound
tatgaaaaggtaaaaccttt

SEQ ID NO: 27943 - DNA, 20 bp, Artificial Sequence
  Antisense compound
ctatgaaaaggtaaaacctt

SEQ ID NO: 27944 - DNA, 20 bp, Artificial Sequence
  Antisense compound
tctatgaaaaggtaaaacct

SEQ ID NO: 27945 - DNA, 20 bp, Artificial Sequence
  Antisense compound
atctatgaaaaggtaaaacc

SEQ ID NO: 27946 - DNA, 20 bp, Artificial Sequence
  Antisense compound
catctatgaaaaggtaaaac

SEQ ID NO: 27947 - DNA, 20 bp, Artificial Sequence
  Antisense compound
ccatctatgaaaaggtaaaa

SEQ ID NO: 27948 - DNA, 20 bp, Artificial Sequence
  Antisense compound
gccatctatgaaaaggtaaa

SEQ ID NO: 27949 - DNA, 20 bp, Artificial Sequence
  Antisense compound
tgccatctatgaaaaggtaa

SEQ ID NO: 27950 - DNA, 20 bp, Artificial Sequence
  Antisense compound
gtgccatctatgaaaaggta

SEQ ID NO: 27951 - DNA, 20 bp, Artificial Sequence
  Antisense compound
tgtgccatctatgaaaaggt

SEQ ID NO: 27952 - DNA, 20 bp, Artificial Sequence
  Antisense compound
gtgtgccatctatgaaaagg

SEQ ID NO: 27953 - DNA, 20 bp, Artificial Sequence
  Antisense compound
agtgtgccatctatgaaaag

SEQ ID NO: 27954 - DNA, 20 bp, Artificial Sequence
  Antisense compound
tagtgtgccatctatgaaaa

SEQ ID NO: 27955 - DNA, 20 bp, Artificial Sequence
  Antisense compound
atagtgtgccatctatgaaa

SEQ ID NO: 27956 - DNA, 20 bp, Artificial Sequence
  Antisense compound
catagtgtgccatctatgaa

SEQ ID NO: 27957 - DNA, 20 bp, Artificial Sequence
  Antisense compound
ccatagtgtgccatctatga

SEQ ID NO: 27958 - DNA, 20 bp, Artificial Sequence
  Antisense compound
accatagtgtgccatctatg

SEQ ID NO: 27959 - DNA, 20 bp, Artificial Sequence
  Antisense compound
aaccatagtgtgccatctat

SEQ ID NO: 27960 - DNA, 20 bp, Artificial Sequence
  Antisense compound
gaaccatagtgtgccatcta

SEQ ID NO: 27961 - DNA, 20 bp, Artificial Sequence
  Antisense compound
tgaaccatagtgtgccatct

SEQ ID NO: 27962 - DNA, 20 bp, Artificial Sequence
  Antisense compound
ttgaaccatagtgtgccatc

SEQ ID NO: 27963 - DNA, 20 bp, Artificial Sequence
  Antisense compound
tttgaaccatagtgtgccat

SEQ ID NO: 27964 - DNA, 20 bp, Artificial Sequence
  Antisense compound
gtttgaaccatagtgtgcca

SEQ ID NO: 27965 - DNA, 20 bp, Artificial Sequence
  Antisense compound
tgtttgaaccatagtgtgcc

SEQ ID NO: 27966 - DNA, 20 bp, Artificial Sequence
  Antisense compound
atgtttgaaccatagtgtgc

SEQ ID NO: 27967 - DNA, 20 bp, Artificial Sequence
  Antisense compound
catgtttgaaccatagtgtg

SEQ ID NO: 27968 - DNA, 20 bp, Artificial Sequence
  Antisense compound
gcatgtttgaaccatagtgt

SEQ ID NO: 27969 - DNA, 20 bp, Artificial Sequence
  Antisense compound
tgcatgtttgaaccatagtg

SEQ ID NO: 27970 - DNA, 20 bp, Artificial Sequence
  Antisense compound
gtgcatgtttgaaccatagt

SEQ ID NO: 27971 - DNA, 20 bp, Artificial Sequence
  Antisense compound
tgtgcatgtttgaaccatag

SEQ ID NO: 27972 - DNA, 20 bp, Artificial Sequence
  Antisense compound
gtgtgcatgtttgaaccata

SEQ ID NO: 27973 - DNA, 20 bp, Artificial Sequence
  Antisense compound
ggtgtgcatgtttgaaccat

SEQ ID NO: 27974 - DNA, 20 bp, Artificial Sequence
  Antisense compound
aggtgtgcatgtttgaacca

SEQ ID NO: 27975 - DNA, 20 bp, Artificial Sequence
  Antisense compound
taggtgtgcatgtttgaacc

SEQ ID NO: 27976 - DNA, 20 bp, Artificial Sequence
  Antisense compound
ttaggtgtgcatgtttgaac

SEQ ID NO: 27977 - DNA, 20 bp, Artificial Sequence
  Antisense compound
attaggtgtgcatgtttgaa

SEQ ID NO: 27978 - DNA, 20 bp, Artificial Sequence
  Antisense compound
cattaggtgtgcatgtttga

SEQ ID NO: 27979 - DNA, 20 bp, Artificial Sequence
  Antisense compound
acattaggtgtgcatgtttg

SEQ ID NO: 27980 - DNA, 20 bp, Artificial Sequence
  Antisense compound
aacattaggtgtgcatgttt

SEQ ID NO: 27981 - DNA, 20 bp, Artificial Sequence
  Antisense compound
taacattaggtgtgcatgtt

SEQ ID NO: 27982 - DNA, 20 bp, Artificial Sequence
  Antisense compound
gtaacattaggtgtgcatgt

SEQ ID NO: 27983 - DNA, 20 bp, Artificial Sequence
  Antisense compound
agtaacattaggtgtgcatg

SEQ ID NO: 27984 - DNA, 20 bp, Artificial Sequence
  Antisense compound
tagtaacattaggtgtgcat

SEQ ID NO: 27985 - DNA, 20 bp, Artificial Sequence
  Antisense compound
atagtaacattaggtgtgca

SEQ ID NO: 27986 - DNA, 20 bp, Artificial Sequence
  Antisense compound
gatagtaacattaggtgtgc

SEQ ID NO: 27987 - DNA, 20 bp, Artificial Sequence
  Antisense compound
tgatagtaacattaggtgtg

SEQ ID NO: 27988 - DNA, 20 bp, Artificial Sequence
  Antisense compound
ttgatagtaacattaggtgt

SEQ ID NO: 27989 - DNA, 20 bp, Artificial Sequence
  Antisense compound
gttgatagtaacattaggtg

SEQ ID NO: 27990 - DNA, 20 bp, Artificial Sequence
  Antisense compound
agttgatagtaacattaggt

SEQ ID NO: 27991 - DNA, 20 bp, Artificial Sequence
  Antisense compound
cagttgatagtaacattagg

SEQ ID NO: 27992 - DNA, 20 bp, Artificial Sequence
  Antisense compound
acagttgatagtaacattag

SEQ ID NO: 27993 - DNA, 20 bp, Artificial Sequence
  Antisense compound
gacagttgatagtaacatta

SEQ ID NO: 27994 - DNA, 20 bp, Artificial Sequence
  Antisense compound
tgacagttgatagtaacatt

SEQ ID NO: 27995 - DNA, 20 bp, Artificial Sequence
  Antisense compound
ttgacagttgatagtaacat

SEQ ID NO: 27996 - DNA, 20 bp, Artificial Sequence
  Antisense compound
cttgacagttgatagtaaca

SEQ ID NO: 27997 - DNA, 20 bp, Artificial Sequence
  Antisense compound
tcttgacagttgatagtaac

SEQ ID NO: 27998 - DNA, 20 bp, Artificial Sequence
  Antisense compound
atcttgacagttgatagtaa

SEQ ID NO: 27999 - DNA, 20 bp, Artificial Sequence
  Antisense compound
gatcttgacagttgatagta

SEQ ID NO: 28000 - DNA, 20 bp, Artificial Sequence
  Antisense compound
ggatcttgacagttgatagt

SEQ ID NO: 28001 - DNA, 20 bp, Artificial Sequence
  Antisense compound
tggatcttgacagttgatag

SEQ ID NO: 28002 - DNA, 20 bp, Artificial Sequence
  Antisense compound
ctggatcttgacagttgata

SEQ ID NO: 28003 - DNA, 20 bp, Artificial Sequence
  Antisense compound
gctggatcttgacagttgat

SEQ ID NO: 28004 - DNA, 20 bp, Artificial Sequence
  Antisense compound
agctggatcttgacagttga

SEQ ID NO: 28005 - DNA, 20 bp, Artificial Sequence
  Antisense compound
cagctggatcttgacagttg

SEQ ID NO: 28006 - DNA, 20 bp, Artificial Sequence
  Antisense compound
ccagctggatcttgacagtt

SEQ ID NO: 28007 - DNA, 20 bp, Artificial Sequence
  Antisense compound
accagctggatcttgacagt

SEQ ID NO: 28008 - DNA, 20 bp, Artificial Sequence
  Antisense compound
caccagctggatcttgacag

SEQ ID NO: 28009 - DNA, 20 bp, Artificial Sequence
  Antisense compound
ccaccagctggatcttgaca

SEQ ID NO: 28010 - DNA, 20 bp, Artificial Sequence
  Antisense compound
accaccagctggatcttgac

SEQ ID NO: 28011 - DNA, 20 bp, Artificial Sequence
  Antisense compound
caccaccagctggatcttga

SEQ ID NO: 28012 - DNA, 20 bp, Artificial Sequence
  Antisense compound
gcaccaccagctggatcttg

SEQ ID NO: 28013 - DNA, 20 bp, Artificial Sequence
  Antisense compound
cgcaccaccagctggatctt

SEQ ID NO: 28014 - DNA, 20 bp, Artificial Sequence
  Antisense compound
gcgcaccaccagctggatct

SEQ ID NO: 28015 - DNA, 20 bp, Artificial Sequence
  Antisense compound
agcgcaccaccagctggatc

SEQ ID NO: 28016 - DNA, 20 bp, Artificial Sequence
  Antisense compound
aagcgcaccaccagctggat

SEQ ID NO: 28017 - DNA, 20 bp, Artificial Sequence
  Antisense compound
taagcgcaccaccagctgga

SEQ ID NO: 28018 - DNA, 20 bp, Artificial Sequence
  Antisense compound
ataagcgcaccaccagctgg

SEQ ID NO: 28019 - DNA, 20 bp, Artificial Sequence
  Antisense compound
tataagcgcaccaccagctg

SEQ ID NO: 28020 - DNA, 20 bp, Artificial Sequence
  Antisense compound
ctataagcgcaccaccagct

SEQ ID NO: 28021 - DNA, 20 bp, Artificial Sequence
  Antisense compound
gctataagcgcaccaccagc

SEQ ID NO: 28022 - DNA, 20 bp, Artificial Sequence
  Antisense compound
agctataagcgcaccaccag

SEQ ID NO: 28023 - DNA, 20 bp, Artificial Sequence
  Antisense compound
tagctataagcgcaccacca

SEQ ID NO: 28024 - DNA, 20 bp, Artificial Sequence
  Antisense compound
ctagctataagcgcaccacc

SEQ ID NO: 28025 - DNA, 20 bp, Artificial Sequence
  Antisense compound
cctagctataagcgcaccac

SEQ ID NO: 28026 - DNA, 20 bp, Artificial Sequence
  Antisense compound
acctagctataagcgcacca

SEQ ID NO: 28027 - DNA, 20 bp, Artificial Sequence
  Antisense compound
cacctagctataagcgcacc

SEQ ID NO: 28028 - DNA, 20 bp, Artificial Sequence
  Antisense compound
acacctagctataagcgcac

SEQ ID NO: 28029 - DNA, 20 bp, Artificial Sequence
  Antisense compound
aacacctagctataagcgca

SEQ ID NO: 28030 - DNA, 20 bp, Artificial Sequence
  Antisense compound
caacacctagctataagcgc

SEQ ID NO: 28031 - DNA, 20 bp, Artificial Sequence
  Antisense compound
ccaacacctagctataagcg

SEQ ID NO: 28032 - DNA, 20 bp, Artificial Sequence
  Antisense compound
accaacacctagctataagc

SEQ ID NO: 28033 - DNA, 20 bp, Artificial Sequence
  Antisense compound
taccaacacctagctataag

SEQ ID NO: 28034 - DNA, 20 bp, Artificial Sequence
  Antisense compound
gtaccaacacctagctataa

SEQ ID NO: 28035 - DNA, 20 bp, Artificial Sequence
  Antisense compound
ggtaccaacacctagctata

SEQ ID NO: 28036 - DNA, 20 bp, Artificial Sequence
  Antisense compound
aggtaccaacacctagctat

SEQ ID NO: 28037 - DNA, 20 bp, Artificial Sequence
  Antisense compound
aaggtaccaacacctagcta

SEQ ID NO: 28038 - DNA, 20 bp, Artificial Sequence
  Antisense compound
gaaggtaccaacacctagct

SEQ ID NO: 28039 - DNA, 20 bp, Artificial Sequence
  Antisense compound
tgaaggtaccaacacctagc

SEQ ID NO: 28040 - DNA, 20 bp, Artificial Sequence
  Antisense compound
atgaaggtaccaacacctag

SEQ ID NO: 28041 - DNA, 20 bp, Artificial Sequence
  Antisense compound
catgaaggtaccaacaccta

SEQ ID NO: 28042 - DNA, 20 bp, Artificial Sequence
  Antisense compound
tcatgaaggtaccaacacct

SEQ ID NO: 28043 - DNA, 20 bp, Artificial Sequence
  Antisense compound
ttcatgaaggtaccaacacc

SEQ ID NO: 28044 - DNA, 20 bp, Artificial Sequence
  Antisense compound
cttcatgaaggtaccaacac

SEQ ID NO: 28045 - DNA, 20 bp, Artificial Sequence
  Antisense compound
ccttcatgaaggtaccaaca

SEQ ID NO: 28046 - DNA, 20 bp, Artificial Sequence
  Antisense compound
accttcatgaaggtaccaac

SEQ ID NO: 28047 - DNA, 20 bp, Artificial Sequence
  Antisense compound
gaccttcatgaaggtaccaa

SEQ ID NO: 28048 - DNA, 20 bp, Artificial Sequence
  Antisense compound
tgaccttcatgaaggtacca

SEQ ID NO: 28049 - DNA, 20 bp, Artificial Sequence
  Antisense compound
gtgaccttcatgaaggtacc

SEQ ID NO: 28050 - DNA, 20 bp, Artificial Sequence
  Antisense compound
ggtgaccttcatgaaggtac

SEQ ID NO: 28051 - DNA, 20 bp, Artificial Sequence
  Antisense compound
tggtgaccttcatgaaggta

SEQ ID NO: 28052 - DNA, 20 bp, Artificial Sequence
  Antisense compound
ttggtgaccttcatgaaggt

SEQ ID NO: 28053 - DNA, 20 bp, Artificial Sequence
  Antisense compound
tttggtgaccttcatgaagg

SEQ ID NO: 28054 - DNA, 20 bp, Artificial Sequence
  Antisense compound
gtttggtgaccttcatgaag

SEQ ID NO: 28055 - DNA, 20 bp, Artificial Sequence
  Antisense compound
agtttggtgaccttcatgaa

SEQ ID NO: 28056 - DNA, 20 bp, Artificial Sequence
  Antisense compound
cagtttggtgaccttcatga

SEQ ID NO: 28057 - DNA, 20 bp, Artificial Sequence
  Antisense compound
gcagtttggtgaccttcatg

SEQ ID NO: 28058 - DNA, 20 bp, Artificial Sequence
  Antisense compound
agcagtttggtgaccttcat

SEQ ID NO: 28059 - DNA, 20 bp, Artificial Sequence
  Antisense compound
cagcagtttggtgaccttca

SEQ ID NO: 28060 - DNA, 20 bp, Artificial Sequence
  Antisense compound
gcagcagtttggtgaccttc

SEQ ID NO: 28061 - DNA, 20 bp, Artificial Sequence
  Antisense compound
tgcagcagtttggtgacctt

SEQ ID NO: 28062 - DNA, 20 bp, Artificial Sequence
  Antisense compound
atgcagcagtttggtgacct

SEQ ID NO: 28063 - DNA, 20 bp, Artificial Sequence
  Antisense compound
aatgcagcagtttggtgacc

SEQ ID NO: 28064 - DNA, 20 bp, Artificial Sequence
  Antisense compound
aaatgcagcagtttggtgac

SEQ ID NO: 28065 - DNA, 20 bp, Artificial Sequence
  Antisense compound
taaatgcagcagtttggtga

SEQ ID NO: 28066 - DNA, 20 bp, Artificial Sequence
  Antisense compound
ctaaatgcagcagtttggtg

SEQ ID NO: 28067 - DNA, 20 bp, Artificial Sequence
  Antisense compound
tctaaatgcagcagtttggt

SEQ ID NO: 28068 - DNA, 20 bp, Artificial Sequence
  Antisense compound
ctctaaatgcagcagtttgg

SEQ ID NO: 28069 - DNA, 20 bp, Artificial Sequence
  Antisense compound
tctctaaatgcagcagtttg

SEQ ID NO: 28070 - DNA, 20 bp, Artificial Sequence
  Antisense compound
gtctctaaatgcagcagttt

SEQ ID NO: 28071 - DNA, 20 bp, Artificial Sequence
  Antisense compound
cgtctctaaatgcagcagtt

SEQ ID NO: 28072 - DNA, 20 bp, Artificial Sequence
  Antisense compound
acgtctctaaatgcagcagt

SEQ ID NO: 28073 - DNA, 20 bp, Artificial Sequence
  Antisense compound
tacgtctctaaatgcagcag

SEQ ID NO: 28074 - DNA, 20 bp, Artificial Sequence
  Antisense compound
gtacgtctctaaatgcagca

SEQ ID NO: 28075 - DNA, 20 bp, Artificial Sequence
  Antisense compound
agtacgtctctaaatgcagc

SEQ ID NO: 28076 - DNA, 20 bp, Artificial Sequence
  Antisense compound
aagtacgtctctaaatgcag

SEQ ID NO: 28077 - DNA, 20 bp, Artificial Sequence
  Antisense compound
caagtacgtctctaaatgca

SEQ ID NO: 28078 - DNA, 20 bp, Artificial Sequence
  Antisense compound
acaagtacgtctctaaatgc

SEQ ID NO: 28079 - DNA, 20 bp, Artificial Sequence
  Antisense compound
aacaagtacgtctctaaatg

SEQ ID NO: 28080 - DNA, 20 bp, Artificial Sequence
  Antisense compound
caacaagtacgtctctaaat

SEQ ID NO: 28081 - DNA, 20 bp, Artificial Sequence
  Antisense compound
acaacaagtacgtctctaaa

SEQ ID NO: 28082 - DNA, 20 bp, Artificial Sequence
  Antisense compound
aacaacaagtacgtctctaa

SEQ ID NO: 28083 - DNA, 20 bp, Artificial Sequence
  Antisense compound
aaacaacaagtacgtctcta

SEQ ID NO: 28084 - DNA, 20 bp, Artificial Sequence
  Antisense compound
aaaacaacaagtacgtctct

SEQ ID NO: 28085 - DNA, 20 bp, Artificial Sequence
  Antisense compound
taaaacaacaagtacgtctc

SEQ ID NO: 28086 - DNA, 20 bp, Artificial Sequence
  Antisense compound
ttaaaacaacaagtacgtct

SEQ ID NO: 28087 - DNA, 20 bp, Artificial Sequence
  Antisense compound
tttaaaacaacaagtacgtc

SEQ ID NO: 28088 - DNA, 20 bp, Artificial Sequence
  Antisense compound
atttaaaacaacaagtacgt

SEQ ID NO: 28089 - DNA, 20 bp, Artificial Sequence
  Antisense compound
tatttaaaacaacaagtacg

SEQ ID NO: 28090 - DNA, 20 bp, Artificial Sequence
  Antisense compound
ttatttaaaacaacaagtac

SEQ ID NO: 28091 - DNA, 20 bp, Artificial Sequence
  Antisense compound
tttatttaaaacaacaagta

SEQ ID NO: 28092 - DNA, 20 bp, Artificial Sequence
  Antisense compound
gtttatttaaaacaacaagt

SEQ ID NO: 28093 - DNA, 20 bp, Artificial Sequence
  Antisense compound
cgtttatttaaaacaacaag

SEQ ID NO: 28094 - DNA, 20 bp, Artificial Sequence
  Antisense compound
tcgtttatttaaaacaacaa

SEQ ID NO: 28095 - DNA, 20 bp, Artificial Sequence
  Antisense compound
ttcgtttatttaaaacaaca

SEQ ID NO: 28096 - DNA, 20 bp, Artificial Sequence
  Antisense compound
gttcgtttatttaaaacaac

SEQ ID NO: 28097 - DNA, 20 bp, Artificial Sequence
  Antisense compound
tgttcgtttatttaaaacaa

SEQ ID NO: 28098 - DNA, 20 bp, Artificial Sequence
  Antisense compound
ttgttcgtttatttaaaaca

SEQ ID NO: 28099 - DNA, 20 bp, Artificial Sequence
  Antisense compound
tttgttcgtttatttaaaac

SEQ ID NO: 28100 - DNA, 20 bp, Artificial Sequence
  Antisense compound
atttgttcgtttatttaaaa

SEQ ID NO: 28101 - DNA, 20 bp, Artificial Sequence
  Antisense compound
aatttgttcgtttatttaaa

SEQ ID NO: 28102 - DNA, 20 bp, Artificial Sequence
  Antisense compound
taatttgttcgtttatttaa

SEQ ID NO: 28103 - DNA, 20 bp, Artificial Sequence
  Antisense compound
ttaatttgttcgtttattta

SEQ ID NO: 28104 - DNA, 20 bp, Artificial Sequence
  Antisense compound
tttaatttgttcgtttattt

SEQ ID NO: 28105 - DNA, 20 bp, Artificial Sequence
  Antisense compound
ttttaatttgttcgtttatt

SEQ ID NO: 28106 - DNA, 20 bp, Artificial Sequence
  Antisense compound
attttaatttgttcgtttat

SEQ ID NO: 28107 - DNA, 20 bp, Artificial Sequence
  Antisense compound
cattttaatttgttcgttta

SEQ ID NO: 28108 - DNA, 20 bp, Artificial Sequence
  Antisense compound
acattttaatttgttcgttt

SEQ ID NO: 28109 - DNA, 20 bp, Artificial Sequence
  Antisense compound
gacattttaatttgttcgtt

SEQ ID NO: 28110 - DNA, 20 bp, Artificial Sequence
  Antisense compound
agacattttaatttgttcgt

SEQ ID NO: 28111 - DNA, 20 bp, Artificial Sequence
  Antisense compound
cagacattttaatttgttcg

SEQ ID NO: 28112 - DNA, 20 bp, Artificial Sequence
  Antisense compound
tcagacattttaatttgttc

SEQ ID NO: 28113 - DNA, 20 bp, Artificial Sequence
  Antisense compound
atcagacattttaatttgtt

SEQ ID NO: 28114 - DNA, 20 bp, Artificial Sequence
  Antisense compound
tatcagacattttaatttgt

SEQ ID NO: 28115 - DNA, 20 bp, Artificial Sequence
  Antisense compound
ttatcagacattttaatttg

SEQ ID NO: 28116 - DNA, 20 bp, Artificial Sequence
  Antisense compound
attatcagacattttaattt

SEQ ID NO: 28117 - DNA, 20 bp, Artificial Sequence
  Antisense compound
cattatcagacattttaatt

SEQ ID NO: 28118 - DNA, 20 bp, Artificial Sequence
  Antisense compound
ccattatcagacattttaat

SEQ ID NO: 28119 - DNA, 20 bp, Artificial Sequence
  Antisense compound
tccattatcagacattttaa

SEQ ID NO: 28120 - DNA, 20 bp, Artificial Sequence
  Antisense compound
gtccattatcagacatttta

SEQ ID NO: 28121 - DNA, 20 bp, Artificial Sequence
  Antisense compound
ggtccattatcagacatttt

SEQ ID NO: 28122 - DNA, 20 bp, Artificial Sequence
  Antisense compound
gggtccattatcagacattt

SEQ ID NO: 28123 - DNA, 20 bp, Artificial Sequence
  Antisense compound
ggggtccattatcagacatt

SEQ ID NO: 28124 - DNA, 20 bp, Artificial Sequence
  Antisense compound
tggggtccattatcagacat

SEQ ID NO: 28125 - DNA, 20 bp, Artificial Sequence
  Antisense compound
ttggggtccattatcagaca

SEQ ID NO: 28126 - DNA, 20 bp, Artificial Sequence
  Antisense compound
attggggtccattatcagac

SEQ ID NO: 28127 - DNA, 20 bp, Artificial Sequence
  Antisense compound
gattggggtccattatcaga

SEQ ID NO: 28128 - DNA, 20 bp, Artificial Sequence
  Antisense compound
tgattggggtccattatcag

SEQ ID NO: 28129 - DNA, 20 bp, Artificial Sequence
  Antisense compound
ttgattggggtccattatca

SEQ ID NO: 28130 - DNA, 20 bp, Artificial Sequence
  Antisense compound
tttgattggggtccattatc

SEQ ID NO: 28131 - DNA, 20 bp, Artificial Sequence
  Antisense compound
gtttgattggggtccattat

SEQ ID NO: 28132 - DNA, 20 bp, Artificial Sequence
  Antisense compound
ggtttgattggggtccatta

SEQ ID NO: 28133 - DNA, 20 bp, Artificial Sequence
  Antisense compound
tggtttgattggggtccatt

SEQ ID NO: 28134 - DNA, 20 bp, Artificial Sequence
  Antisense compound
ttggtttgattggggtccat

SEQ ID NO: 28135 - DNA, 20 bp, Artificial Sequence
  Antisense compound
gttggtttgattggggtcca

SEQ ID NO: 28136 - DNA, 20 bp, Artificial Sequence
  Antisense compound
cgttggtttgattggggtcc

SEQ ID NO: 28137 - DNA, 20 bp, Artificial Sequence
  Antisense compound
acgttggtttgattggggtc

SEQ ID NO: 28138 - DNA, 20 bp, Artificial Sequence
  Antisense compound
tacgttggtttgattggggt

SEQ ID NO: 28139 - DNA, 20 bp, Artificial Sequence
  Antisense compound
ctacgttggtttgattgggg

SEQ ID NO: 28140 - DNA, 20 bp, Artificial Sequence
  Antisense compound
actacgttggtttgattggg

SEQ ID NO: 28141 - DNA, 20 bp, Artificial Sequence
  Antisense compound
cactacgttggtttgattgg

SEQ ID NO: 28142 - DNA, 20 bp, Artificial Sequence
  Antisense compound
gcactacgttggtttgattg

SEQ ID NO: 28143 - DNA, 20 bp, Artificial Sequence
  Antisense compound
ggcactacgttggtttgatt

SEQ ID NO: 28144 - DNA, 20 bp, Artificial Sequence
  Antisense compound
gggcactacgttggtttgat

SEQ ID NO: 28145 - DNA, 20 bp, Artificial Sequence
  Antisense compound
ggggcactacgttggtttga

SEQ ID NO: 28146 - DNA, 20 bp, Artificial Sequence
  Antisense compound
gggggcactacgttggtttg

SEQ ID NO: 28147 - DNA, 20 bp, Artificial Sequence
  Antisense compound
ggggggcactacgttggttt

SEQ ID NO: 28148 - DNA, 20 bp, Artificial Sequence
  Antisense compound
cggggggcactacgttggtt

SEQ ID NO: 28149 - DNA, 20 bp, Artificial Sequence
  Antisense compound
gcggggggcactacgttggt

SEQ ID NO: 28150 - DNA, 20 bp, Artificial Sequence
  Antisense compound
tgcggggggcactacgttgg

SEQ ID NO: 28151 - DNA, 20 bp, Artificial Sequence
  Antisense compound
atgcggggggcactacgttg

SEQ ID NO: 28152 - DNA, 20 bp, Artificial Sequence
  Antisense compound
aatgcggggggcactacgtt

SEQ ID NO: 28153 - DNA, 20 bp, Artificial Sequence
  Antisense compound
taatgcggggggcactacgt

SEQ ID NO: 28154 - DNA, 20 bp, Artificial Sequence
  Antisense compound
gtaatgcggggggcactacg

SEQ ID NO: 28155 - DNA, 20 bp, Artificial Sequence
  Antisense compound
tgtaatgcggggggcactac

SEQ ID NO: 28156 - DNA, 20 bp, Artificial Sequence
  Antisense compound
atgtaatgcggggggcacta

SEQ ID NO: 28157 - DNA, 20 bp, Artificial Sequence
  Antisense compound
aatgtaatgcggggggcact

SEQ ID NO: 28158 - DNA, 20 bp, Artificial Sequence
  Antisense compound
aaatgtaatgcggggggcac

SEQ ID NO: 28159 - DNA, 20 bp, Artificial Sequence
  Antisense compound
caaatgtaatgcggggggca

SEQ ID NO: 28160 - DNA, 20 bp, Artificial Sequence
  Antisense compound
ccaaatgtaatgcggggggc

SEQ ID NO: 28161 - DNA, 20 bp, Artificial Sequence
  Antisense compound
accaaatgtaatgcgggggg

SEQ ID NO: 28162 - DNA, 20 bp, Artificial Sequence
  Antisense compound
caccaaatgtaatgcggggg

SEQ ID NO: 28163 - DNA, 20 bp, Artificial Sequence
  Antisense compound
ccaccaaatgtaatgcgggg

SEQ ID NO: 28164 - DNA, 20 bp, Artificial Sequence
  Antisense compound
tccaccaaatgtaatgcggg

SEQ ID NO: 28165 - DNA, 20 bp, Artificial Sequence
  Antisense compound
gtccaccaaatgtaatgcgg

SEQ ID NO: 28166 - DNA, 20 bp, Artificial Sequence
  Antisense compound
ggtccaccaaatgtaatgcg

SEQ ID NO: 28167 - DNA, 20 bp, Artificial Sequence
  Antisense compound
gggtccaccaaatgtaatgc

SEQ ID NO: 28168 - DNA, 20 bp, Artificial Sequence
  Antisense compound
tgggtccaccaaatgtaatg

SEQ ID NO: 28169 - DNA, 20 bp, Artificial Sequence
  Antisense compound
gtgggtccaccaaatgtaat

SEQ ID NO: 28170 - DNA, 20 bp, Artificial Sequence
  Antisense compound
tgtgggtccaccaaatgtaa

SEQ ID NO: 28171 - DNA, 20 bp, Artificial Sequence
  Antisense compound
ctgtgggtccaccaaatgta

SEQ ID NO: 28172 - DNA, 20 bp, Artificial Sequence
  Antisense compound
tctgtgggtccaccaaatgt

SEQ ID NO: 28173 - DNA, 20 bp, Artificial Sequence
  Antisense compound
atctgtgggtccaccaaatg

SEQ ID NO: 28174 - DNA, 20 bp, Artificial Sequence
  Antisense compound
aatctgtgggtccaccaaat

SEQ ID NO: 28175 - DNA, 20 bp, Artificial Sequence
  Antisense compound
gaatctgtgggtccaccaaa

SEQ ID NO: 28176 - DNA, 20 bp, Artificial Sequence
  Antisense compound
tgaatctgtgggtccaccaa

SEQ ID NO: 28177 - DNA, 20 bp, Artificial Sequence
  Antisense compound
ttgaatctgtgggtccacca

SEQ ID NO: 28178 - DNA, 20 bp, Artificial Sequence
  Antisense compound
gttgaatctgtgggtccacc

SEQ ID NO: 28179 - DNA, 20 bp, Artificial Sequence
  Antisense compound
agttgaatctgtgggtccac

SEQ ID NO: 28180 - DNA, 20 bp, Artificial Sequence
  Antisense compound
cagttgaatctgtgggtcca

SEQ ID NO: 28181 - DNA, 20 bp, Artificial Sequence
  Antisense compound
tcagttgaatctgtgggtcc

SEQ ID NO: 28182 - DNA, 20 bp, Artificial Sequence
  Antisense compound
gtcagttgaatctgtgggtc

SEQ ID NO: 28183 - DNA, 20 bp, Artificial Sequence
  Antisense compound
tgtcagttgaatctgtgggt

SEQ ID NO: 28184 - DNA, 20 bp, Artificial Sequence
  Antisense compound
ttgtcagttgaatctgtggg

SEQ ID NO: 28185 - DNA, 20 bp, Artificial Sequence
  Antisense compound
attgtcagttgaatctgtgg

SEQ ID NO: 28186 - DNA, 20 bp, Artificial Sequence
  Antisense compound
tattgtcagttgaatctgtg

SEQ ID NO: 28187 - DNA, 20 bp, Artificial Sequence
  Antisense compound
ttattgtcagttgaatctgt

SEQ ID NO: 28188 - DNA, 20 bp, Artificial Sequence
  Antisense compound
gttattgtcagttgaatctg

SEQ ID NO: 28189 - DNA, 20 bp, Artificial Sequence
  Antisense compound
ggttattgtcagttgaatct

SEQ ID NO: 28190 - DNA, 20 bp, Artificial Sequence
  Antisense compound
tggttattgtcagttgaatc

SEQ ID NO: 28191 - DNA, 20 bp, Artificial Sequence
  Antisense compound
ctggttattgtcagttgaat

SEQ ID NO: 28192 - DNA, 20 bp, Artificial Sequence
  Antisense compound
tctggttattgtcagttgaa

SEQ ID NO: 28193 - DNA, 20 bp, Artificial Sequence
  Antisense compound
ttctggttattgtcagttga

SEQ ID NO: 28194 - DNA, 20 bp, Artificial Sequence
  Antisense compound
attctggttattgtcagttg

SEQ ID NO: 28195 - DNA, 20 bp, Artificial Sequence
  Antisense compound
cattctggttattgtcagtt

SEQ ID NO: 28196 - DNA, 20 bp, Artificial Sequence
  Antisense compound
ccattctggttattgtcagt

SEQ ID NO: 28197 - DNA, 20 bp, Artificial Sequence
  Antisense compound
tccattctggttattgtcag

SEQ ID NO: 28198 - DNA, 20 bp, Artificial Sequence
  Antisense compound
ctccattctggttattgtca

SEQ ID NO: 28199 - DNA, 20 bp, Artificial Sequence
  Antisense compound
cctccattctggttattgtc

SEQ ID NO: 28200 - DNA, 20 bp, Artificial Sequence
  Antisense compound
tcctccattctggttattgt

SEQ ID NO: 28201 - DNA, 20 bp, Artificial Sequence
  Antisense compound
gtcctccattctggttattg

SEQ ID NO: 28202 - DNA, 20 bp, Artificial Sequence
  Antisense compound
cgtcctccattctggttatt

SEQ ID NO: 28203 - DNA, 20 bp, Artificial Sequence
  Antisense compound
gcgtcctccattctggttat

SEQ ID NO: 28204 - DNA, 20 bp, Artificial Sequence
  Antisense compound
tgcgtcctccattctggtta

SEQ ID NO: 28205 - DNA, 20 bp, Artificial Sequence
  Antisense compound
ttgcgtcctccattctggtt

SEQ ID NO: 28206 - DNA, 20 bp, Artificial Sequence
  Antisense compound
attgcgtcctccattctggt

SEQ ID NO: 28207 - DNA, 20 bp, Artificial Sequence
  Antisense compound
cattgcgtcctccattctgg

SEQ ID NO: 28208 - DNA, 20 bp, Artificial Sequence
  Antisense compound
ccattgcgtcctccattctg

SEQ ID NO: 28209 - DNA, 20 bp, Artificial Sequence
  Antisense compound
cccattgcgtcctccattct

SEQ ID NO: 28210 - DNA, 20 bp, Artificial Sequence
  Antisense compound
ccccattgcgtcctccattc

SEQ ID NO: 28211 - DNA, 20 bp, Artificial Sequence
  Antisense compound
gccccattgcgtcctccatt

SEQ ID NO: 28212 - DNA, 20 bp, Artificial Sequence
  Antisense compound
tgccccattgcgtcctccat

SEQ ID NO: 28213 - DNA, 20 bp, Artificial Sequence
  Antisense compound
ttgccccattgcgtcctcca

SEQ ID NO: 28214 - DNA, 20 bp, Artificial Sequence
  Antisense compound
cttgccccattgcgtcctcc

SEQ ID NO: 28215 - DNA, 20 bp, Artificial Sequence
  Antisense compound
ccttgccccattgcgtcctc

SEQ ID NO: 28216 - DNA, 20 bp, Artificial Sequence
  Antisense compound
gccttgccccattgcgtcct

SEQ ID NO: 28217 - DNA, 20 bp, Artificial Sequence
  Antisense compound
ggccttgccccattgcgtcc

SEQ ID NO: 28218 - DNA, 20 bp, Artificial Sequence
  Antisense compound
tggccttgccccattgcgtc

SEQ ID NO: 28219 - DNA, 20 bp, Artificial Sequence
  Antisense compound
ttggccttgccccattgcgt

SEQ ID NO: 28220 - DNA, 20 bp, Artificial Sequence
  Antisense compound
tttggccttgccccattgcg

SEQ ID NO: 28221 - DNA, 20 bp, Artificial Sequence
  Antisense compound
ttttggccttgccccattgc

SEQ ID NO: 28222 - DNA, 20 bp, Artificial Sequence
  Antisense compound
gttttggccttgccccattg

SEQ ID NO: 28223 - DNA, 20 bp, Artificial Sequence
  Antisense compound
tgttttggccttgccccatt

SEQ ID NO: 28224 - DNA, 20 bp, Artificial Sequence
  Antisense compound
ctgttttggccttgccccat

SEQ ID NO: 28225 - DNA, 20 bp, Artificial Sequence
  Antisense compound
gctgttttggccttgcccca

SEQ ID NO: 28226 - DNA, 20 bp, Artificial Sequence
  Antisense compound
cgctgttttggccttgcccc

SEQ ID NO: 28227 - DNA, 20 bp, Artificial Sequence
  Antisense compound
gcgctgttttggccttgccc

SEQ ID NO: 28228 - DNA, 20 bp, Artificial Sequence
  Antisense compound
ggcgctgttttggccttgcc

SEQ ID NO: 28229 - DNA, 20 bp, Artificial Sequence
  Antisense compound
cggcgctgttttggccttgc

SEQ ID NO: 28230 - DNA, 20 bp, Artificial Sequence
  Antisense compound
tcggcgctgttttggccttg

SEQ ID NO: 28231 - DNA, 20 bp, Artificial Sequence
  Antisense compound
gtcggcgctgttttggcctt

SEQ ID NO: 28232 - DNA, 20 bp, Artificial Sequence
  Antisense compound
ggtcggcgctgttttggcct

SEQ ID NO: 28233 - DNA, 20 bp, Artificial Sequence
  Antisense compound
gggtcggcgctgttttggcc

SEQ ID NO: 28234 - DNA, 20 bp, Artificial Sequence
  Antisense compound
ggggtcggcgctgttttggc

SEQ ID NO: 28235 - DNA, 20 bp, Artificial Sequence
  Antisense compound
tggggtcggcgctgttttgg

SEQ ID NO: 28236 - DNA, 20 bp, Artificial Sequence
  Antisense compound
ttggggtcggcgctgttttg

SEQ ID NO: 28237 - DNA, 20 bp, Artificial Sequence
  Antisense compound
cttggggtcggcgctgtttt

SEQ ID NO: 28238 - DNA, 20 bp, Artificial Sequence
  Antisense compound
ccttggggtcggcgctgttt

SEQ ID NO: 28239 - DNA, 20 bp, Artificial Sequence
  Antisense compound
accttggggtcggcgctgtt

SEQ ID NO: 28240 - DNA, 20 bp, Artificial Sequence
  Antisense compound
aaccttggggtcggcgctgt

SEQ ID NO: 28241 - DNA, 20 bp, Artificial Sequence
  Antisense compound
aaaccttggggtcggcgctg

SEQ ID NO: 28242 - DNA, 20 bp, Artificial Sequence
  Antisense compound
taaaccttggggtcggcgct

SEQ ID NO: 28243 - DNA, 20 bp, Artificial Sequence
  Antisense compound
gtaaaccttggggtcggcgc

SEQ ID NO: 28244 - DNA, 20 bp, Artificial Sequence
  Antisense compound
ggtaaaccttggggtcggcg

SEQ ID NO: 28245 - DNA, 20 bp, Artificial Sequence
  Antisense compound
gggtaaaccttggggtcggc

SEQ ID NO: 28246 - DNA, 20 bp, Artificial Sequence
  Antisense compound
tgggtaaaccttggggtcgg

SEQ ID NO: 28247 - DNA, 20 bp, Artificial Sequence
  Antisense compound
ttgggtaaaccttggggtcg

SEQ ID NO: 28248 - DNA, 20 bp, Artificial Sequence
  Antisense compound
attgggtaaaccttggggtc

SEQ ID NO: 28249 - DNA, 20 bp, Artificial Sequence
  Antisense compound
tattgggtaaaccttggggt

SEQ ID NO: 28250 - DNA, 20 bp, Artificial Sequence
  Antisense compound
ttattgggtaaaccttgggg

SEQ ID NO: 28251 - DNA, 20 bp, Artificial Sequence
  Antisense compound
attattgggtaaaccttggg

SEQ ID NO: 28252 - DNA, 20 bp, Artificial Sequence
  Antisense compound
tattattgggtaaaccttgg

SEQ ID NO: 28253 - DNA, 20 bp, Artificial Sequence
  Antisense compound
gtattattgggtaaaccttg

SEQ ID NO: 28254 - DNA, 20 bp, Artificial Sequence
  Antisense compound
agtattattgggtaaacctt

SEQ ID NO: 28255 - DNA, 20 bp, Artificial Sequence
  Antisense compound
cagtattattgggtaaacct

SEQ ID NO: 28256 - DNA, 20 bp, Artificial Sequence
  Antisense compound
gcagtattattgggtaaacc

SEQ ID NO: 28257 - DNA, 20 bp, Artificial Sequence
  Antisense compound
cgcagtattattgggtaaac

SEQ ID NO: 28258 - DNA, 20 bp, Artificial Sequence
  Antisense compound
acgcagtattattgggtaaa

SEQ ID NO: 28259 - DNA, 20 bp, Artificial Sequence
  Antisense compound
gacgcagtattattgggtaa

SEQ ID NO: 28260 - DNA, 20 bp, Artificial Sequence
  Antisense compound
agacgcagtattattgggta

SEQ ID NO: 28261 - DNA, 20 bp, Artificial Sequence
  Antisense compound
aagacgcagtattattgggt

SEQ ID NO: 28262 - DNA, 20 bp, Artificial Sequence
  Antisense compound
caagacgcagtattattggg

SEQ ID NO: 28263 - DNA, 20 bp, Artificial Sequence
  Antisense compound
ccaagacgcagtattattgg

SEQ ID NO: 28264 - DNA, 20 bp, Artificial Sequence
  Antisense compound
accaagacgcagtattattg

SEQ ID NO: 28265 - DNA, 20 bp, Artificial Sequence
  Antisense compound
aaccaagacgcagtattatt

SEQ ID NO: 28266 - DNA, 20 bp, Artificial Sequence
  Antisense compound
gaaccaagacgcagtattat

SEQ ID NO: 28267 - DNA, 20 bp, Artificial Sequence
  Antisense compound
tgaaccaagacgcagtatta

SEQ ID NO: 28268 - DNA, 20 bp, Artificial Sequence
  Antisense compound
gtgaaccaagacgcagtatt

SEQ ID NO: 28269 - DNA, 20 bp, Artificial Sequence
  Antisense compound
tgtgaaccaagacgcagtat

SEQ ID NO: 28270 - DNA, 20 bp, Artificial Sequence
  Antisense compound
ctgtgaaccaagacgcagta

SEQ ID NO: 28271 - DNA, 20 bp, Artificial Sequence
  Antisense compound
gctgtgaaccaagacgcagt

SEQ ID NO: 28272 - DNA, 20 bp, Artificial Sequence
  Antisense compound
agctgtgaaccaagacgcag

SEQ ID NO: 28273 - DNA, 20 bp, Artificial Sequence
  Antisense compound
gagctgtgaaccaagacgca

SEQ ID NO: 28274 - DNA, 20 bp, Artificial Sequence
  Antisense compound
agagctgtgaaccaagacgc

SEQ ID NO: 28275 - DNA, 20 bp, Artificial Sequence
  Antisense compound
gagagctgtgaaccaagacg

SEQ ID NO: 28276 - DNA, 20 bp, Artificial Sequence
  Antisense compound
tgagagctgtgaaccaagac

SEQ ID NO: 28277 - DNA, 20 bp, Artificial Sequence
  Antisense compound
gtgagagctgtgaaccaaga

SEQ ID NO: 28278 - DNA, 20 bp, Artificial Sequence
  Antisense compound
agtgagagctgtgaaccaag

SEQ ID NO: 28279 - DNA, 20 bp, Artificial Sequence
  Antisense compound
gagtgagagctgtgaaccaa

SEQ ID NO: 28280 - DNA, 20 bp, Artificial Sequence
  Antisense compound
tgagtgagagctgtgaacca

SEQ ID NO: 28281 - DNA, 20 bp, Artificial Sequence
  Antisense compound
ctgagtgagagctgtgaacc

SEQ ID NO: 28282 - DNA, 20 bp, Artificial Sequence
  Antisense compound
gctgagtgagagctgtgaac

SEQ ID NO: 28283 - DNA, 20 bp, Artificial Sequence
  Antisense compound
tgctgagtgagagctgtgaa

SEQ ID NO: 28284 - DNA, 20 bp, Artificial Sequence
  Antisense compound
atgctgagtgagagctgtga

SEQ ID NO: 28285 - DNA, 20 bp, Artificial Sequence
  Antisense compound
catgctgagtgagagctgtg

SEQ ID NO: 28286 - DNA, 20 bp, Artificial Sequence
  Antisense compound
ccatgctgagtgagagctgt

SEQ ID NO: 28287 - DNA, 20 bp, Artificial Sequence
  Antisense compound
gccatgctgagtgagagctg

SEQ ID NO: 28288 - DNA, 20 bp, Artificial Sequence
  Antisense compound
tgccatgctgagtgagagct

SEQ ID NO: 28289 - DNA, 20 bp, Artificial Sequence
  Antisense compound
ttgccatgctgagtgagagc

SEQ ID NO: 28290 - DNA, 20 bp, Artificial Sequence
  Antisense compound
cttgccatgctgagtgagag

SEQ ID NO: 28291 - DNA, 20 bp, Artificial Sequence
  Antisense compound
ccttgccatgctgagtgaga

SEQ ID NO: 28292 - DNA, 20 bp, Artificial Sequence
  Antisense compound
tccttgccatgctgagtgag

SEQ ID NO: 28293 - DNA, 20 bp, Artificial Sequence
  Antisense compound
ctccttgccatgctgagtga

SEQ ID NO: 28294 - DNA, 20 bp, Artificial Sequence
  Antisense compound
cctccttgccatgctgagtg

SEQ ID NO: 28295 - DNA, 20 bp, Artificial Sequence
  Antisense compound
tcctccttgccatgctgagt

SEQ ID NO: 28296 - DNA, 20 bp, Artificial Sequence
  Antisense compound
ttcctccttgccatgctgag

SEQ ID NO: 28297 - DNA, 20 bp, Artificial Sequence
  Antisense compound
gttcctccttgccatgctga

SEQ ID NO: 28298 - DNA, 20 bp, Artificial Sequence
  Antisense compound
agttcctccttgccatgctg

SEQ ID NO: 28299 - DNA, 20 bp, Artificial Sequence
  Antisense compound
aagttcctccttgccatgct

SEQ ID NO: 28300 - DNA, 20 bp, Artificial Sequence
  Antisense compound
taagttcctccttgccatgc

SEQ ID NO: 28301 - DNA, 20 bp, Artificial Sequence
  Antisense compound
ctaagttcctccttgccatg

SEQ ID NO: 28302 - DNA, 20 bp, Artificial Sequence
  Antisense compound
tctaagttcctccttgccat

SEQ ID NO: 28303 - DNA, 20 bp, Artificial Sequence
  Antisense compound
atctaagttcctccttgcca

SEQ ID NO: 28304 - DNA, 20 bp, Artificial Sequence
  Antisense compound
aatctaagttcctccttgcc

SEQ ID NO: 28305 - DNA, 20 bp, Artificial Sequence
  Antisense compound
gaatctaagttcctccttgc

SEQ ID NO: 28306 - DNA, 20 bp, Artificial Sequence
  Antisense compound
ggaatctaagttcctccttg

SEQ ID NO: 28307 - DNA, 20 bp, Artificial Sequence
  Antisense compound
gggaatctaagttcctcctt

SEQ ID NO: 28308 - DNA, 20 bp, Artificial Sequence
  Antisense compound
agggaatctaagttcctcct

SEQ ID NO: 28309 - DNA, 20 bp, Artificial Sequence
  Antisense compound
gagggaatctaagttcctcc

SEQ ID NO: 28310 - DNA, 20 bp, Artificial Sequence
  Antisense compound
cgagggaatctaagttcctc

SEQ ID NO: 28311 - DNA, 20 bp, Artificial Sequence
  Antisense compound
tcgagggaatctaagttcct

SEQ ID NO: 28312 - DNA, 20 bp, Artificial Sequence
  Antisense compound
ctcgagggaatctaagttcc

SEQ ID NO: 28313 - DNA, 20 bp, Artificial Sequence
  Antisense compound
cctcgagggaatctaagttc

SEQ ID NO: 28314 - DNA, 20 bp, Artificial Sequence
  Antisense compound
gcctcgagggaatctaagtt

SEQ ID NO: 28315 - DNA, 20 bp, Artificial Sequence
  Antisense compound
ggcctcgagggaatctaagt

SEQ ID NO: 28316 - DNA, 20 bp, Artificial Sequence
  Antisense compound
tggcctcgagggaatctaag

SEQ ID NO: 28317 - DNA, 20 bp, Artificial Sequence
  Antisense compound
ctggcctcgagggaatctaa

SEQ ID NO: 28318 - DNA, 20 bp, Artificial Sequence
  Antisense compound
cctggcctcgagggaatcta

SEQ ID NO: 28319 - DNA, 20 bp, Artificial Sequence
  Antisense compound
ccctggcctcgagggaatct

SEQ ID NO: 28320 - DNA, 20 bp, Artificial Sequence
  Antisense compound
gccctggcctcgagggaatc

SEQ ID NO: 28321 - DNA, 20 bp, Artificial Sequence
  Antisense compound
cgccctggcctcgagggaat

SEQ ID NO: 28322 - DNA, 20 bp, Artificial Sequence
  Antisense compound
acgccctggcctcgagggaa

SEQ ID NO: 28323 - DNA, 20 bp, Artificial Sequence
  Antisense compound
aacgccctggcctcgaggga

SEQ ID NO: 28324 - DNA, 20 bp, Artificial Sequence
  Antisense compound
gaacgccctggcctcgaggg

SEQ ID NO: 28325 - DNA, 20 bp, Artificial Sequence
  Antisense compound
ggaacgccctggcctcgagg

SEQ ID NO: 28326 - DNA, 20 bp, Artificial Sequence
  Antisense compound
tggaacgccctggcctcgag

SEQ ID NO: 28327 - DNA, 20 bp, Artificial Sequence
  Antisense compound
ttggaacgccctggcctcga

SEQ ID NO: 28328 - DNA, 20 bp, Artificial Sequence
  Antisense compound
attggaacgccctggcctcg

SEQ ID NO: 28329 - DNA, 20 bp, Artificial Sequence
  Antisense compound
gattggaacgccctggcctc

SEQ ID NO: 28330 - DNA, 20 bp, Artificial Sequence
  Antisense compound
tgattggaacgccctggcct

SEQ ID NO: 28331 - DNA, 20 bp, Artificial Sequence
  Antisense compound
ttgattggaacgccctggcc

SEQ ID NO: 28332 - DNA, 20 bp, Artificial Sequence
  Antisense compound
gttgattggaacgccctggc

SEQ ID NO: 28333 - DNA, 20 bp, Artificial Sequence
  Antisense compound
tgttgattggaacgccctgg

SEQ ID NO: 28334 - DNA, 20 bp, Artificial Sequence
  Antisense compound
gtgttgattggaacgccctg

SEQ ID NO: 28335 - DNA, 20 bp, Artificial Sequence
  Antisense compound
ggtgttgattggaacgccct

SEQ ID NO: 28336 - DNA, 20 bp, Artificial Sequence
  Antisense compound
tggtgttgattggaacgccc

SEQ ID NO: 28337 - DNA, 20 bp, Artificial Sequence
  Antisense compound
ttggtgttgattggaacgcc

SEQ ID NO: 28338 - DNA, 20 bp, Artificial Sequence
  Antisense compound
attggtgttgattggaacgc

SEQ ID NO: 28339 - DNA, 20 bp, Artificial Sequence
  Antisense compound
tattggtgttgattggaacg

SEQ ID NO: 28340 - DNA, 20 bp, Artificial Sequence
  Antisense compound
ctattggtgttgattggaac

SEQ ID NO: 28341 - DNA, 20 bp, Artificial Sequence
  Antisense compound
actattggtgttgattggaa

SEQ ID NO: 28342 - DNA, 20 bp, Artificial Sequence
  Antisense compound
cactattggtgttgattgga

SEQ ID NO: 28343 - DNA, 20 bp, Artificial Sequence
  Antisense compound
ccactattggtgttgattgg

SEQ ID NO: 28344 - DNA, 20 bp, Artificial Sequence
  Antisense compound
accactattggtgttgattg

SEQ ID NO: 28345 - DNA, 20 bp, Artificial Sequence
  Antisense compound
gaccactattggtgttgatt

SEQ ID NO: 28346 - DNA, 20 bp, Artificial Sequence
  Antisense compound
ggaccactattggtgttgat

SEQ ID NO: 28347 - DNA, 20 bp, Artificial Sequence
  Antisense compound
tggaccactattggtgttga

SEQ ID NO: 28348 - DNA, 20 bp, Artificial Sequence
  Antisense compound
ctggaccactattggtgttg

SEQ ID NO: 28349 - DNA, 20 bp, Artificial Sequence
  Antisense compound
tctggaccactattggtgtt

SEQ ID NO: 28350 - DNA, 20 bp, Artificial Sequence
  Antisense compound
atctggaccactattggtgt

SEQ ID NO: 28351 - DNA, 20 bp, Artificial Sequence
  Antisense compound
catctggaccactattggtg

SEQ ID NO: 28352 - DNA, 20 bp, Artificial Sequence
  Antisense compound
tcatctggaccactattggt

SEQ ID NO: 28353 - DNA, 20 bp, Artificial Sequence
  Antisense compound
gtcatctggaccactattgg

SEQ ID NO: 28354 - DNA, 20 bp, Artificial Sequence
  Antisense compound
ggtcatctggaccactattg

SEQ ID NO: 28355 - DNA, 20 bp, Artificial Sequence
  Antisense compound
tggtcatctggaccactatt

SEQ ID NO: 28356 - DNA, 20 bp, Artificial Sequence
  Antisense compound
ttggtcatctggaccactat

SEQ ID NO: 28357 - DNA, 20 bp, Artificial Sequence
  Antisense compound
tttggtcatctggaccacta

SEQ ID NO: 28358 - DNA, 20 bp, Artificial Sequence
  Antisense compound
atttggtcatctggaccact

SEQ ID NO: 28359 - DNA, 20 bp, Artificial Sequence
  Antisense compound
aatttggtcatctggaccac

SEQ ID NO: 28360 - DNA, 20 bp, Artificial Sequence
  Antisense compound
caatttggtcatctggacca

SEQ ID NO: 28361 - DNA, 20 bp, Artificial Sequence
  Antisense compound
ccaatttggtcatctggacc

SEQ ID NO: 28362 - DNA, 20 bp, Artificial Sequence
  Antisense compound
gccaatttggtcatctggac

SEQ ID NO: 28363 - DNA, 20 bp, Artificial Sequence
  Antisense compound
agccaatttggtcatctgga

SEQ ID NO: 28364 - DNA, 20 bp, Artificial Sequence
  Antisense compound
tagccaatttggtcatctgg

SEQ ID NO: 28365 - DNA, 20 bp, Artificial Sequence
  Antisense compound
gtagccaatttggtcatctg

SEQ ID NO: 28366 - DNA, 20 bp, Artificial Sequence
  Antisense compound
agtagccaatttggtcatct

SEQ ID NO: 28367 - DNA, 20 bp, Artificial Sequence
  Antisense compound
tagtagccaatttggtcatc

SEQ ID NO: 28368 - DNA, 20 bp, Artificial Sequence
  Antisense compound
gtagtagccaatttggtcat

SEQ ID NO: 28369 - DNA, 20 bp, Artificial Sequence
  Antisense compound
ggtagtagccaatttggtca

SEQ ID NO: 28370 - DNA, 20 bp, Artificial Sequence
  Antisense compound
cggtagtagccaatttggtc

SEQ ID NO: 28371 - DNA, 20 bp, Artificial Sequence
  Antisense compound
tcggtagtagccaatttggt

SEQ ID NO: 28372 - DNA, 20 bp, Artificial Sequence
  Antisense compound
ttcggtagtagccaatttgg

SEQ ID NO: 28373 - DNA, 20 bp, Artificial Sequence
  Antisense compound
cttcggtagtagccaatttg

SEQ ID NO: 28374 - DNA, 20 bp, Artificial Sequence
  Antisense compound
tcttcggtagtagccaattt

SEQ ID NO: 28375 - DNA, 20 bp, Artificial Sequence
  Antisense compound
ctcttcggtagtagccaatt

SEQ ID NO: 28376 - DNA, 20 bp, Artificial Sequence
  Antisense compound
gctcttcggtagtagccaat

SEQ ID NO: 28377 - DNA, 20 bp, Artificial Sequence
  Antisense compound
agctcttcggtagtagccaa

SEQ ID NO: 28378 - DNA, 20 bp, Artificial Sequence
  Antisense compound
tagctcttcggtagtagcca

SEQ ID NO: 28379 - DNA, 20 bp, Artificial Sequence
  Antisense compound
gtagctcttcggtagtagcc

SEQ ID NO: 28380 - DNA, 20 bp, Artificial Sequence
  Antisense compound
ggtagctcttcggtagtagc

SEQ ID NO: 28381 - DNA, 20 bp, Artificial Sequence
  Antisense compound
gggtagctcttcggtagtag

SEQ ID NO: 28382 - DNA, 20 bp, Artificial Sequence
  Antisense compound
cgggtagctcttcggtagta

SEQ ID NO: 28383 - DNA, 20 bp, Artificial Sequence
  Antisense compound
tcgggtagctcttcggtagt

SEQ ID NO: 28384 - DNA, 20 bp, Artificial Sequence
  Antisense compound
gtcgggtagctcttcggtag

SEQ ID NO: 28385 - DNA, 20 bp, Artificial Sequence
  Antisense compound
cgtcgggtagctcttcggta

SEQ ID NO: 28386 - DNA, 20 bp, Artificial Sequence
  Antisense compound
tcgtcgggtagctcttcggt

SEQ ID NO: 28387 - DNA, 20 bp, Artificial Sequence
  Antisense compound
ctcgtcgggtagctcttcgg

SEQ ID NO: 28388 - DNA, 20 bp, Artificial Sequence
  Antisense compound
actcgtcgggtagctcttcg

SEQ ID NO: 28389 - DNA, 20 bp, Artificial Sequence
  Antisense compound
aactcgtcgggtagctcttc

SEQ ID NO: 28390 - DNA, 20 bp, Artificial Sequence
  Antisense compound
gaactcgtcgggtagctctt

SEQ ID NO: 28391 - DNA, 20 bp, Artificial Sequence
  Antisense compound
cgaactcgtcgggtagctct

SEQ ID NO: 28392 - DNA, 20 bp, Artificial Sequence
  Antisense compound
acgaactcgtcgggtagctc

SEQ ID NO: 28393 - DNA, 20 bp, Artificial Sequence
  Antisense compound
cacgaactcgtcgggtagct

SEQ ID NO: 28394 - DNA, 20 bp, Artificial Sequence
  Antisense compound
ccacgaactcgtcgggtagc

SEQ ID NO: 28395 - DNA, 20 bp, Artificial Sequence
  Antisense compound
accacgaactcgtcgggtag

SEQ ID NO: 28396 - DNA, 20 bp, Artificial Sequence
  Antisense compound
caccacgaactcgtcgggta

SEQ ID NO: 28397 - DNA, 20 bp, Artificial Sequence
  Antisense compound
ccaccacgaactcgtcgggt

SEQ ID NO: 28398 - DNA, 20 bp, Artificial Sequence
  Antisense compound
accaccacgaactcgtcggg

SEQ ID NO: 28399 - DNA, 20 bp, Artificial Sequence
  Antisense compound
caccaccacgaactcgtcgg

SEQ ID NO: 28400 - DNA, 20 bp, Artificial Sequence
  Antisense compound
tcaccaccacgaactcgtcg

SEQ ID NO: 28401 - DNA, 20 bp, Artificial Sequence
  Antisense compound
gtcaccaccacgaactcgtc

SEQ ID NO: 28402 - DNA, 20 bp, Artificial Sequence
  Antisense compound
cgtcaccaccacgaactcgt

SEQ ID NO: 28403 - DNA, 20 bp, Artificial Sequence
  Antisense compound
ccgtcaccaccacgaactcg

SEQ ID NO: 28404 - DNA, 20 bp, Artificial Sequence
  Antisense compound
gccgtcaccaccacgaactc

SEQ ID NO: 28405 - DNA, 20 bp, Artificial Sequence
  Antisense compound
tgccgtcaccaccacgaact

SEQ ID NO: 28406 - DNA, 20 bp, Artificial Sequence
  Antisense compound
ttgccgtcaccaccacgaac

SEQ ID NO: 28407 - DNA, 20 bp, Artificial Sequence
  Antisense compound
tttgccgtcaccaccacgaa

SEQ ID NO: 28408 - DNA, 20 bp, Artificial Sequence
  Antisense compound
ttttgccgtcaccaccacga

SEQ ID NO: 28409 - DNA, 20 bp, Artificial Sequence
  Antisense compound
attttgccgtcaccaccacg

SEQ ID NO: 28410 - DNA, 20 bp, Artificial Sequence
  Antisense compound
cattttgccgtcaccaccac

SEQ ID NO: 28411 - DNA, 20 bp, Artificial Sequence
  Antisense compound
tcattttgccgtcaccacca

SEQ ID NO: 28412 - DNA, 20 bp, Artificial Sequence
  Antisense compound
ttcattttgccgtcaccacc

SEQ ID NO: 28413 - DNA, 20 bp, Artificial Sequence
  Antisense compound
tttcattttgccgtcaccac

SEQ ID NO: 28414 - DNA, 20 bp, Artificial Sequence
  Antisense compound
ctttcattttgccgtcacca

SEQ ID NO: 28415 - DNA, 20 bp, Artificial Sequence
  Antisense compound
tctttcattttgccgtcacc

SEQ ID NO: 28416 - DNA, 20 bp, Artificial Sequence
  Antisense compound
ctctttcattttgccgtcac

SEQ ID NO: 28417 - DNA, 20 bp, Artificial Sequence
  Antisense compound
gctctttcattttgccgtca

SEQ ID NO: 28418 - DNA, 20 bp, Artificial Sequence
  Antisense compound
agctctttcattttgccgtc

SEQ ID NO: 28419 - DNA, 20 bp, Artificial Sequence
  Antisense compound
gagctctttcattttgccgt

SEQ ID NO: 28420 - DNA, 20 bp, Artificial Sequence
  Antisense compound
tgagctctttcattttgccg

SEQ ID NO: 28421 - DNA, 20 bp, Artificial Sequence
  Antisense compound
ctgagctctttcattttgcc

SEQ ID NO: 28422 - DNA, 20 bp, Artificial Sequence
  Antisense compound
gctgagctctttcattttgc

SEQ ID NO: 28423 - DNA, 20 bp, Artificial Sequence
  Antisense compound
ggctgagctctttcattttg

SEQ ID NO: 28424 - DNA, 20 bp, Artificial Sequence
  Antisense compound
gggctgagctctttcatttt

SEQ ID NO: 28425 - DNA, 20 bp, Artificial Sequence
  Antisense compound
ggggctgagctctttcattt

SEQ ID NO: 28426 - DNA, 20 bp, Artificial Sequence
  Antisense compound
tggggctgagctctttcatt

SEQ ID NO: 28427 - DNA, 20 bp, Artificial Sequence
  Antisense compound
ctggggctgagctctttcat

SEQ ID NO: 28428 - DNA, 20 bp, Artificial Sequence
  Antisense compound
tctggggctgagctctttca

SEQ ID NO: 28429 - DNA, 20 bp, Artificial Sequence
  Antisense compound
atctggggctgagctctttc

SEQ ID NO: 28430 - DNA, 20 bp, Artificial Sequence
  Antisense compound
catctggggctgagctcttt

SEQ ID NO: 28431 - DNA, 20 bp, Artificial Sequence
  Antisense compound
ccatctggggctgagctctt

SEQ ID NO: 28432 - DNA, 20 bp, Artificial Sequence
  Antisense compound
accatctggggctgagctct

SEQ ID NO: 28433 - DNA, 20 bp, Artificial Sequence
  Antisense compound
taccatctggggctgagctc

SEQ ID NO: 28434 - DNA, 20 bp, Artificial Sequence
  Antisense compound
gtaccatctggggctgagct

SEQ ID NO: 28435 - DNA, 20 bp, Artificial Sequence
  Antisense compound
agtaccatctggggctgagc

SEQ ID NO: 28436 - DNA, 20 bp, Artificial Sequence
  Antisense compound
aagtaccatctggggctgag

SEQ ID NO: 28437 - DNA, 20 bp, Artificial Sequence
  Antisense compound
gaagtaccatctggggctga

SEQ ID NO: 28438 - DNA, 20 bp, Artificial Sequence
  Antisense compound
agaagtaccatctggggctg

SEQ ID NO: 28439 - DNA, 20 bp, Artificial Sequence
  Antisense compound
tagaagtaccatctggggct

SEQ ID NO: 28440 - DNA, 20 bp, Artificial Sequence
  Antisense compound
atagaagtaccatctggggc

SEQ ID NO: 28441 - DNA, 20 bp, Artificial Sequence
  Antisense compound
aatagaagtaccatctgggg

SEQ ID NO: 28442 - DNA, 20 bp, Artificial Sequence
  Antisense compound
taatagaagtaccatctggg

SEQ ID NO: 28443 - DNA, 20 bp, Artificial Sequence
  Antisense compound
gtaatagaagtaccatctgg

SEQ ID NO: 28444 - DNA, 20 bp, Artificial Sequence
  Antisense compound
ggtaatagaagtaccatctg

SEQ ID NO: 28445 - DNA, 20 bp, Artificial Sequence
  Antisense compound
aggtaatagaagtaccatct

SEQ ID NO: 28446 - DNA, 20 bp, Artificial Sequence
  Antisense compound
taggtaatagaagtaccatc

SEQ ID NO: 28447 - DNA, 20 bp, Artificial Sequence
  Antisense compound
ctaggtaatagaagtaccat

SEQ ID NO: 28448 - DNA, 20 bp, Artificial Sequence
  Antisense compound
cctaggtaatagaagtacca

SEQ ID NO: 28449 - DNA, 20 bp, Artificial Sequence
  Antisense compound
tcctaggtaatagaagtacc

SEQ ID NO: 28450 - DNA, 20 bp, Artificial Sequence
  Antisense compound
ttcctaggtaatagaagtac

SEQ ID NO: 28451 - DNA, 20 bp, Artificial Sequence
  Antisense compound
gttcctaggtaatagaagta

SEQ ID NO: 28452 - DNA, 20 bp, Artificial Sequence
  Antisense compound
agttcctaggtaatagaagt

SEQ ID NO: 28453 - DNA, 20 bp, Artificial Sequence
  Antisense compound
cagttcctaggtaatagaag

SEQ ID NO: 28454 - DNA, 20 bp, Artificial Sequence
  Antisense compound
ccagttcctaggtaatagaa

SEQ ID NO: 28455 - DNA, 20 bp, Artificial Sequence
  Antisense compound
gccagttcctaggtaataga

SEQ ID NO: 28456 - DNA, 20 bp, Artificial Sequence
  Antisense compound
ggccagttcctaggtaatag

SEQ ID NO: 28457 - DNA, 20 bp, Artificial Sequence
  Antisense compound
gggccagttcctaggtaata

SEQ ID NO: 28458 - DNA, 20 bp, Artificial Sequence
  Antisense compound
tgggccagttcctaggtaat

SEQ ID NO: 28459 - DNA, 20 bp, Artificial Sequence
  Antisense compound
ctgggccagttcctaggtaa

SEQ ID NO: 28460 - DNA, 20 bp, Artificial Sequence
  Antisense compound
tctgggccagttcctaggta

SEQ ID NO: 28461 - DNA, 20 bp, Artificial Sequence
  Antisense compound
ttctgggccagttcctaggt

SEQ ID NO: 28462 - DNA, 20 bp, Artificial Sequence
  Antisense compound
cttctgggccagttcctagg

SEQ ID NO: 28463 - DNA, 20 bp, Artificial Sequence
  Antisense compound
gcttctgggccagttcctag

SEQ ID NO: 28464 - DNA, 20 bp, Artificial Sequence
  Antisense compound
agcttctgggccagttccta

SEQ ID NO: 28465 - DNA, 20 bp, Artificial Sequence
  Antisense compound
aagcttctgggccagttcct

SEQ ID NO: 28466 - DNA, 20 bp, Artificial Sequence
  Antisense compound
gaagcttctgggccagttcc

SEQ ID NO: 28467 - DNA, 20 bp, Artificial Sequence
  Antisense compound
tgaagcttctgggccagttc

SEQ ID NO: 28468 - DNA, 20 bp, Artificial Sequence
  Antisense compound
gtgaagcttctgggccagtt

SEQ ID NO: 28469 - DNA, 20 bp, Artificial Sequence
  Antisense compound
agtgaagcttctgggccagt

SEQ ID NO: 28470 - DNA, 20 bp, Artificial Sequence
  Antisense compound
aagtgaagcttctgggccag

SEQ ID NO: 28471 - DNA, 20 bp, Artificial Sequence
  Antisense compound
gaagtgaagcttctgggcca

SEQ ID NO: 28472 - DNA, 20 bp, Artificial Sequence
  Antisense compound
ggaagtgaagcttctgggcc

SEQ ID NO: 28473 - DNA, 20 bp, Artificial Sequence
  Antisense compound
gggaagtgaagcttctgggc

SEQ ID NO: 28474 - DNA, 20 bp, Artificial Sequence
  Antisense compound
agggaagtgaagcttctggg

SEQ ID NO: 28475 - DNA, 20 bp, Artificial Sequence
  Antisense compound
tagggaagtgaagcttctgg

SEQ ID NO: 28476 - DNA, 20 bp, Artificial Sequence
  Antisense compound
gtagggaagtgaagcttctg

SEQ ID NO: 28477 - DNA, 20 bp, Artificial Sequence
  Antisense compound
cgtagggaagtgaagcttct

SEQ ID NO: 28478 - DNA, 20 bp, Artificial Sequence
  Antisense compound
ccgtagggaagtgaagcttc

SEQ ID NO: 28479 - DNA, 20 bp, Artificial Sequence
  Antisense compound
gccgtagggaagtgaagctt

SEQ ID NO: 28480 - DNA, 20 bp, Artificial Sequence
  Antisense compound
cgccgtagggaagtgaagct

SEQ ID NO: 28481 - DNA, 20 bp, Artificial Sequence
  Antisense compound
gcgccgtagggaagtgaagc

SEQ ID NO: 28482 - DNA, 20 bp, Artificial Sequence
  Antisense compound
agcgccgtagggaagtgaag

SEQ ID NO: 28483 - DNA, 20 bp, Artificial Sequence
  Antisense compound
tagcgccgtagggaagtgaa

SEQ ID NO: 28484 - DNA, 20 bp, Artificial Sequence
  Antisense compound
ttagcgccgtagggaagtga

SEQ ID NO: 28485 - DNA, 20 bp, Artificial Sequence
  Antisense compound
gttagcgccgtagggaagtg

SEQ ID NO: 28486 - DNA, 20 bp, Artificial Sequence
  Antisense compound
tgttagcgccgtagggaagt

SEQ ID NO: 28487 - DNA, 20 bp, Artificial Sequence
  Antisense compound
ttgttagcgccgtagggaag

SEQ ID NO: 28488 - DNA, 20 bp, Artificial Sequence
  Antisense compound
tttgttagcgccgtagggaa

SEQ ID NO: 28489 - DNA, 20 bp, Artificial Sequence
  Antisense compound
ctttgttagcgccgtaggga

SEQ ID NO: 28490 - DNA, 20 bp, Artificial Sequence
  Antisense compound
tctttgttagcgccgtaggg

SEQ ID NO: 28491 - DNA, 20 bp, Artificial Sequence
  Antisense compound
ttctttgttagcgccgtagg

SEQ ID NO: 28492 - DNA, 20 bp, Artificial Sequence
  Antisense compound
cttctttgttagcgccgtag

SEQ ID NO: 28493 - DNA, 20 bp, Artificial Sequence
  Antisense compound
ccttctttgttagcgccgta

SEQ ID NO: 28494 - DNA, 20 bp, Artificial Sequence
  Antisense compound
gccttctttgttagcgccgt

SEQ ID NO: 28495 - DNA, 20 bp, Artificial Sequence
  Antisense compound
tgccttctttgttagcgccg

SEQ ID NO: 28496 - DNA, 20 bp, Artificial Sequence
  Antisense compound
atgccttctttgttagcgcc

SEQ ID NO: 28497 - DNA, 20 bp, Artificial Sequence
  Antisense compound
gatgccttctttgttagcgc

SEQ ID NO: 28498 - DNA, 20 bp, Artificial Sequence
  Antisense compound
cgatgccttctttgttagcg

SEQ ID NO: 28499 - DNA, 20 bp, Artificial Sequence
  Antisense compound
acgatgccttctttgttagc

SEQ ID NO: 28500 - DNA, 20 bp, Artificial Sequence
  Antisense compound
tacgatgccttctttgttag

SEQ ID NO: 28501 - DNA, 20 bp, Artificial Sequence
  Antisense compound
atacgatgccttctttgtta

SEQ ID NO: 28502 - DNA, 20 bp, Artificial Sequence
  Antisense compound
catacgatgccttctttgtt

SEQ ID NO: 28503 - DNA, 20 bp, Artificial Sequence
  Antisense compound
ccatacgatgccttctttgt

SEQ ID NO: 28504 - DNA, 20 bp, Artificial Sequence
  Antisense compound
cccatacgatgccttctttg

SEQ ID NO: 28505 - DNA, 20 bp, Artificial Sequence
  Antisense compound
acccatacgatgccttcttt

SEQ ID NO: 28506 - DNA, 20 bp, Artificial Sequence
  Antisense compound
aacccatacgatgccttctt

SEQ ID NO: 28507 - DNA, 20 bp, Artificial Sequence
  Antisense compound
caacccatacgatgccttct

SEQ ID NO: 28508 - DNA, 20 bp, Artificial Sequence
  Antisense compound
gcaacccatacgatgccttc

SEQ ID NO: 28509 - DNA, 20 bp, Artificial Sequence
  Antisense compound
tgcaacccatacgatgcctt

SEQ ID NO: 28510 - DNA, 20 bp, Artificial Sequence
  Antisense compound
ttgcaacccatacgatgcct

SEQ ID NO: 28511 - DNA, 20 bp, Artificial Sequence
  Antisense compound
gttgcaacccatacgatgcc

SEQ ID NO: 28512 - DNA, 20 bp, Artificial Sequence
  Antisense compound
agttgcaacccatacgatgc

SEQ ID NO: 28513 - DNA, 20 bp, Artificial Sequence
  Antisense compound
cagttgcaacccatacgatg

SEQ ID NO: 28514 - DNA, 20 bp, Artificial Sequence
  Antisense compound
tcagttgcaacccatacgat

SEQ ID NO: 28515 - DNA, 20 bp, Artificial Sequence
  Antisense compound
ctcagttgcaacccatacga

SEQ ID NO: 28516 - DNA, 20 bp, Artificial Sequence
  Antisense compound
cctcagttgcaacccatacg

SEQ ID NO: 28517 - DNA, 20 bp, Artificial Sequence
  Antisense compound
ccctcagttgcaacccatac

SEQ ID NO: 28518 - DNA, 20 bp, Artificial Sequence
  Antisense compound
tccctcagttgcaacccata

SEQ ID NO: 28519 - DNA, 20 bp, Artificial Sequence
  Antisense compound
ctccctcagttgcaacccat

SEQ ID NO: 28520 - DNA, 20 bp, Artificial Sequence
  Antisense compound
gctccctcagttgcaaccca

SEQ ID NO: 28521 - DNA, 20 bp, Artificial Sequence
  Antisense compound
ggctccctcagttgcaaccc

SEQ ID NO: 28522 - DNA, 20 bp, Artificial Sequence
  Antisense compound
aggctccctcagttgcaacc

SEQ ID NO: 28523 - DNA, 20 bp, Artificial Sequence
  Antisense compound
aaggctccctcagttgcaac

SEQ ID NO: 28524 - DNA, 20 bp, Artificial Sequence
  Antisense compound
caaggctccctcagttgcaa

SEQ ID NO: 28525 - DNA, 20 bp, Artificial Sequence
  Antisense compound
tcaaggctccctcagttgca

SEQ ID NO: 28526 - DNA, 20 bp, Artificial Sequence
  Antisense compound
ttcaaggctccctcagttgc

SEQ ID NO: 28527 - DNA, 20 bp, Artificial Sequence
  Antisense compound
attcaaggctccctcagttg

SEQ ID NO: 28528 - DNA, 20 bp, Artificial Sequence
  Antisense compound
tattcaaggctccctcagtt

SEQ ID NO: 28529 - DNA, 20 bp, Artificial Sequence
  Antisense compound
gtattcaaggctccctcagt

SEQ ID NO: 28530 - DNA, 20 bp, Artificial Sequence
  Antisense compound
tgtattcaaggctccctcag

SEQ ID NO: 28531 - DNA, 20 bp, Artificial Sequence
  Antisense compound
gtgtattcaaggctccctca

SEQ ID NO: 28532 - DNA, 20 bp, Artificial Sequence
  Antisense compound
ggtgtattcaaggctccctc

SEQ ID NO: 28533 - DNA, 20 bp, Artificial Sequence
  Antisense compound
gggtgtattcaaggctccct

SEQ ID NO: 28534 - DNA, 20 bp, Artificial Sequence
  Antisense compound
tgggtgtattcaaggctccc

SEQ ID NO: 28535 - DNA, 20 bp, Artificial Sequence
  Antisense compound
ttgggtgtattcaaggctcc

SEQ ID NO: 28536 - DNA, 20 bp, Artificial Sequence
  Antisense compound
tttgggtgtattcaaggctc

SEQ ID NO: 28537 - DNA, 20 bp, Artificial Sequence
  Antisense compound
ctttgggtgtattcaaggct

SEQ ID NO: 28538 - DNA, 20 bp, Artificial Sequence
  Antisense compound
tctttgggtgtattcaaggc

SEQ ID NO: 28539 - DNA, 20 bp, Artificial Sequence
  Antisense compound
gtctttgggtgtattcaagg

SEQ ID NO: 28540 - DNA, 20 bp, Artificial Sequence
  Antisense compound
ggtctttgggtgtattcaag

SEQ ID NO: 28541 - DNA, 20 bp, Artificial Sequence
  Antisense compound
tggtctttgggtgtattcaa

SEQ ID NO: 28542 - DNA, 20 bp, Artificial Sequence
  Antisense compound
gtggtctttgggtgtattca

SEQ ID NO: 28543 - DNA, 20 bp, Artificial Sequence
  Antisense compound
tgtggtctttgggtgtattc

SEQ ID NO: 28544 - DNA, 20 bp, Artificial Sequence
  Antisense compound
atgtggtctttgggtgtatt

SEQ ID NO: 28545 - DNA, 20 bp, Artificial Sequence
  Antisense compound
aatgtggtctttgggtgtat

SEQ ID NO: 28546 - DNA, 20 bp, Artificial Sequence
  Antisense compound
caatgtggtctttgggtgta

SEQ ID NO: 28547 - DNA, 20 bp, Artificial Sequence
  Antisense compound
ccaatgtggtctttgggtgt

SEQ ID NO: 28548 - DNA, 20 bp, Artificial Sequence
  Antisense compound
gccaatgtggtctttgggtg

SEQ ID NO: 28549 - DNA, 20 bp, Artificial Sequence
  Antisense compound
tgccaatgtggtctttgggt

SEQ ID NO: 28550 - DNA, 20 bp, Artificial Sequence
  Antisense compound
gtgccaatgtggtctttggg

SEQ ID NO: 28551 - DNA, 20 bp, Artificial Sequence
  Antisense compound
ggtgccaatgtggtctttgg

SEQ ID NO: 28552 - DNA, 20 bp, Artificial Sequence
  Antisense compound
gggtgccaatgtggtctttg

SEQ ID NO: 28553 - DNA, 20 bp, Artificial Sequence
  Antisense compound
cgggtgccaatgtggtcttt

SEQ ID NO: 28554 - DNA, 20 bp, Artificial Sequence
  Antisense compound
gcgggtgccaatgtggtctt

SEQ ID NO: 28555 - DNA, 20 bp, Artificial Sequence
  Antisense compound
tgcgggtgccaatgtggtct

SEQ ID NO: 28556 - DNA, 20 bp, Artificial Sequence
  Antisense compound
ttgcgggtgccaatgtggtc

SEQ ID NO: 28557 - DNA, 20 bp, Artificial Sequence
  Antisense compound
attgcgggtgccaatgtggt

SEQ ID NO: 28558 - DNA, 20 bp, Artificial Sequence
  Antisense compound
gattgcgggtgccaatgtgg

SEQ ID NO: 28559 - DNA, 20 bp, Artificial Sequence
  Antisense compound
ggattgcgggtgccaatgtg

SEQ ID NO: 28560 - DNA, 20 bp, Artificial Sequence
  Antisense compound
aggattgcgggtgccaatgt

SEQ ID NO: 28561 - DNA, 20 bp, Artificial Sequence
  Antisense compound
taggattgcgggtgccaatg

SEQ ID NO: 28562 - DNA, 20 bp, Artificial Sequence
  Antisense compound
ttaggattgcgggtgccaat

SEQ ID NO: 28563 - DNA, 20 bp, Artificial Sequence
  Antisense compound
attaggattgcgggtgccaa

SEQ ID NO: 28564 - DNA, 20 bp, Artificial Sequence
  Antisense compound
tattaggattgcgggtgcca

SEQ ID NO: 28565 - DNA, 20 bp, Artificial Sequence
  Antisense compound
ttattaggattgcgggtgcc

SEQ ID NO: 28566 - DNA, 20 bp, Artificial Sequence
  Antisense compound
gttattaggattgcgggtgc

SEQ ID NO: 28567 - DNA, 20 bp, Artificial Sequence
  Antisense compound
tgttattaggattgcgggtg

SEQ ID NO: 28568 - DNA, 20 bp, Artificial Sequence
  Antisense compound
ttgttattaggattgcgggt

SEQ ID NO: 28569 - DNA, 20 bp, Artificial Sequence
  Antisense compound
attgttattaggattgcggg

SEQ ID NO: 28570 - DNA, 20 bp, Artificial Sequence
  Antisense compound
cattgttattaggattgcgg

SEQ ID NO: 28571 - DNA, 20 bp, Artificial Sequence
  Antisense compound
gcattgttattaggattgcg

SEQ ID NO: 28572 - DNA, 20 bp, Artificial Sequence
  Antisense compound
agcattgttattaggattgc

SEQ ID NO: 28573 - DNA, 20 bp, Artificial Sequence
  Antisense compound
cagcattgttattaggattg

SEQ ID NO: 28574 - DNA, 20 bp, Artificial Sequence
  Antisense compound
gcagcattgttattaggatt

SEQ ID NO: 28575 - DNA, 20 bp, Artificial Sequence
  Antisense compound
ggcagcattgttattaggat

SEQ ID NO: 28576 - DNA, 20 bp, Artificial Sequence
  Antisense compound
tggcagcattgttattagga

SEQ ID NO: 28577 - DNA, 20 bp, Artificial Sequence
  Antisense compound
gtggcagcattgttattagg

SEQ ID NO: 28578 - DNA, 20 bp, Artificial Sequence
  Antisense compound
ggtggcagcattgttattag

SEQ ID NO: 28579 - DNA, 20 bp, Artificial Sequence
  Antisense compound
cggtggcagcattgttatta

SEQ ID NO: 28580 - DNA, 20 bp, Artificial Sequence
  Antisense compound
acggtggcagcattgttatt

SEQ ID NO: 28581 - DNA, 20 bp, Artificial Sequence
  Antisense compound
cacggtggcagcattgttat

SEQ ID NO: 28582 - DNA, 20 bp, Artificial Sequence
  Antisense compound
gcacggtggcagcattgtta

SEQ ID NO: 28583 - DNA, 20 bp, Artificial Sequence
  Antisense compound
agcacggtggcagcattgtt

SEQ ID NO: 28584 - DNA, 20 bp, Artificial Sequence
  Antisense compound
tagcacggtggcagcattgt

SEQ ID NO: 28585 - DNA, 20 bp, Artificial Sequence
  Antisense compound
gtagcacggtggcagcattg

SEQ ID NO: 28586 - DNA, 20 bp, Artificial Sequence
  Antisense compound
tgtagcacggtggcagcatt

SEQ ID NO: 28587 - DNA, 20 bp, Artificial Sequence
  Antisense compound
ttgtagcacggtggcagcat

SEQ ID NO: 28588 - DNA, 20 bp, Artificial Sequence
  Antisense compound
gttgtagcacggtggcagca

SEQ ID NO: 28589 - DNA, 20 bp, Artificial Sequence
  Antisense compound
agttgtagcacggtggcagc

SEQ ID NO: 28590 - DNA, 20 bp, Artificial Sequence
  Antisense compound
aagttgtagcacggtggcag

SEQ ID NO: 28591 - DNA, 20 bp, Artificial Sequence
  Antisense compound
gaagttgtagcacggtggca

SEQ ID NO: 28592 - DNA, 20 bp, Artificial Sequence
  Antisense compound
ggaagttgtagcacggtggc

SEQ ID NO: 28593 - DNA, 20 bp, Artificial Sequence
  Antisense compound
aggaagttgtagcacggtgg

SEQ ID NO: 28594 - DNA, 20 bp, Artificial Sequence
  Antisense compound
gaggaagttgtagcacggtg

SEQ ID NO: 28595 - DNA, 20 bp, Artificial Sequence
  Antisense compound
tgaggaagttgtagcacggt

SEQ ID NO: 28596 - DNA, 20 bp, Artificial Sequence
  Antisense compound
ttgaggaagttgtagcacgg

SEQ ID NO: 28597 - DNA, 20 bp, Artificial Sequence
  Antisense compound
cttgaggaagttgtagcacg

SEQ ID NO: 28598 - DNA, 20 bp, Artificial Sequence
  Antisense compound
ccttgaggaagttgtagcac

SEQ ID NO: 28599 - DNA, 20 bp, Artificial Sequence
  Antisense compound
tccttgaggaagttgtagca

SEQ ID NO: 28600 - DNA, 20 bp, Artificial Sequence
  Antisense compound
ttccttgaggaagttgtagc

SEQ ID NO: 28601 - DNA, 20 bp, Artificial Sequence
  Antisense compound
gttccttgaggaagttgtag

SEQ ID NO: 28602 - DNA, 20 bp, Artificial Sequence
  Antisense compound
tgttccttgaggaagttgta

SEQ ID NO: 28603 - DNA, 20 bp, Artificial Sequence
  Antisense compound
ttgttccttgaggaagttgt

SEQ ID NO: 28604 - DNA, 20 bp, Artificial Sequence
  Antisense compound
gttgttccttgaggaagttg

SEQ ID NO: 28605 - DNA, 20 bp, Artificial Sequence
  Antisense compound
tgttgttccttgaggaagtt

SEQ ID NO: 28606 - DNA, 20 bp, Artificial Sequence
  Antisense compound
atgttgttccttgaggaagt

SEQ ID NO: 28607 - DNA, 20 bp, Artificial Sequence
  Antisense compound
aatgttgttccttgaggaag

SEQ ID NO: 28608 - DNA, 20 bp, Artificial Sequence
  Antisense compound
caatgttgttccttgaggaa

SEQ ID NO: 28609 - DNA, 20 bp, Artificial Sequence
  Antisense compound
gcaatgttgttccttgagga

SEQ ID NO: 28610 - DNA, 20 bp, Artificial Sequence
  Antisense compound
ggcaatgttgttccttgagg

SEQ ID NO: 28611 - DNA, 20 bp, Artificial Sequence
  Antisense compound
tggcaatgttgttccttgag

SEQ ID NO: 28612 - DNA, 20 bp, Artificial Sequence
  Antisense compound
ttggcaatgttgttccttga

SEQ ID NO: 28613 - DNA, 20 bp, Artificial Sequence
  Antisense compound
tttggcaatgttgttccttg

SEQ ID NO: 28614 - DNA, 20 bp, Artificial Sequence
  Antisense compound
ttttggcaatgttgttcctt

SEQ ID NO: 28615 - DNA, 20 bp, Artificial Sequence
  Antisense compound
cttttggcaatgttgttcct

SEQ ID NO: 28616 - DNA, 20 bp, Artificial Sequence
  Antisense compound
ccttttggcaatgttgttcc

SEQ ID NO: 28617 - DNA, 20 bp, Artificial Sequence
  Antisense compound
gccttttggcaatgttgttc

SEQ ID NO: 28618 - DNA, 20 bp, Artificial Sequence
  Antisense compound
agccttttggcaatgttgtt

SEQ ID NO: 28619 - DNA, 20 bp, Artificial Sequence
  Antisense compound
aagccttttggcaatgttgt

SEQ ID NO: 28620 - DNA, 20 bp, Artificial Sequence
  Antisense compound
gaagccttttggcaatgttg

SEQ ID NO: 28621 - DNA, 20 bp, Artificial Sequence
  Antisense compound
agaagccttttggcaatgtt

SEQ ID NO: 28622 - DNA, 20 bp, Artificial Sequence
  Antisense compound
tagaagccttttggcaatgt

SEQ ID NO: 28623 - DNA, 20 bp, Artificial Sequence
  Antisense compound
gtagaagccttttggcaatg

SEQ ID NO: 28624 - DNA, 20 bp, Artificial Sequence
  Antisense compound
cgtagaagccttttggcaat

SEQ ID NO: 28625 - DNA, 20 bp, Artificial Sequence
  Antisense compound
gcgtagaagccttttggcaa

SEQ ID NO: 28626 - DNA, 20 bp, Artificial Sequence
  Antisense compound
tgcgtagaagccttttggca

SEQ ID NO: 28627 - DNA, 20 bp, Artificial Sequence
  Antisense compound
ctgcgtagaagccttttggc

SEQ ID NO: 28628 - DNA, 20 bp, Artificial Sequence
  Antisense compound
tctgcgtagaagccttttgg

SEQ ID NO: 28629 - DNA, 20 bp, Artificial Sequence
  Antisense compound
ctctgcgtagaagccttttg

SEQ ID NO: 28630 - DNA, 20 bp, Artificial Sequence
  Antisense compound
cctctgcgtagaagcctttt

SEQ ID NO: 28631 - DNA, 20 bp, Artificial Sequence
  Antisense compound
ccctctgcgtagaagccttt

SEQ ID NO: 28632 - DNA, 20 bp, Artificial Sequence
  Antisense compound
tccctctgcgtagaagcctt

SEQ ID NO: 28633 - DNA, 20 bp, Artificial Sequence
  Antisense compound
ttccctctgcgtagaagcct

SEQ ID NO: 28634 - DNA, 20 bp, Artificial Sequence
  Antisense compound
cttccctctgcgtagaagcc

SEQ ID NO: 28635 - DNA, 20 bp, Artificial Sequence
  Antisense compound
gcttccctctgcgtagaagc

SEQ ID NO: 28636 - DNA, 20 bp, Artificial Sequence
  Antisense compound
tgcttccctctgcgtagaag

SEQ ID NO: 28637 - DNA, 20 bp, Artificial Sequence
  Antisense compound
ctgcttccctctgcgtagaa

SEQ ID NO: 28638 - DNA, 20 bp, Artificial Sequence
  Antisense compound
tctgcttccctctgcgtaga

SEQ ID NO: 28639 - DNA, 20 bp, Artificial Sequence
  Antisense compound
ctctgcttccctctgcgtag

SEQ ID NO: 28640 - DNA, 20 bp, Artificial Sequence
  Antisense compound
cctctgcttccctctgcgta

SEQ ID NO: 28641 - DNA, 20 bp, Artificial Sequence
  Antisense compound
gcctctgcttccctctgcgt

SEQ ID NO: 28642 - DNA, 20 bp, Artificial Sequence
  Antisense compound
cgcctctgcttccctctgcg

SEQ ID NO: 28643 - DNA, 20 bp, Artificial Sequence
  Antisense compound
ccgcctctgcttccctctgc

SEQ ID NO: 28644 - DNA, 20 bp, Artificial Sequence
  Antisense compound
gccgcctctgcttccctctg

SEQ ID NO: 28645 - DNA, 20 bp, Artificial Sequence
  Antisense compound
tgccgcctctgcttccctct

SEQ ID NO: 28646 - DNA, 20 bp, Artificial Sequence
  Antisense compound
ctgccgcctctgcttccctc

SEQ ID NO: 28647 - DNA, 20 bp, Artificial Sequence
  Antisense compound
actgccgcctctgcttccct

SEQ ID NO: 28648 - DNA, 20 bp, Artificial Sequence
  Antisense compound
gactgccgcctctgcttccc

SEQ ID NO: 28649 - DNA, 20 bp, Artificial Sequence
  Antisense compound
tgactgccgcctctgcttcc

SEQ ID NO: 28650 - DNA, 20 bp, Artificial Sequence
  Antisense compound
ttgactgccgcctctgcttc

SEQ ID NO: 28651 - DNA, 20 bp, Artificial Sequence
  Antisense compound
cttgactgccgcctctgctt

SEQ ID NO: 28652 - DNA, 20 bp, Artificial Sequence
  Antisense compound
gcttgactgccgcctctgct

SEQ ID NO: 28653 - DNA, 20 bp, Artificial Sequence
  Antisense compound
ggcttgactgccgcctctgc

SEQ ID NO: 28654 - DNA, 20 bp, Artificial Sequence
  Antisense compound
aggcttgactgccgcctctg

SEQ ID NO: 28655 - DNA, 20 bp, Artificial Sequence
  Antisense compound
gaggcttgactgccgcctct

SEQ ID NO: 28656 - DNA, 20 bp, Artificial Sequence
  Antisense compound
agaggcttgactgccgcctc

SEQ ID NO: 28657 - DNA, 20 bp, Artificial Sequence
  Antisense compound
aagaggcttgactgccgcct

SEQ ID NO: 28658 - DNA, 20 bp, Artificial Sequence
  Antisense compound
gaagaggcttgactgccgcc

SEQ ID NO: 28659 - DNA, 20 bp, Artificial Sequence
  Antisense compound
agaagaggcttgactgccgc

SEQ ID NO: 28660 - DNA, 20 bp, Artificial Sequence
  Antisense compound
gagaagaggcttgactgccg

SEQ ID NO: 28661 - DNA, 20 bp, Artificial Sequence
  Antisense compound
cgagaagaggcttgactgcc

SEQ ID NO: 28662 - DNA, 20 bp, Artificial Sequence
  Antisense compound
gcgagaagaggcttgactgc

SEQ ID NO: 28663 - DNA, 20 bp, Artificial Sequence
  Antisense compound
agcgagaagaggcttgactg

SEQ ID NO: 28664 - DNA, 20 bp, Artificial Sequence
  Antisense compound
gagcgagaagaggcttgact

SEQ ID NO: 28665 - DNA, 20 bp, Artificial Sequence
  Antisense compound
ggagcgagaagaggcttgac

SEQ ID NO: 28666 - DNA, 20 bp, Artificial Sequence
  Antisense compound
aggagcgagaagaggcttga

SEQ ID NO: 28667 - DNA, 20 bp, Artificial Sequence
  Antisense compound
gaggagcgagaagaggcttg

SEQ ID NO: 28668 - DNA, 20 bp, Artificial Sequence
  Antisense compound
tgaggagcgagaagaggctt

SEQ ID NO: 28669 - DNA, 20 bp, Artificial Sequence
  Antisense compound
atgaggagcgagaagaggct

SEQ ID NO: 28670 - DNA, 20 bp, Artificial Sequence
  Antisense compound
gatgaggagcgagaagaggc

SEQ ID NO: 28671 - DNA, 20 bp, Artificial Sequence
  Antisense compound
tgatgaggagcgagaagagg

SEQ ID NO: 28672 - DNA, 20 bp, Artificial Sequence
  Antisense compound
gtgatgaggagcgagaagag

SEQ ID NO: 28673 - DNA, 20 bp, Artificial Sequence
  Antisense compound
cgtgatgaggagcgagaaga

SEQ ID NO: 28674 - DNA, 20 bp, Artificial Sequence
  Antisense compound
acgtgatgaggagcgagaag

SEQ ID NO: 28675 - DNA, 20 bp, Artificial Sequence
  Antisense compound
tacgtgatgaggagcgagaa

SEQ ID NO: 28676 - DNA, 20 bp, Artificial Sequence
  Antisense compound
ctacgtgatgaggagcgaga

SEQ ID NO: 28677 - DNA, 20 bp, Artificial Sequence
  Antisense compound
actacgtgatgaggagcgag

SEQ ID NO: 28678 - DNA, 20 bp, Artificial Sequence
  Antisense compound
gactacgtgatgaggagcga

SEQ ID NO: 28679 - DNA, 20 bp, Artificial Sequence
  Antisense compound
cgactacgtgatgaggagcg

SEQ ID NO: 28680 - DNA, 20 bp, Artificial Sequence
  Antisense compound
gcgactacgtgatgaggagc

SEQ ID NO: 28681 - DNA, 20 bp, Artificial Sequence
  Antisense compound
cgcgactacgtgatgaggag

SEQ ID NO: 28682 - DNA, 20 bp, Artificial Sequence
  Antisense compound
ccgcgactacgtgatgagga

SEQ ID NO: 28683 - DNA, 20 bp, Artificial Sequence
  Antisense compound
accgcgactacgtgatgagg

SEQ ID NO: 28684 - DNA, 20 bp, Artificial Sequence
  Antisense compound
taccgcgactacgtgatgag

SEQ ID NO: 28685 - DNA, 20 bp, Artificial Sequence
  Antisense compound
ttaccgcgactacgtgatga

SEQ ID NO: 28686 - DNA, 20 bp, Artificial Sequence
  Antisense compound
attaccgcgactacgtgatg

SEQ ID NO: 28687 - DNA, 20 bp, Artificial Sequence
  Antisense compound
aattaccgcgactacgtgat

SEQ ID NO: 28688 - DNA, 20 bp, Artificial Sequence
  Antisense compound
gaattaccgcgactacgtga

SEQ ID NO: 28689 - DNA, 20 bp, Artificial Sequence
  Antisense compound
tgaattaccgcgactacgtg

SEQ ID NO: 28690 - DNA, 20 bp, Artificial Sequence
  Antisense compound
ttgaattaccgcgactacgt

SEQ ID NO: 28691 - DNA, 20 bp, Artificial Sequence
  Antisense compound
cttgaattaccgcgactacg

SEQ ID NO: 28692 - DNA, 20 bp, Artificial Sequence
  Antisense compound
tcttgaattaccgcgactac

SEQ ID NO: 28693 - DNA, 20 bp, Artificial Sequence
  Antisense compound
ttcttgaattaccgcgacta

SEQ ID NO: 28694 - DNA, 20 bp, Artificial Sequence
  Antisense compound
tttcttgaattaccgcgact

SEQ ID NO: 28695 - DNA, 20 bp, Artificial Sequence
  Antisense compound
atttcttgaattaccgcgac

SEQ ID NO: 28696 - DNA, 20 bp, Artificial Sequence
  Antisense compound
aatttcttgaattaccgcga

SEQ ID NO: 28697 - DNA, 20 bp, Artificial Sequence
  Antisense compound
gaatttcttgaattaccgcg

SEQ ID NO: 28698 - DNA, 20 bp, Artificial Sequence
  Antisense compound
tgaatttcttgaattaccgc

SEQ ID NO: 28699 - DNA, 20 bp, Artificial Sequence
  Antisense compound
ttgaatttcttgaattaccg

SEQ ID NO: 28700 - DNA, 20 bp, Artificial Sequence
  Antisense compound
gttgaatttcttgaattacc

SEQ ID NO: 28701 - DNA, 20 bp, Artificial Sequence
  Antisense compound
agttgaatttcttgaattac

SEQ ID NO: 28702 - DNA, 20 bp, Artificial Sequence
  Antisense compound
gagttgaatttcttgaatta

SEQ ID NO: 28703 - DNA, 20 bp, Artificial Sequence
  Antisense compound
ggagttgaatttcttgaatt

SEQ ID NO: 28704 - DNA, 20 bp, Artificial Sequence
  Antisense compound
aggagttgaatttcttgaat

SEQ ID NO: 28705 - DNA, 20 bp, Artificial Sequence
  Antisense compound
caggagttgaatttcttgaa

SEQ ID NO: 28706 - DNA, 20 bp, Artificial Sequence
  Antisense compound
ccaggagttgaatttcttga

SEQ ID NO: 28707 - DNA, 20 bp, Artificial Sequence
  Antisense compound
gccaggagttgaatttcttg

SEQ ID NO: 28708 - DNA, 20 bp, Artificial Sequence
  Antisense compound
tgccaggagttgaatttctt

SEQ ID NO: 28709 - DNA, 20 bp, Artificial Sequence
  Antisense compound
ctgccaggagttgaatttct

SEQ ID NO: 28710 - DNA, 20 bp, Artificial Sequence
  Antisense compound
gctgccaggagttgaatttc

SEQ ID NO: 28711 - DNA, 20 bp, Artificial Sequence
  Antisense compound
tgctgccaggagttgaattt

SEQ ID NO: 28712 - DNA, 20 bp, Artificial Sequence
  Antisense compound
ctgctgccaggagttgaatt

SEQ ID NO: 28713 - DNA, 20 bp, Artificial Sequence
  Antisense compound
actgctgccaggagttgaat

SEQ ID NO: 28714 - DNA, 20 bp, Artificial Sequence
  Antisense compound
tactgctgccaggagttgaa

SEQ ID NO: 28715 - DNA, 20 bp, Artificial Sequence
  Antisense compound
ctactgctgccaggagttga

SEQ ID NO: 28716 - DNA, 20 bp, Artificial Sequence
  Antisense compound
cctactgctgccaggagttg

SEQ ID NO: 28717 - DNA, 20 bp, Artificial Sequence
  Antisense compound
ccctactgctgccaggagtt

SEQ ID NO: 28718 - DNA, 20 bp, Artificial Sequence
  Antisense compound
cccctactgctgccaggagt

SEQ ID NO: 28719 - DNA, 20 bp, Artificial Sequence
  Antisense compound
tcccctactgctgccaggag

SEQ ID NO: 28720 - DNA, 20 bp, Artificial Sequence
  Antisense compound
ttcccctactgctgccagga

SEQ ID NO: 28721 - DNA, 20 bp, Artificial Sequence
  Antisense compound
tttcccctactgctgccagg

SEQ ID NO: 28722 - DNA, 20 bp, Artificial Sequence
  Antisense compound
atttcccctactgctgccag

SEQ ID NO: 28723 - DNA, 20 bp, Artificial Sequence
  Antisense compound
aatttcccctactgctgcca

SEQ ID NO: 28724 - DNA, 20 bp, Artificial Sequence
  Antisense compound
gaatttcccctactgctgcc

SEQ ID NO: 28725 - DNA, 20 bp, Artificial Sequence
  Antisense compound
agaatttcccctactgctgc

SEQ ID NO: 28726 - DNA, 20 bp, Artificial Sequence
  Antisense compound
gagaatttcccctactgctg

SEQ ID NO: 28727 - DNA, 20 bp, Artificial Sequence
  Antisense compound
ggagaatttcccctactgct

SEQ ID NO: 28728 - DNA, 20 bp, Artificial Sequence
  Antisense compound
aggagaatttcccctactgc

SEQ ID NO: 28729 - DNA, 20 bp, Artificial Sequence
  Antisense compound
caggagaatttcccctactg

SEQ ID NO: 28730 - DNA, 20 bp, Artificial Sequence
  Antisense compound
gcaggagaatttcccctact

SEQ ID NO: 28731 - DNA, 20 bp, Artificial Sequence
  Antisense compound
agcaggagaatttcccctac

SEQ ID NO: 28732 - DNA, 20 bp, Artificial Sequence
  Antisense compound
gagcaggagaatttccccta

SEQ ID NO: 28733 - DNA, 20 bp, Artificial Sequence
  Antisense compound
cgagcaggagaatttcccct

SEQ ID NO: 28734 - DNA, 20 bp, Artificial Sequence
  Antisense compound
tcgagcaggagaatttcccc

SEQ ID NO: 28735 - DNA, 20 bp, Artificial Sequence
  Antisense compound
ttcgagcaggagaatttccc

SEQ ID NO: 28736 - DNA, 20 bp, Artificial Sequence
  Antisense compound
attcgagcaggagaatttcc

SEQ ID NO: 28737 - DNA, 20 bp, Artificial Sequence
  Antisense compound
cattcgagcaggagaatttc

SEQ ID NO: 28738 - DNA, 20 bp, Artificial Sequence
  Antisense compound
ccattcgagcaggagaattt

SEQ ID NO: 28739 - DNA, 20 bp, Artificial Sequence
  Antisense compound
gccattcgagcaggagaatt

SEQ ID NO: 28740 - DNA, 20 bp, Artificial Sequence
  Antisense compound
agccattcgagcaggagaat

SEQ ID NO: 28741 - DNA, 20 bp, Artificial Sequence
  Antisense compound
tagccattcgagcaggagaa

SEQ ID NO: 28742 - DNA, 20 bp, Artificial Sequence
  Antisense compound
ctagccattcgagcaggaga

SEQ ID NO: 28743 - DNA, 20 bp, Artificial Sequence
  Antisense compound
gctagccattcgagcaggag

SEQ ID NO: 28744 - DNA, 20 bp, Artificial Sequence
  Antisense compound
cgctagccattcgagcagga

SEQ ID NO: 28745 - DNA, 20 bp, Artificial Sequence
  Antisense compound
ccgctagccattcgagcagg

SEQ ID NO: 28746 - DNA, 20 bp, Artificial Sequence
  Antisense compound
tccgctagccattcgagcag

SEQ ID NO: 28747 - DNA, 20 bp, Artificial Sequence
  Antisense compound
ctccgctagccattcgagca

SEQ ID NO: 28748 - DNA, 20 bp, Artificial Sequence
  Antisense compound
cctccgctagccattcgagc

SEQ ID NO: 28749 - DNA, 20 bp, Artificial Sequence
  Antisense compound
acctccgctagccattcgag

SEQ ID NO: 28750 - DNA, 20 bp, Artificial Sequence
  Antisense compound
cacctccgctagccattcga

SEQ ID NO: 28751 - DNA, 20 bp, Artificial Sequence
  Antisense compound
ccacctccgctagccattcg

SEQ ID NO: 28752 - DNA, 20 bp, Artificial Sequence
  Antisense compound
accacctccgctagccattc

SEQ ID NO: 28753 - DNA, 20 bp, Artificial Sequence
  Antisense compound
caccacctccgctagccatt

SEQ ID NO: 28754 - DNA, 20 bp, Artificial Sequence
  Antisense compound
tcaccacctccgctagccat

SEQ ID NO: 28755 - DNA, 20 bp, Artificial Sequence
  Antisense compound
ttcaccacctccgctagcca

SEQ ID NO: 28756 - DNA, 20 bp, Artificial Sequence
  Antisense compound
tttcaccacctccgctagcc

SEQ ID NO: 28757 - DNA, 20 bp, Artificial Sequence
  Antisense compound
gtttcaccacctccgctagc

SEQ ID NO: 28758 - DNA, 20 bp, Artificial Sequence
  Antisense compound
agtttcaccacctccgctag

SEQ ID NO: 28759 - DNA, 20 bp, Artificial Sequence
  Antisense compound
cagtttcaccacctccgcta

SEQ ID NO: 28760 - DNA, 20 bp, Artificial Sequence
  Antisense compound
gcagtttcaccacctccgct

SEQ ID NO: 28761 - DNA, 20 bp, Artificial Sequence
  Antisense compound
ggcagtttcaccacctccgc

SEQ ID NO: 28762 - DNA, 20 bp, Artificial Sequence
  Antisense compound
gggcagtttcaccacctccg

SEQ ID NO: 28763 - DNA, 20 bp, Artificial Sequence
  Antisense compound
agggcagtttcaccacctcc

SEQ ID NO: 28764 - DNA, 20 bp, Artificial Sequence
  Antisense compound
gagggcagtttcaccacctc

SEQ ID NO: 28765 - DNA, 20 bp, Artificial Sequence
  Antisense compound
cgagggcagtttcaccacct

SEQ ID NO: 28766 - DNA, 20 bp, Artificial Sequence
  Antisense compound
gcgagggcagtttcaccacc

SEQ ID NO: 28767 - DNA, 20 bp, Artificial Sequence
  Antisense compound
cgcgagggcagtttcaccac

SEQ ID NO: 28768 - DNA, 20 bp, Artificial Sequence
  Antisense compound
gcgcgagggcagtttcacca

SEQ ID NO: 28769 - DNA, 20 bp, Artificial Sequence
  Antisense compound
agcgcgagggcagtttcacc

SEQ ID NO: 28770 - DNA, 20 bp, Artificial Sequence
  Antisense compound
tagcgcgagggcagtttcac

SEQ ID NO: 28771 - DNA, 20 bp, Artificial Sequence
  Antisense compound
atagcgcgagggcagtttca

SEQ ID NO: 28772 - DNA, 20 bp, Artificial Sequence
  Antisense compound
aatagcgcgagggcagtttc

SEQ ID NO: 28773 - DNA, 20 bp, Artificial Sequence
  Antisense compound
caatagcgcgagggcagttt

SEQ ID NO: 28774 - DNA, 20 bp, Artificial Sequence
  Antisense compound
gcaatagcgcgagggcagtt

SEQ ID NO: 28775 - DNA, 20 bp, Artificial Sequence
  Antisense compound
agcaatagcgcgagggcagt

SEQ ID NO: 28776 - DNA, 20 bp, Artificial Sequence
  Antisense compound
cagcaatagcgcgagggcag

SEQ ID NO: 28777 - DNA, 20 bp, Artificial Sequence
  Antisense compound
gcagcaatagcgcgagggca

SEQ ID NO: 28778 - DNA, 20 bp, Artificial Sequence
  Antisense compound
agcagcaatagcgcgagggc

SEQ ID NO: 28779 - DNA, 20 bp, Artificial Sequence
  Antisense compound
tagcagcaatagcgcgaggg

SEQ ID NO: 28780 - DNA, 20 bp, Artificial Sequence
  Antisense compound
ctagcagcaatagcgcgagg

SEQ ID NO: 28781 - DNA, 20 bp, Artificial Sequence
  Antisense compound
tctagcagcaatagcgcgag

SEQ ID NO: 28782 - DNA, 20 bp, Artificial Sequence
  Antisense compound
gtctagcagcaatagcgcga

SEQ ID NO: 28783 - DNA, 20 bp, Artificial Sequence
  Antisense compound
tgtctagcagcaatagcgcg

SEQ ID NO: 28784 - DNA, 20 bp, Artificial Sequence
  Antisense compound
ctgtctagcagcaatagcgc

SEQ ID NO: 28785 - DNA, 20 bp, Artificial Sequence
  Antisense compound
tctgtctagcagcaatagcg

SEQ ID NO: 28786 - DNA, 20 bp, Artificial Sequence
  Antisense compound
atctgtctagcagcaatagc

SEQ ID NO: 28787 - DNA, 20 bp, Artificial Sequence
  Antisense compound
aatctgtctagcagcaatag

SEQ ID NO: 28788 - DNA, 20 bp, Artificial Sequence
  Antisense compound
caatctgtctagcagcaata

SEQ ID NO: 28789 - DNA, 20 bp, Artificial Sequence
  Antisense compound
tcaatctgtctagcagcaat

SEQ ID NO: 28790 - DNA, 20 bp, Artificial Sequence
  Antisense compound
ttcaatctgtctagcagcaa

SEQ ID NO: 28791 - DNA, 20 bp, Artificial Sequence
  Antisense compound
gttcaatctgtctagcagca

SEQ ID NO: 28792 - DNA, 20 bp, Artificial Sequence
  Antisense compound
ggttcaatctgtctagcagc

SEQ ID NO: 28793 - DNA, 20 bp, Artificial Sequence
  Antisense compound
tggttcaatctgtctagcag

SEQ ID NO: 28794 - DNA, 20 bp, Artificial Sequence
  Antisense compound
ctggttcaatctgtctagca

SEQ ID NO: 28795 - DNA, 20 bp, Artificial Sequence
  Antisense compound
gctggttcaatctgtctagc

SEQ ID NO: 28796 - DNA, 20 bp, Artificial Sequence
  Antisense compound
agctggttcaatctgtctag

SEQ ID NO: 28797 - DNA, 20 bp, Artificial Sequence
  Antisense compound
aagctggttcaatctgtcta

SEQ ID NO: 28798 - DNA, 20 bp, Artificial Sequence
  Antisense compound
caagctggttcaatctgtct

SEQ ID NO: 28799 - DNA, 20 bp, Artificial Sequence
  Antisense compound
tcaagctggttcaatctgtc

SEQ ID NO: 28800 - DNA, 20 bp, Artificial Sequence
  Antisense compound
ctcaagctggttcaatctgt

SEQ ID NO: 28801 - DNA, 20 bp, Artificial Sequence
  Antisense compound
tctcaagctggttcaatctg

SEQ ID NO: 28802 - DNA, 20 bp, Artificial Sequence
  Antisense compound
ctctcaagctggttcaatct

SEQ ID NO: 28803 - DNA, 20 bp, Artificial Sequence
  Antisense compound
gctctcaagctggttcaatc

SEQ ID NO: 28804 - DNA, 20 bp, Artificial Sequence
  Antisense compound
tgctctcaagctggttcaat

SEQ ID NO: 28805 - DNA, 20 bp, Artificial Sequence
  Antisense compound
ttgctctcaagctggttcaa

SEQ ID NO: 28806 - DNA, 20 bp, Artificial Sequence
  Antisense compound
tttgctctcaagctggttca

SEQ ID NO: 28807 - DNA, 20 bp, Artificial Sequence
  Antisense compound
ctttgctctcaagctggttc

SEQ ID NO: 28808 - DNA, 20 bp, Artificial Sequence
  Antisense compound
actttgctctcaagctggtt

SEQ ID NO: 28809 - DNA, 20 bp, Artificial Sequence
  Antisense compound
aactttgctctcaagctggt

SEQ ID NO: 28810 - DNA, 20 bp, Artificial Sequence
  Antisense compound
aaactttgctctcaagctgg

SEQ ID NO: 28811 - DNA, 20 bp, Artificial Sequence
  Antisense compound
gaaactttgctctcaagctg

SEQ ID NO: 28812 - DNA, 20 bp, Artificial Sequence
  Antisense compound
agaaactttgctctcaagct

SEQ ID NO: 28813 - DNA, 20 bp, Artificial Sequence
  Antisense compound
cagaaactttgctctcaagc

SEQ ID NO: 28814 - DNA, 20 bp, Artificial Sequence
  Antisense compound
ccagaaactttgctctcaag

SEQ ID NO: 28815 - DNA, 20 bp, Artificial Sequence
  Antisense compound
accagaaactttgctctcaa

SEQ ID NO: 28816 - DNA, 20 bp, Artificial Sequence
  Antisense compound
taccagaaactttgctctca

SEQ ID NO: 28817 - DNA, 20 bp, Artificial Sequence
  Antisense compound
ttaccagaaactttgctctc

SEQ ID NO: 28818 - DNA, 20 bp, Artificial Sequence
  Antisense compound
tttaccagaaactttgctct

SEQ ID NO: 28819 - DNA, 20 bp, Artificial Sequence
  Antisense compound
ctttaccagaaactttgctc

SEQ ID NO: 28820 - DNA, 20 bp, Artificial Sequence
  Antisense compound
cctttaccagaaactttgct

SEQ ID NO: 28821 - DNA, 20 bp, Artificial Sequence
  Antisense compound
gcctttaccagaaactttgc

SEQ ID NO: 28822 - DNA, 20 bp, Artificial Sequence
  Antisense compound
ggcctttaccagaaactttg

SEQ ID NO: 28823 - DNA, 20 bp, Artificial Sequence
  Antisense compound
tggcctttaccagaaacttt

SEQ ID NO: 28824 - DNA, 20 bp, Artificial Sequence
  Antisense compound
ttggcctttaccagaaactt

SEQ ID NO: 28825 - DNA, 20 bp, Artificial Sequence
  Antisense compound
gttggcctttaccagaaact

SEQ ID NO: 28826 - DNA, 20 bp, Artificial Sequence
  Antisense compound
tgttggcctttaccagaaac

SEQ ID NO: 28827 - DNA, 20 bp, Artificial Sequence
  Antisense compound
ttgttggcctttaccagaaa

SEQ ID NO: 28828 - DNA, 20 bp, Artificial Sequence
  Antisense compound
gttgttggcctttaccagaa

SEQ ID NO: 28829 - DNA, 20 bp, Artificial Sequence
  Antisense compound
tgttgttggcctttaccaga

SEQ ID NO: 28830 - DNA, 20 bp, Artificial Sequence
  Antisense compound
ttgttgttggcctttaccag

SEQ ID NO: 28831 - DNA, 20 bp, Artificial Sequence
  Antisense compound
gttgttgttggcctttacca

SEQ ID NO: 28832 - DNA, 20 bp, Artificial Sequence
  Antisense compound
tgttgttgttggcctttacc

SEQ ID NO: 28833 - DNA, 20 bp, Artificial Sequence
  Antisense compound
ttgttgttgttggcctttac

SEQ ID NO: 28834 - DNA, 20 bp, Artificial Sequence
  Antisense compound
cttgttgttgttggccttta

SEQ ID NO: 28835 - DNA, 20 bp, Artificial Sequence
  Antisense compound
ccttgttgttgttggccttt

SEQ ID NO: 28836 - DNA, 20 bp, Artificial Sequence
  Antisense compound
gccttgttgttgttggcctt

SEQ ID NO: 28837 - DNA, 20 bp, Artificial Sequence
  Antisense compound
ggccttgttgttgttggcct

SEQ ID NO: 28838 - DNA, 20 bp, Artificial Sequence
  Antisense compound
tggccttgttgttgttggcc

SEQ ID NO: 28839 - DNA, 20 bp, Artificial Sequence
  Antisense compound
ttggccttgttgttgttggc

SEQ ID NO: 28840 - DNA, 20 bp, Artificial Sequence
  Antisense compound
tttggccttgttgttgttgg

SEQ ID NO: 28841 - DNA, 20 bp, Artificial Sequence
  Antisense compound
gtttggccttgttgttgttg

SEQ ID NO: 28842 - DNA, 20 bp, Artificial Sequence
  Antisense compound
agtttggccttgttgttgtt

SEQ ID NO: 28843 - DNA, 20 bp, Artificial Sequence
  Antisense compound
cagtttggccttgttgttgt

SEQ ID NO: 28844 - DNA, 20 bp, Artificial Sequence
  Antisense compound
acagtttggccttgttgttg

SEQ ID NO: 28845 - DNA, 20 bp, Artificial Sequence
  Antisense compound
gacagtttggccttgttgtt

SEQ ID NO: 28846 - DNA, 20 bp, Artificial Sequence
  Antisense compound
tgacagtttggccttgttgt

SEQ ID NO: 28847 - DNA, 20 bp, Artificial Sequence
  Antisense compound
gtgacagtttggccttgttg

SEQ ID NO: 28848 - DNA, 20 bp, Artificial Sequence
  Antisense compound
agtgacagtttggccttgtt

SEQ ID NO: 28849 - DNA, 20 bp, Artificial Sequence
  Antisense compound
tagtgacagtttggccttgt

SEQ ID NO: 28850 - DNA, 20 bp, Artificial Sequence
  Antisense compound
ttagtgacagtttggccttg

SEQ ID NO: 28851 - DNA, 20 bp, Artificial Sequence
  Antisense compound
cttagtgacagtttggcctt

SEQ ID NO: 28852 - DNA, 20 bp, Artificial Sequence
  Antisense compound
tcttagtgacagtttggcct

SEQ ID NO: 28853 - DNA, 20 bp, Artificial Sequence
  Antisense compound
ttcttagtgacagtttggcc

SEQ ID NO: 28854 - DNA, 20 bp, Artificial Sequence
  Antisense compound
tttcttagtgacagtttggc

SEQ ID NO: 28855 - DNA, 20 bp, Artificial Sequence
  Antisense compound
atttcttagtgacagtttgg

SEQ ID NO: 28856 - DNA, 20 bp, Artificial Sequence
  Antisense compound
gatttcttagtgacagtttg

SEQ ID NO: 28857 - DNA, 20 bp, Artificial Sequence
  Antisense compound
agatttcttagtgacagttt

SEQ ID NO: 28858 - DNA, 20 bp, Artificial Sequence
  Antisense compound
cagatttcttagtgacagtt

SEQ ID NO: 28859 - DNA, 20 bp, Artificial Sequence
  Antisense compound
gcagatttcttagtgacagt

SEQ ID NO: 28860 - DNA, 20 bp, Artificial Sequence
  Antisense compound
agcagatttcttagtgacag

SEQ ID NO: 28861 - DNA, 20 bp, Artificial Sequence
  Antisense compound
cagcagatttcttagtgaca

SEQ ID NO: 28862 - DNA, 20 bp, Artificial Sequence
  Antisense compound
gcagcagatttcttagtgac

SEQ ID NO: 28863 - DNA, 20 bp, Artificial Sequence
  Antisense compound
agcagcagatttcttagtga

SEQ ID NO: 28864 - DNA, 20 bp, Artificial Sequence
  Antisense compound
cagcagcagatttcttagtg

SEQ ID NO: 28865 - DNA, 20 bp, Artificial Sequence
  Antisense compound
tcagcagcagatttcttagt

SEQ ID NO: 28866 - DNA, 20 bp, Artificial Sequence
  Antisense compound
ctcagcagcagatttcttag

SEQ ID NO: 28867 - DNA, 20 bp, Artificial Sequence
  Antisense compound
cctcagcagcagatttctta

SEQ ID NO: 28868 - DNA, 20 bp, Artificial Sequence
  Antisense compound
gcctcagcagcagatttctt

SEQ ID NO: 28869 - DNA, 20 bp, Artificial Sequence
  Antisense compound
tgcctcagcagcagatttct

SEQ ID NO: 28870 - DNA, 20 bp, Artificial Sequence
  Antisense compound
atgcctcagcagcagatttc

SEQ ID NO: 28871 - DNA, 20 bp, Artificial Sequence
  Antisense compound
gatgcctcagcagcagattt

SEQ ID NO: 28872 - DNA, 20 bp, Artificial Sequence
  Antisense compound
agatgcctcagcagcagatt

SEQ ID NO: 28873 - DNA, 20 bp, Artificial Sequence
  Antisense compound
tagatgcctcagcagcagat

SEQ ID NO: 28874 - DNA, 20 bp, Artificial Sequence
  Antisense compound
ttagatgcctcagcagcaga

SEQ ID NO: 28875 - DNA, 20 bp, Artificial Sequence
  Antisense compound
tttagatgcctcagcagcag

SEQ ID NO: 28876 - DNA, 20 bp, Artificial Sequence
  Antisense compound
ttttagatgcctcagcagca

SEQ ID NO: 28877 - DNA, 20 bp, Artificial Sequence
  Antisense compound
tttttagatgcctcagcagc

SEQ ID NO: 28878 - DNA, 20 bp, Artificial Sequence
  Antisense compound
ctttttagatgcctcagcag

SEQ ID NO: 28879 - DNA, 20 bp, Artificial Sequence
  Antisense compound
gctttttagatgcctcagca

SEQ ID NO: 28880 - DNA, 20 bp, Artificial Sequence
  Antisense compound
ggctttttagatgcctcagc

SEQ ID NO: 28881 - DNA, 20 bp, Artificial Sequence
  Antisense compound
aggctttttagatgcctcag

SEQ ID NO: 28882 - DNA, 20 bp, Artificial Sequence
  Antisense compound
gaggctttttagatgcctca

SEQ ID NO: 28883 - DNA, 20 bp, Artificial Sequence
  Antisense compound
cgaggctttttagatgcctc

SEQ ID NO: 28884 - DNA, 20 bp, Artificial Sequence
  Antisense compound
gcgaggctttttagatgcct

SEQ ID NO: 28885 - DNA, 20 bp, Artificial Sequence
  Antisense compound
ggcgaggctttttagatgcc

SEQ ID NO: 28886 - DNA, 20 bp, Artificial Sequence
  Antisense compound
tggcgaggctttttagatgc

SEQ ID NO: 28887 - DNA, 20 bp, Artificial Sequence
  Antisense compound
ttggcgaggctttttagatg

SEQ ID NO: 28888 - DNA, 20 bp, Artificial Sequence
  Antisense compound
tttggcgaggctttttagat

SEQ ID NO: 28889 - DNA, 20 bp, Artificial Sequence
  Antisense compound
ttttggcgaggctttttaga

SEQ ID NO: 28890 - DNA, 20 bp, Artificial Sequence
  Antisense compound
tttttggcgaggctttttag

SEQ ID NO: 28891 - DNA, 20 bp, Artificial Sequence
  Antisense compound
gtttttggcgaggcttttta

SEQ ID NO: 28892 - DNA, 20 bp, Artificial Sequence
  Antisense compound
cgtttttggcgaggcttttt

SEQ ID NO: 28893 - DNA, 20 bp, Artificial Sequence
  Antisense compound
acgtttttggcgaggctttt

SEQ ID NO: 28894 - DNA, 20 bp, Artificial Sequence
  Antisense compound
tacgtttttggcgaggcttt

SEQ ID NO: 28895 - DNA, 20 bp, Artificial Sequence
  Antisense compound
gtacgtttttggcgaggctt

SEQ ID NO: 28896 - DNA, 20 bp, Artificial Sequence
  Antisense compound
agtacgtttttggcgaggct

SEQ ID NO: 28897 - DNA, 20 bp, Artificial Sequence
  Antisense compound
cagtacgtttttggcgaggc

SEQ ID NO: 28898 - DNA, 20 bp, Artificial Sequence
  Antisense compound
gcagtacgtttttggcgagg

SEQ ID NO: 28899 - DNA, 20 bp, Artificial Sequence
  Antisense compound
ggcagtacgtttttggcgag

SEQ ID NO: 28900 - DNA, 20 bp, Artificial Sequence
  Antisense compound
tggcagtacgtttttggcga

SEQ ID NO: 28901 - DNA, 20 bp, Artificial Sequence
  Antisense compound
gtggcagtacgtttttggcg

SEQ ID NO: 28902 - DNA, 20 bp, Artificial Sequence
  Antisense compound
tgtggcagtacgtttttggc

SEQ ID NO: 28903 - DNA, 20 bp, Artificial Sequence
  Antisense compound
ttgtggcagtacgtttttgg

SEQ ID NO: 28904 - DNA, 20 bp, Artificial Sequence
  Antisense compound
tttgtggcagtacgtttttg

SEQ ID NO: 28905 - DNA, 20 bp, Artificial Sequence
  Antisense compound
ttttgtggcagtacgttttt

SEQ ID NO: 28906 - DNA, 20 bp, Artificial Sequence
  Antisense compound
gttttgtggcagtacgtttt

SEQ ID NO: 28907 - DNA, 20 bp, Artificial Sequence
  Antisense compound
tgttttgtggcagtacgttt

SEQ ID NO: 28908 - DNA, 20 bp, Artificial Sequence
  Antisense compound
ctgttttgtggcagtacgtt

SEQ ID NO: 28909 - DNA, 20 bp, Artificial Sequence
  Antisense compound
actgttttgtggcagtacgt

SEQ ID NO: 28910 - DNA, 20 bp, Artificial Sequence
  Antisense compound
tactgttttgtggcagtacg

SEQ ID NO: 28911 - DNA, 20 bp, Artificial Sequence
  Antisense compound
gtactgttttgtggcagtac

SEQ ID NO: 28912 - DNA, 20 bp, Artificial Sequence
  Antisense compound
tgtactgttttgtggcagta

SEQ ID NO: 28913 - DNA, 20 bp, Artificial Sequence
  Antisense compound
ttgtactgttttgtggcagt

SEQ ID NO: 28914 - DNA, 20 bp, Artificial Sequence
  Antisense compound
gttgtactgttttgtggcag

SEQ ID NO: 28915 - DNA, 20 bp, Artificial Sequence
  Antisense compound
cgttgtactgttttgtggca

SEQ ID NO: 28916 - DNA, 20 bp, Artificial Sequence
  Antisense compound
acgttgtactgttttgtggc

SEQ ID NO: 28917 - DNA, 20 bp, Artificial Sequence
  Antisense compound
gacgttgtactgttttgtgg

SEQ ID NO: 28918 - DNA, 20 bp, Artificial Sequence
  Antisense compound
tgacgttgtactgttttgtg

SEQ ID NO: 28919 - DNA, 20 bp, Artificial Sequence
  Antisense compound
gtgacgttgtactgttttgt

SEQ ID NO: 28920 - DNA, 20 bp, Artificial Sequence
  Antisense compound
agtgacgttgtactgttttg

SEQ ID NO: 28921 - DNA, 20 bp, Artificial Sequence
  Antisense compound
gagtgacgttgtactgtttt

SEQ ID NO: 28922 - DNA, 20 bp, Artificial Sequence
  Antisense compound
tgagtgacgttgtactgttt

SEQ ID NO: 28923 - DNA, 20 bp, Artificial Sequence
  Antisense compound
ttgagtgacgttgtactgtt

SEQ ID NO: 28924 - DNA, 20 bp, Artificial Sequence
  Antisense compound
cttgagtgacgttgtactgt

SEQ ID NO: 28925 - DNA, 20 bp, Artificial Sequence
  Antisense compound
gcttgagtgacgttgtactg

SEQ ID NO: 28926 - DNA, 20 bp, Artificial Sequence
  Antisense compound
tgcttgagtgacgttgtact

SEQ ID NO: 28927 - DNA, 20 bp, Artificial Sequence
  Antisense compound
atgcttgagtgacgttgtac

SEQ ID NO: 28928 - DNA, 20 bp, Artificial Sequence
  Antisense compound
aatgcttgagtgacgttgta

SEQ ID NO: 28929 - DNA, 20 bp, Artificial Sequence
  Antisense compound
aaatgcttgagtgacgttgt

SEQ ID NO: 28930 - DNA, 20 bp, Artificial Sequence
  Antisense compound
caaatgcttgagtgacgttg

SEQ ID NO: 28931 - DNA, 20 bp, Artificial Sequence
  Antisense compound
ccaaatgcttgagtgacgtt

SEQ ID NO: 28932 - DNA, 20 bp, Artificial Sequence
  Antisense compound
cccaaatgcttgagtgacgt

SEQ ID NO: 28933 - DNA, 20 bp, Artificial Sequence
  Antisense compound
tcccaaatgcttgagtgacg

SEQ ID NO: 28934 - DNA, 20 bp, Artificial Sequence
  Antisense compound
ctcccaaatgcttgagtgac

SEQ ID NO: 28935 - DNA, 20 bp, Artificial Sequence
  Antisense compound
tctcccaaatgcttgagtga

SEQ ID NO: 28936 - DNA, 20 bp, Artificial Sequence
  Antisense compound
gtctcccaaatgcttgagtg

SEQ ID NO: 28937 - DNA, 20 bp, Artificial Sequence
  Antisense compound
cgtctcccaaatgcttgagt

SEQ ID NO: 28938 - DNA, 20 bp, Artificial Sequence
  Antisense compound
acgtctcccaaatgcttgag

SEQ ID NO: 28939 - DNA, 20 bp, Artificial Sequence
  Antisense compound
cacgtctcccaaatgcttga

SEQ ID NO: 28940 - DNA, 20 bp, Artificial Sequence
  Antisense compound
ccacgtctcccaaatgcttg

SEQ ID NO: 28941 - DNA, 20 bp, Artificial Sequence
  Antisense compound
accacgtctcccaaatgctt

SEQ ID NO: 28942 - DNA, 20 bp, Artificial Sequence
  Antisense compound
gaccacgtctcccaaatgct

SEQ ID NO: 28943 - DNA, 20 bp, Artificial Sequence
  Antisense compound
ggaccacgtctcccaaatgc

SEQ ID NO: 28944 - DNA, 20 bp, Artificial Sequence
  Antisense compound
tggaccacgtctcccaaatg

SEQ ID NO: 28945 - DNA, 20 bp, Artificial Sequence
  Antisense compound
ctggaccacgtctcccaaat

SEQ ID NO: 28946 - DNA, 20 bp, Artificial Sequence
  Antisense compound
tctggaccacgtctcccaaa

SEQ ID NO: 28947 - DNA, 20 bp, Artificial Sequence
  Antisense compound
ttctggaccacgtctcccaa

SEQ ID NO: 28948 - DNA, 20 bp, Artificial Sequence
  Antisense compound
gttctggaccacgtctccca

SEQ ID NO: 28949 - DNA, 20 bp, Artificial Sequence
  Antisense compound
tgttctggaccacgtctccc

SEQ ID NO: 28950 - DNA, 20 bp, Artificial Sequence
  Antisense compound
ttgttctggaccacgtctcc

SEQ ID NO: 28951 - DNA, 20 bp, Artificial Sequence
  Antisense compound
tttgttctggaccacgtctc

SEQ ID NO: 28952 - DNA, 20 bp, Artificial Sequence
  Antisense compound
gtttgttctggaccacgtct

SEQ ID NO: 28953 - DNA, 20 bp, Artificial Sequence
  Antisense compound
ggtttgttctggaccacgtc

SEQ ID NO: 28954 - DNA, 20 bp, Artificial Sequence
  Antisense compound
gggtttgttctggaccacgt

SEQ ID NO: 28955 - DNA, 20 bp, Artificial Sequence
  Antisense compound
tgggtttgttctggaccacg

SEQ ID NO: 28956 - DNA, 20 bp, Artificial Sequence
  Antisense compound
ttgggtttgttctggaccac

SEQ ID NO: 28957 - DNA, 20 bp, Artificial Sequence
  Antisense compound
cttgggtttgttctggacca

SEQ ID NO: 28958 - DNA, 20 bp, Artificial Sequence
  Antisense compound
ccttgggtttgttctggacc

SEQ ID NO: 28959 - DNA, 20 bp, Artificial Sequence
  Antisense compound
tccttgggtttgttctggac

SEQ ID NO: 28960 - DNA, 20 bp, Artificial Sequence
  Antisense compound
ttccttgggtttgttctgga

SEQ ID NO: 28961 - DNA, 20 bp, Artificial Sequence
  Antisense compound
tttccttgggtttgttctgg

SEQ ID NO: 28962 - DNA, 20 bp, Artificial Sequence
  Antisense compound
atttccttgggtttgttctg

SEQ ID NO: 28963 - DNA, 20 bp, Artificial Sequence
  Antisense compound
aatttccttgggtttgttct

SEQ ID NO: 28964 - DNA, 20 bp, Artificial Sequence
  Antisense compound
aaatttccttgggtttgttc

SEQ ID NO: 28965 - DNA, 20 bp, Artificial Sequence
  Antisense compound
gaaatttccttgggtttgtt

SEQ ID NO: 28966 - DNA, 20 bp, Artificial Sequence
  Antisense compound
cgaaatttccttgggtttgt

SEQ ID NO: 28967 - DNA, 20 bp, Artificial Sequence
  Antisense compound
ccgaaatttccttgggtttg

SEQ ID NO: 28968 - DNA, 20 bp, Artificial Sequence
  Antisense compound
cccgaaatttccttgggttt

SEQ ID NO: 28969 - DNA, 20 bp, Artificial Sequence
  Antisense compound
ccccgaaatttccttgggtt

SEQ ID NO: 28970 - DNA, 20 bp, Artificial Sequence
  Antisense compound
tccccgaaatttccttgggt

SEQ ID NO: 28971 - DNA, 20 bp, Artificial Sequence
  Antisense compound
gtccccgaaatttccttggg

SEQ ID NO: 28972 - DNA, 20 bp, Artificial Sequence
  Antisense compound
ggtccccgaaatttccttgg

SEQ ID NO: 28973 - DNA, 20 bp, Artificial Sequence
  Antisense compound
tggtccccgaaatttccttg

SEQ ID NO: 28974 - DNA, 20 bp, Artificial Sequence
  Antisense compound
ttggtccccgaaatttcctt

SEQ ID NO: 28975 - DNA, 20 bp, Artificial Sequence
  Antisense compound
cttggtccccgaaatttcct

SEQ ID NO: 28976 - DNA, 20 bp, Artificial Sequence
  Antisense compound
tcttggtccccgaaatttcc

SEQ ID NO: 28977 - DNA, 20 bp, Artificial Sequence
  Antisense compound
gtcttggtccccgaaatttc

SEQ ID NO: 28978 - DNA, 20 bp, Artificial Sequence
  Antisense compound
ggtcttggtccccgaaattt

SEQ ID NO: 28979 - DNA, 20 bp, Artificial Sequence
  Antisense compound
aggtcttggtccccgaaatt

SEQ ID NO: 28980 - DNA, 20 bp, Artificial Sequence
  Antisense compound
taggtcttggtccccgaaat

SEQ ID NO: 28981 - DNA, 20 bp, Artificial Sequence
  Antisense compound
ttaggtcttggtccccgaaa

SEQ ID NO: 28982 - DNA, 20 bp, Artificial Sequence
  Antisense compound
attaggtcttggtccccgaa

SEQ ID NO: 28983 - DNA, 20 bp, Artificial Sequence
  Antisense compound
gattaggtcttggtccccga

SEQ ID NO: 28984 - DNA, 20 bp, Artificial Sequence
  Antisense compound
tgattaggtcttggtccccg

SEQ ID NO: 28985 - DNA, 20 bp, Artificial Sequence
  Antisense compound
ctgattaggtcttggtcccc

SEQ ID NO: 28986 - DNA, 20 bp, Artificial Sequence
  Antisense compound
tctgattaggtcttggtccc

SEQ ID NO: 28987 - DNA, 20 bp, Artificial Sequence
  Antisense compound
gtctgattaggtcttggtcc

SEQ ID NO: 28988 - DNA, 20 bp, Artificial Sequence
  Antisense compound
tgtctgattaggtcttggtc

SEQ ID NO: 28989 - DNA, 20 bp, Artificial Sequence
  Antisense compound
ttgtctgattaggtcttggt

SEQ ID NO: 28990 - DNA, 20 bp, Artificial Sequence
  Antisense compound
cttgtctgattaggtcttgg

SEQ ID NO: 28991 - DNA, 20 bp, Artificial Sequence
  Antisense compound
ccttgtctgattaggtcttg

SEQ ID NO: 28992 - DNA, 20 bp, Artificial Sequence
  Antisense compound
tccttgtctgattaggtctt

SEQ ID NO: 28993 - DNA, 20 bp, Artificial Sequence
  Antisense compound
ttccttgtctgattaggtct

SEQ ID NO: 28994 - DNA, 20 bp, Artificial Sequence
  Antisense compound
gttccttgtctgattaggtc

SEQ ID NO: 28995 - DNA, 20 bp, Artificial Sequence
  Antisense compound
agttccttgtctgattaggt

SEQ ID NO: 28996 - DNA, 20 bp, Artificial Sequence
  Antisense compound
cagttccttgtctgattagg

SEQ ID NO: 28997 - DNA, 20 bp, Artificial Sequence
  Antisense compound
tcagttccttgtctgattag

SEQ ID NO: 28998 - DNA, 20 bp, Artificial Sequence
  Antisense compound
atcagttccttgtctgatta

SEQ ID NO: 28999 - DNA, 20 bp, Artificial Sequence
  Antisense compound
aatcagttccttgtctgatt

SEQ ID NO: 29000 - DNA, 20 bp, Artificial Sequence
  Antisense compound
taatcagttccttgtctgat

SEQ ID NO: 29001 - DNA, 20 bp, Artificial Sequence
  Antisense compound
gtaatcagttccttgtctga

SEQ ID NO: 29002 - DNA, 20 bp, Artificial Sequence
  Antisense compound
tgtaatcagttccttgtctg

SEQ ID NO: 29003 - DNA, 20 bp, Artificial Sequence
  Antisense compound
ttgtaatcagttccttgtct

SEQ ID NO: 29004 - DNA, 20 bp, Artificial Sequence
  Antisense compound
tttgtaatcagttccttgtc

SEQ ID NO: 29005 - DNA, 20 bp, Artificial Sequence
  Antisense compound
gtttgtaatcagttccttgt

SEQ ID NO: 29006 - DNA, 20 bp, Artificial Sequence
  Antisense compound
tgtttgtaatcagttccttg

SEQ ID NO: 29007 - DNA, 20 bp, Artificial Sequence
  Antisense compound
atgtttgtaatcagttcctt

SEQ ID NO: 29008 - DNA, 20 bp, Artificial Sequence
  Antisense compound
aatgtttgtaatcagttcct

SEQ ID NO: 29009 - DNA, 20 bp, Artificial Sequence
  Antisense compound
caatgtttgtaatcagttcc

SEQ ID NO: 29010 - DNA, 20 bp, Artificial Sequence
  Antisense compound
ccaatgtttgtaatcagttc

SEQ ID NO: 29011 - DNA, 20 bp, Artificial Sequence
  Antisense compound
gccaatgtttgtaatcagtt

SEQ ID NO: 29012 - DNA, 20 bp, Artificial Sequence
  Antisense compound
ggccaatgtttgtaatcagt

SEQ ID NO: 29013 - DNA, 20 bp, Artificial Sequence
  Antisense compound
cggccaatgtttgtaatcag

SEQ ID NO: 29014 - DNA, 20 bp, Artificial Sequence
  Antisense compound
gcggccaatgtttgtaatca

SEQ ID NO: 29015 - DNA, 20 bp, Artificial Sequence
  Antisense compound
tgcggccaatgtttgtaatc

SEQ ID NO: 29016 - DNA, 20 bp, Artificial Sequence
  Antisense compound
ttgcggccaatgtttgtaat

SEQ ID NO: 29017 - DNA, 20 bp, Artificial Sequence
  Antisense compound
tttgcggccaatgtttgtaa

SEQ ID NO: 29018 - DNA, 20 bp, Artificial Sequence
  Antisense compound
atttgcggccaatgtttgta

SEQ ID NO: 29019 - DNA, 20 bp, Artificial Sequence
  Antisense compound
aatttgcggccaatgtttgt

SEQ ID NO: 29020 - DNA, 20 bp, Artificial Sequence
  Antisense compound
caatttgcggccaatgtttg

SEQ ID NO: 29021 - DNA, 20 bp, Artificial Sequence
  Antisense compound
gcaatttgcggccaatgttt

SEQ ID NO: 29022 - DNA, 20 bp, Artificial Sequence
  Antisense compound
tgcaatttgcggccaatgtt

SEQ ID NO: 29023 - DNA, 20 bp, Artificial Sequence
  Antisense compound
gtgcaatttgcggccaatgt

SEQ ID NO: 29024 - DNA, 20 bp, Artificial Sequence
  Antisense compound
tgtgcaatttgcggccaatg

SEQ ID NO: 29025 - DNA, 20 bp, Artificial Sequence
  Antisense compound
ttgtgcaatttgcggccaat

SEQ ID NO: 29026 - DNA, 20 bp, Artificial Sequence
  Antisense compound
attgtgcaatttgcggccaa

SEQ ID NO: 29027 - DNA, 20 bp, Artificial Sequence
  Antisense compound
aattgtgcaatttgcggcca

SEQ ID NO: 29028 - DNA, 20 bp, Artificial Sequence
  Antisense compound
aaattgtgcaatttgcggcc

SEQ ID NO: 29029 - DNA, 20 bp, Artificial Sequence
  Antisense compound
caaattgtgcaatttgcggc

SEQ ID NO: 29030 - DNA, 20 bp, Artificial Sequence
  Antisense compound
gcaaattgtgcaatttgcgg

SEQ ID NO: 29031 - DNA, 20 bp, Artificial Sequence
  Antisense compound
agcaaattgtgcaatttgcg

SEQ ID NO: 29032 - DNA, 20 bp, Artificial Sequence
  Antisense compound
gagcaaattgtgcaatttgc

SEQ ID NO: 29033 - DNA, 20 bp, Artificial Sequence
  Antisense compound
ggagcaaattgtgcaatttg

SEQ ID NO: 29034 - DNA, 20 bp, Artificial Sequence
  Antisense compound
tggagcaaattgtgcaattt

SEQ ID NO: 29035 - DNA, 20 bp, Artificial Sequence
  Antisense compound
ttggagcaaattgtgcaatt

SEQ ID NO: 29036 - DNA, 20 bp, Artificial Sequence
  Antisense compound
cttggagcaaattgtgcaat

SEQ ID NO: 29037 - DNA, 20 bp, Artificial Sequence
  Antisense compound
acttggagcaaattgtgcaa

SEQ ID NO: 29038 - DNA, 20 bp, Artificial Sequence
  Antisense compound
cacttggagcaaattgtgca

SEQ ID NO: 29039 - DNA, 20 bp, Artificial Sequence
  Antisense compound
gcacttggagcaaattgtgc

SEQ ID NO: 29040 - DNA, 20 bp, Artificial Sequence
  Antisense compound
ggcacttggagcaaattgtg

SEQ ID NO: 29041 - DNA, 20 bp, Artificial Sequence
  Antisense compound
aggcacttggagcaaattgt

SEQ ID NO: 29042 - DNA, 20 bp, Artificial Sequence
  Antisense compound
gaggcacttggagcaaattg

SEQ ID NO: 29043 - DNA, 20 bp, Artificial Sequence
  Antisense compound
agaggcacttggagcaaatt

SEQ ID NO: 29044 - DNA, 20 bp, Artificial Sequence
  Antisense compound
cagaggcacttggagcaaat

SEQ ID NO: 29045 - DNA, 20 bp, Artificial Sequence
  Antisense compound
gcagaggcacttggagcaaa

SEQ ID NO: 29046 - DNA, 20 bp, Artificial Sequence
  Antisense compound
tgcagaggcacttggagcaa

SEQ ID NO: 29047 - DNA, 20 bp, Artificial Sequence
  Antisense compound
atgcagaggcacttggagca

SEQ ID NO: 29048 - DNA, 20 bp, Artificial Sequence
  Antisense compound
aatgcagaggcacttggagc

SEQ ID NO: 29049 - DNA, 20 bp, Artificial Sequence
  Antisense compound
gaatgcagaggcacttggag

SEQ ID NO: 29050 - DNA, 20 bp, Artificial Sequence
  Antisense compound
agaatgcagaggcacttgga

SEQ ID NO: 29051 - DNA, 20 bp, Artificial Sequence
  Antisense compound
aagaatgcagaggcacttgg

SEQ ID NO: 29052 - DNA, 20 bp, Artificial Sequence
  Antisense compound
aaagaatgcagaggcacttg

SEQ ID NO: 29053 - DNA, 20 bp, Artificial Sequence
  Antisense compound
caaagaatgcagaggcactt

SEQ ID NO: 29054 - DNA, 20 bp, Artificial Sequence
  Antisense compound
ccaaagaatgcagaggcact

SEQ ID NO: 29055 - DNA, 20 bp, Artificial Sequence
  Antisense compound
tccaaagaatgcagaggcac

SEQ ID NO: 29056 - DNA, 20 bp, Artificial Sequence
  Antisense compound
ttccaaagaatgcagaggca

SEQ ID NO: 29057 - DNA, 20 bp, Artificial Sequence
  Antisense compound
attccaaagaatgcagaggc

SEQ ID NO: 29058 - DNA, 20 bp, Artificial Sequence
  Antisense compound
cattccaaagaatgcagagg

SEQ ID NO: 29059 - DNA, 20 bp, Artificial Sequence
  Antisense compound
acattccaaagaatgcagag

SEQ ID NO: 29060 - DNA, 20 bp, Artificial Sequence
  Antisense compound
gacattccaaagaatgcaga

SEQ ID NO: 29061 - DNA, 20 bp, Artificial Sequence
  Antisense compound
tgacattccaaagaatgcag

SEQ ID NO: 29062 - DNA, 20 bp, Artificial Sequence
  Antisense compound
gtgacattccaaagaatgca

SEQ ID NO: 29063 - DNA, 20 bp, Artificial Sequence
  Antisense compound
cgtgacattccaaagaatgc

SEQ ID NO: 29064 - DNA, 20 bp, Artificial Sequence
  Antisense compound
gcgtgacattccaaagaatg

SEQ ID NO: 29065 - DNA, 20 bp, Artificial Sequence
  Antisense compound
tgcgtgacattccaaagaat

SEQ ID NO: 29066 - DNA, 20 bp, Artificial Sequence
  Antisense compound
atgcgtgacattccaaagaa

SEQ ID NO: 29067 - DNA, 20 bp, Artificial Sequence
  Antisense compound
aatgcgtgacattccaaaga

SEQ ID NO: 29068 - DNA, 20 bp, Artificial Sequence
  Antisense compound
caatgcgtgacattccaaag

SEQ ID NO: 29069 - DNA, 20 bp, Artificial Sequence
  Antisense compound
ccaatgcgtgacattccaaa

SEQ ID NO: 29070 - DNA, 20 bp, Artificial Sequence
  Antisense compound
gccaatgcgtgacattccaa

SEQ ID NO: 29071 - DNA, 20 bp, Artificial Sequence
  Antisense compound
tgccaatgcgtgacattcca

SEQ ID NO: 29072 - DNA, 20 bp, Artificial Sequence
  Antisense compound
atgccaatgcgtgacattcc

SEQ ID NO: 29073 - DNA, 20 bp, Artificial Sequence
  Antisense compound
catgccaatgcgtgacattc

SEQ ID NO: 29074 - DNA, 20 bp, Artificial Sequence
  Antisense compound
ccatgccaatgcgtgacatt

SEQ ID NO: 29075 - DNA, 20 bp, Artificial Sequence
  Antisense compound
tccatgccaatgcgtgacat

SEQ ID NO: 29076 - DNA, 20 bp, Artificial Sequence
  Antisense compound
ttccatgccaatgcgtgaca

SEQ ID NO: 29077 - DNA, 20 bp, Artificial Sequence
  Antisense compound
cttccatgccaatgcgtgac

SEQ ID NO: 29078 - DNA, 20 bp, Artificial Sequence
  Antisense compound
acttccatgccaatgcgtga

SEQ ID NO: 29079 - DNA, 20 bp, Artificial Sequence
  Antisense compound
gacttccatgccaatgcgtg

SEQ ID NO: 29080 - DNA, 20 bp, Artificial Sequence
  Antisense compound
tgacttccatgccaatgcgt

SEQ ID NO: 29081 - DNA, 20 bp, Artificial Sequence
  Antisense compound
gtgacttccatgccaatgcg

SEQ ID NO: 29082 - DNA, 20 bp, Artificial Sequence
  Antisense compound
tgtgacttccatgccaatgc

SEQ ID NO: 29083 - DNA, 20 bp, Artificial Sequence
  Antisense compound
gtgtgacttccatgccaatg

SEQ ID NO: 29084 - DNA, 20 bp, Artificial Sequence
  Antisense compound
ggtgtgacttccatgccaat

SEQ ID NO: 29085 - DNA, 20 bp, Artificial Sequence
  Antisense compound
aggtgtgacttccatgccaa

SEQ ID NO: 29086 - DNA, 20 bp, Artificial Sequence
  Antisense compound
aaggtgtgacttccatgcca

SEQ ID NO: 29087 - DNA, 20 bp, Artificial Sequence
  Antisense compound
gaaggtgtgacttccatgcc

SEQ ID NO: 29088 - DNA, 20 bp, Artificial Sequence
  Antisense compound
cgaaggtgtgacttccatgc

SEQ ID NO: 29089 - DNA, 20 bp, Artificial Sequence
  Antisense compound
ccgaaggtgtgacttccatg

SEQ ID NO: 29090 - DNA, 20 bp, Artificial Sequence
  Antisense compound
cccgaaggtgtgacttccat

SEQ ID NO: 29091 - DNA, 20 bp, Artificial Sequence
  Antisense compound
tcccgaaggtgtgacttcca

SEQ ID NO: 29092 - DNA, 20 bp, Artificial Sequence
  Antisense compound
ttcccgaaggtgtgacttcc

SEQ ID NO: 29093 - DNA, 20 bp, Artificial Sequence
  Antisense compound
gttcccgaaggtgtgacttc

SEQ ID NO: 29094 - DNA, 20 bp, Artificial Sequence
  Antisense compound
tgttcccgaaggtgtgactt

SEQ ID NO: 29095 - DNA, 20 bp, Artificial Sequence
  Antisense compound
atgttcccgaaggtgtgact

SEQ ID NO: 29096 - DNA, 20 bp, Artificial Sequence
  Antisense compound
catgttcccgaaggtgtgac

SEQ ID NO: 29097 - DNA, 20 bp, Artificial Sequence
  Antisense compound
ccatgttcccgaaggtgtga

SEQ ID NO: 29098 - DNA, 20 bp, Artificial Sequence
  Antisense compound
gccatgttcccgaaggtgtg

SEQ ID NO: 29099 - DNA, 20 bp, Artificial Sequence
  Antisense compound
agccatgttcccgaaggtgt

SEQ ID NO: 29100 - DNA, 20 bp, Artificial Sequence
  Antisense compound
cagccatgttcccgaaggtg

SEQ ID NO: 29101 - DNA, 20 bp, Artificial Sequence
  Antisense compound
tcagccatgttcccgaaggt

SEQ ID NO: 29102 - DNA, 20 bp, Artificial Sequence
  Antisense compound
gtcagccatgttcccgaagg

SEQ ID NO: 29103 - DNA, 20 bp, Artificial Sequence
  Antisense compound
agtcagccatgttcccgaag

SEQ ID NO: 29104 - DNA, 20 bp, Artificial Sequence
  Antisense compound
aagtcagccatgttcccgaa

SEQ ID NO: 29105 - DNA, 20 bp, Artificial Sequence
  Antisense compound
taagtcagccatgttcccga

SEQ ID NO: 29106 - DNA, 20 bp, Artificial Sequence
  Antisense compound
ataagtcagccatgttcccg

SEQ ID NO: 29107 - DNA, 20 bp, Artificial Sequence
  Antisense compound
gataagtcagccatgttccc

SEQ ID NO: 29108 - DNA, 20 bp, Artificial Sequence
  Antisense compound
tgataagtcagccatgttcc

SEQ ID NO: 29109 - DNA, 20 bp, Artificial Sequence
  Antisense compound
atgataagtcagccatgttc

SEQ ID NO: 29110 - DNA, 20 bp, Artificial Sequence
  Antisense compound
catgataagtcagccatgtt

SEQ ID NO: 29111 - DNA, 20 bp, Artificial Sequence
  Antisense compound
ccatgataagtcagccatgt

SEQ ID NO: 29112 - DNA, 20 bp, Artificial Sequence
  Antisense compound
tccatgataagtcagccatg

SEQ ID NO: 29113 - DNA, 20 bp, Artificial Sequence
  Antisense compound
ctccatgataagtcagccat

SEQ ID NO: 29114 - DNA, 20 bp, Artificial Sequence
  Antisense compound
gctccatgataagtcagcca

SEQ ID NO: 29115 - DNA, 20 bp, Artificial Sequence
  Antisense compound
ggctccatgataagtcagcc

SEQ ID NO: 29116 - DNA, 20 bp, Artificial Sequence
  Antisense compound
tggctccatgataagtcagc

SEQ ID NO: 29117 - DNA, 20 bp, Artificial Sequence
  Antisense compound
atggctccatgataagtcag

SEQ ID NO: 29118 - DNA, 20 bp, Artificial Sequence
  Antisense compound
aatggctccatgataagtca

SEQ ID NO: 29119 - DNA, 20 bp, Artificial Sequence
  Antisense compound
taatggctccatgataagtc

SEQ ID NO: 29120 - DNA, 20 bp, Artificial Sequence
  Antisense compound
ttaatggctccatgataagt

SEQ ID NO: 29121 - DNA, 20 bp, Artificial Sequence
  Antisense compound
tttaatggctccatgataag

SEQ ID NO: 29122 - DNA, 20 bp, Artificial Sequence
  Antisense compound
atttaatggctccatgataa

SEQ ID NO: 29123 - DNA, 20 bp, Artificial Sequence
  Antisense compound
aatttaatggctccatgata

SEQ ID NO: 29124 - DNA, 20 bp, Artificial Sequence
  Antisense compound
caatttaatggctccatgat

SEQ ID NO: 29125 - DNA, 20 bp, Artificial Sequence
  Antisense compound
ccaatttaatggctccatga

SEQ ID NO: 29126 - DNA, 20 bp, Artificial Sequence
  Antisense compound
tccaatttaatggctccatg

SEQ ID NO: 29127 - DNA, 20 bp, Artificial Sequence
  Antisense compound
atccaatttaatggctccat

SEQ ID NO: 29128 - DNA, 20 bp, Artificial Sequence
  Antisense compound
catccaatttaatggctcca

SEQ ID NO: 29129 - DNA, 20 bp, Artificial Sequence
  Antisense compound
tcatccaatttaatggctcc

SEQ ID NO: 29130 - DNA, 20 bp, Artificial Sequence
  Antisense compound
gtcatccaatttaatggctc

SEQ ID NO: 29131 - DNA, 20 bp, Artificial Sequence
  Antisense compound
tgtcatccaatttaatggct

SEQ ID NO: 29132 - DNA, 20 bp, Artificial Sequence
  Antisense compound
ttgtcatccaatttaatggc

SEQ ID NO: 29133 - DNA, 20 bp, Artificial Sequence
  Antisense compound
tttgtcatccaatttaatgg

SEQ ID NO: 29134 - DNA, 20 bp, Artificial Sequence
  Antisense compound
ctttgtcatccaatttaatg

SEQ ID NO: 29135 - DNA, 20 bp, Artificial Sequence
  Antisense compound
tctttgtcatccaatttaat

SEQ ID NO: 29136 - DNA, 20 bp, Artificial Sequence
  Antisense compound
atctttgtcatccaatttaa

SEQ ID NO: 29137 - DNA, 20 bp, Artificial Sequence
  Antisense compound
gatctttgtcatccaattta

SEQ ID NO: 29138 - DNA, 20 bp, Artificial Sequence
  Antisense compound
ggatctttgtcatccaattt

SEQ ID NO: 29139 - DNA, 20 bp, Artificial Sequence
  Antisense compound
tggatctttgtcatccaatt

SEQ ID NO: 29140 - DNA, 20 bp, Artificial Sequence
  Antisense compound
gtggatctttgtcatccaat

SEQ ID NO: 29141 - DNA, 20 bp, Artificial Sequence
  Antisense compound
tgtggatctttgtcatccaa

SEQ ID NO: 29142 - DNA, 20 bp, Artificial Sequence
  Antisense compound
ttgtggatctttgtcatcca

SEQ ID NO: 29143 - DNA, 20 bp, Artificial Sequence
  Antisense compound
attgtggatctttgtcatcc

SEQ ID NO: 29144 - DNA, 20 bp, Artificial Sequence
  Antisense compound
aattgtggatctttgtcatc

SEQ ID NO: 29145 - DNA, 20 bp, Artificial Sequence
  Antisense compound
gaattgtggatctttgtcat

SEQ ID NO: 29146 - DNA, 20 bp, Artificial Sequence
  Antisense compound
tgaattgtggatctttgtca

SEQ ID NO: 29147 - DNA, 20 bp, Artificial Sequence
  Antisense compound
ttgaattgtggatctttgtc

SEQ ID NO: 29148 - DNA, 20 bp, Artificial Sequence
  Antisense compound
tttgaattgtggatctttgt

SEQ ID NO: 29149 - DNA, 20 bp, Artificial Sequence
  Antisense compound
ctttgaattgtggatctttg

SEQ ID NO: 29150 - DNA, 20 bp, Artificial Sequence
  Antisense compound
tctttgaattgtggatcttt

SEQ ID NO: 29151 - DNA, 20 bp, Artificial Sequence
  Antisense compound
gtctttgaattgtggatctt

SEQ ID NO: 29152 - DNA, 20 bp, Artificial Sequence
  Antisense compound
tgtctttgaattgtggatct

SEQ ID NO: 29153 - DNA, 20 bp, Artificial Sequence
  Antisense compound
ttgtctttgaattgtggatc

SEQ ID NO: 29154 - DNA, 20 bp, Artificial Sequence
  Antisense compound
gttgtctttgaattgtggat

SEQ ID NO: 29155 - DNA, 20 bp, Artificial Sequence
  Antisense compound
cgttgtctttgaattgtgga

SEQ ID NO: 29156 - DNA, 20 bp, Artificial Sequence
  Antisense compound
acgttgtctttgaattgtgg

SEQ ID NO: 29157 - DNA, 20 bp, Artificial Sequence
  Antisense compound
gacgttgtctttgaattgtg

SEQ ID NO: 29158 - DNA, 20 bp, Artificial Sequence
  Antisense compound
tgacgttgtctttgaattgt

SEQ ID NO: 29159 - DNA, 20 bp, Artificial Sequence
  Antisense compound
atgacgttgtctttgaattg

SEQ ID NO: 29160 - DNA, 20 bp, Artificial Sequence
  Antisense compound
tatgacgttgtctttgaatt

SEQ ID NO: 29161 - DNA, 20 bp, Artificial Sequence
  Antisense compound
gtatgacgttgtctttgaat

SEQ ID NO: 29162 - DNA, 20 bp, Artificial Sequence
  Antisense compound
agtatgacgttgtctttgaa

SEQ ID NO: 29163 - DNA, 20 bp, Artificial Sequence
  Antisense compound
cagtatgacgttgtctttga

SEQ ID NO: 29164 - DNA, 20 bp, Artificial Sequence
  Antisense compound
gcagtatgacgttgtctttg

SEQ ID NO: 29165 - DNA, 20 bp, Artificial Sequence
  Antisense compound
agcagtatgacgttgtcttt

SEQ ID NO: 29166 - DNA, 20 bp, Artificial Sequence
  Antisense compound
cagcagtatgacgttgtctt

SEQ ID NO: 29167 - DNA, 20 bp, Artificial Sequence
  Antisense compound
tcagcagtatgacgttgtct

SEQ ID NO: 29168 - DNA, 20 bp, Artificial Sequence
  Antisense compound
ttcagcagtatgacgttgtc

SEQ ID NO: 29169 - DNA, 20 bp, Artificial Sequence
  Antisense compound
gttcagcagtatgacgttgt

SEQ ID NO: 29170 - DNA, 20 bp, Artificial Sequence
  Antisense compound
tgttcagcagtatgacgttg

SEQ ID NO: 29171 - DNA, 20 bp, Artificial Sequence
  Antisense compound
ttgttcagcagtatgacgtt

SEQ ID NO: 29172 - DNA, 20 bp, Artificial Sequence
  Antisense compound
cttgttcagcagtatgacgt

SEQ ID NO: 29173 - DNA, 20 bp, Artificial Sequence
  Antisense compound
gcttgttcagcagtatgacg

SEQ ID NO: 29174 - DNA, 20 bp, Artificial Sequence
  Antisense compound
tgcttgttcagcagtatgac

SEQ ID NO: 29175 - DNA, 20 bp, Artificial Sequence
  Antisense compound
gtgcttgttcagcagtatga

SEQ ID NO: 29176 - DNA, 20 bp, Artificial Sequence
  Antisense compound
tgtgcttgttcagcagtatg

SEQ ID NO: 29177 - DNA, 20 bp, Artificial Sequence
  Antisense compound
atgtgcttgttcagcagtat

SEQ ID NO: 29178 - DNA, 20 bp, Artificial Sequence
  Antisense compound
aatgtgcttgttcagcagta

SEQ ID NO: 29179 - DNA, 20 bp, Artificial Sequence
  Antisense compound
caatgtgcttgttcagcagt

SEQ ID NO: 29180 - DNA, 20 bp, Artificial Sequence
  Antisense compound
tcaatgtgcttgttcagcag

SEQ ID NO: 29181 - DNA, 20 bp, Artificial Sequence
  Antisense compound
gtcaatgtgcttgttcagca

SEQ ID NO: 29182 - DNA, 20 bp, Artificial Sequence
  Antisense compound
cgtcaatgtgcttgttcagc

SEQ ID NO: 29183 - DNA, 20 bp, Artificial Sequence
  Antisense compound
gcgtcaatgtgcttgttcag

SEQ ID NO: 29184 - DNA, 20 bp, Artificial Sequence
  Antisense compound
tgcgtcaatgtgcttgttca

SEQ ID NO: 29185 - DNA, 20 bp, Artificial Sequence
  Antisense compound
atgcgtcaatgtgcttgttc

SEQ ID NO: 29186 - DNA, 20 bp, Artificial Sequence
  Antisense compound
tatgcgtcaatgtgcttgtt

SEQ ID NO: 29187 - DNA, 20 bp, Artificial Sequence
  Antisense compound
gtatgcgtcaatgtgcttgt

SEQ ID NO: 29188 - DNA, 20 bp, Artificial Sequence
  Antisense compound
tgtatgcgtcaatgtgcttg

SEQ ID NO: 29189 - DNA, 20 bp, Artificial Sequence
  Antisense compound
ttgtatgcgtcaatgtgctt

SEQ ID NO: 29190 - DNA, 20 bp, Artificial Sequence
  Antisense compound
tttgtatgcgtcaatgtgct

SEQ ID NO: 29191 - DNA, 20 bp, Artificial Sequence
  Antisense compound
ttttgtatgcgtcaatgtgc

SEQ ID NO: 29192 - DNA, 20 bp, Artificial Sequence
  Antisense compound
gttttgtatgcgtcaatgtg

SEQ ID NO: 29193 - DNA, 20 bp, Artificial Sequence
  Antisense compound
tgttttgtatgcgtcaatgt

SEQ ID NO: 29194 - DNA, 20 bp, Artificial Sequence
  Antisense compound
atgttttgtatgcgtcaatg

SEQ ID NO: 29195 - DNA, 20 bp, Artificial Sequence
  Antisense compound
aatgttttgtatgcgtcaat

SEQ ID NO: 29196 - DNA, 20 bp, Artificial Sequence
  Antisense compound
gaatgttttgtatgcgtcaa

SEQ ID NO: 29197 - DNA, 20 bp, Artificial Sequence
  Antisense compound
ggaatgttttgtatgcgtca

SEQ ID NO: 29198 - DNA, 20 bp, Artificial Sequence
  Antisense compound
gggaatgttttgtatgcgtc

SEQ ID NO: 29199 - DNA, 20 bp, Artificial Sequence
  Antisense compound
tgggaatgttttgtatgcgt

SEQ ID NO: 29200 - DNA, 20 bp, Artificial Sequence
  Antisense compound
gtgggaatgttttgtatgcg

SEQ ID NO: 29201 - DNA, 20 bp, Artificial Sequence
  Antisense compound
ggtgggaatgttttgtatgc

SEQ ID NO: 29202 - DNA, 20 bp, Artificial Sequence
  Antisense compound
tggtgggaatgttttgtatg

SEQ ID NO: 29203 - DNA, 20 bp, Artificial Sequence
  Antisense compound
ttggtgggaatgttttgtat

SEQ ID NO: 29204 - DNA, 20 bp, Artificial Sequence
  Antisense compound
gttggtgggaatgttttgta

SEQ ID NO: 29205 - DNA, 20 bp, Artificial Sequence
  Antisense compound
tgttggtgggaatgttttgt

SEQ ID NO: 29206 - DNA, 20 bp, Artificial Sequence
  Antisense compound
ctgttggtgggaatgttttg

SEQ ID NO: 29207 - DNA, 20 bp, Artificial Sequence
  Antisense compound
tctgttggtgggaatgtttt

SEQ ID NO: 29208 - DNA, 20 bp, Artificial Sequence
  Antisense compound
ctctgttggtgggaatgttt

SEQ ID NO: 29209 - DNA, 20 bp, Artificial Sequence
  Antisense compound
gctctgttggtgggaatgtt

SEQ ID NO: 29210 - DNA, 20 bp, Artificial Sequence
  Antisense compound
ggctctgttggtgggaatgt

SEQ ID NO: 29211 - DNA, 20 bp, Artificial Sequence
  Antisense compound
aggctctgttggtgggaatg

SEQ ID NO: 29212 - DNA, 20 bp, Artificial Sequence
  Antisense compound
taggctctgttggtgggaat

SEQ ID NO: 29213 - DNA, 20 bp, Artificial Sequence
  Antisense compound
ttaggctctgttggtgggaa

SEQ ID NO: 29214 - DNA, 20 bp, Artificial Sequence
  Antisense compound
tttaggctctgttggtggga

SEQ ID NO: 29215 - DNA, 20 bp, Artificial Sequence
  Antisense compound
ttttaggctctgttggtggg

SEQ ID NO: 29216 - DNA, 20 bp, Artificial Sequence
  Antisense compound
tttttaggctctgttggtgg

SEQ ID NO: 29217 - DNA, 20 bp, Artificial Sequence
  Antisense compound
ctttttaggctctgttggtg

SEQ ID NO: 29218 - DNA, 20 bp, Artificial Sequence
  Antisense compound
cctttttaggctctgttggt

SEQ ID NO: 29219 - DNA, 20 bp, Artificial Sequence
  Antisense compound
tcctttttaggctctgttgg

SEQ ID NO: 29220 - DNA, 20 bp, Artificial Sequence
  Antisense compound
gtcctttttaggctctgttg

SEQ ID NO: 29221 - DNA, 20 bp, Artificial Sequence
  Antisense compound
tgtcctttttaggctctgtt

SEQ ID NO: 29222 - DNA, 20 bp, Artificial Sequence
  Antisense compound
ttgtcctttttaggctctgt

SEQ ID NO: 29223 - DNA, 20 bp, Artificial Sequence
  Antisense compound
tttgtcctttttaggctctg

SEQ ID NO: 29224 - DNA, 20 bp, Artificial Sequence
  Antisense compound
ttttgtcctttttaggctct

SEQ ID NO: 29225 - DNA, 20 bp, Artificial Sequence
  Antisense compound
tttttgtcctttttaggctc

SEQ ID NO: 29226 - DNA, 20 bp, Artificial Sequence
  Antisense compound
ctttttgtcctttttaggct

SEQ ID NO: 29227 - DNA, 20 bp, Artificial Sequence
  Antisense compound
tctttttgtcctttttaggc

SEQ ID NO: 29228 - DNA, 20 bp, Artificial Sequence
  Antisense compound
ttctttttgtcctttttagg

SEQ ID NO: 29229 - DNA, 20 bp, Artificial Sequence
  Antisense compound
tttctttttgtcctttttag

SEQ ID NO: 29230 - DNA, 20 bp, Artificial Sequence
  Antisense compound
ttttctttttgtccttttta

SEQ ID NO: 29231 - DNA, 20 bp, Artificial Sequence
  Antisense compound
tttttctttttgtccttttt

SEQ ID NO: 29232 - DNA, 20 bp, Artificial Sequence
  Antisense compound
ctttttctttttgtcctttt

SEQ ID NO: 29233 - DNA, 20 bp, Artificial Sequence
  Antisense compound
tctttttctttttgtccttt

SEQ ID NO: 29234 - DNA, 20 bp, Artificial Sequence
  Antisense compound
gtctttttctttttgtcctt

SEQ ID NO: 29235 - DNA, 20 bp, Artificial Sequence
  Antisense compound
agtctttttctttttgtcct

SEQ ID NO: 29236 - DNA, 20 bp, Artificial Sequence
  Antisense compound
cagtctttttctttttgtcc

SEQ ID NO: 29237 - DNA, 20 bp, Artificial Sequence
  Antisense compound
tcagtctttttctttttgtc

SEQ ID NO: 29238 - DNA, 20 bp, Artificial Sequence
  Antisense compound
atcagtctttttctttttgt

SEQ ID NO: 29239 - DNA, 20 bp, Artificial Sequence
  Antisense compound
catcagtctttttctttttg

SEQ ID NO: 29240 - DNA, 20 bp, Artificial Sequence
  Antisense compound
tcatcagtctttttcttttt

SEQ ID NO: 29241 - DNA, 20 bp, Artificial Sequence
  Antisense compound
ttcatcagtctttttctttt

SEQ ID NO: 29242 - DNA, 20 bp, Artificial Sequence
  Antisense compound
cttcatcagtctttttcttt

SEQ ID NO: 29243 - DNA, 20 bp, Artificial Sequence
  Antisense compound
gcttcatcagtctttttctt

SEQ ID NO: 29244 - DNA, 20 bp, Artificial Sequence
  Antisense compound
agcttcatcagtctttttct

SEQ ID NO: 29245 - DNA, 20 bp, Artificial Sequence
  Antisense compound
gagcttcatcagtctttttc

SEQ ID NO: 29246 - DNA, 20 bp, Artificial Sequence
  Antisense compound
tgagcttcatcagtcttttt

SEQ ID NO: 29247 - DNA, 20 bp, Artificial Sequence
  Antisense compound
ctgagcttcatcagtctttt

SEQ ID NO: 29248 - DNA, 20 bp, Artificial Sequence
  Antisense compound
gctgagcttcatcagtcttt

SEQ ID NO: 29249 - DNA, 20 bp, Artificial Sequence
  Antisense compound
ggctgagcttcatcagtctt

SEQ ID NO: 29250 - DNA, 20 bp, Artificial Sequence
  Antisense compound
aggctgagcttcatcagtct

SEQ ID NO: 29251 - DNA, 20 bp, Artificial Sequence
  Antisense compound
aaggctgagcttcatcagtc

SEQ ID NO: 29252 - DNA, 20 bp, Artificial Sequence
  Antisense compound
aaaggctgagcttcatcagt

SEQ ID NO: 29253 - DNA, 20 bp, Artificial Sequence
  Antisense compound
caaaggctgagcttcatcag

SEQ ID NO: 29254 - DNA, 20 bp, Artificial Sequence
  Antisense compound
gcaaaggctgagcttcatca

SEQ ID NO: 29255 - DNA, 20 bp, Artificial Sequence
  Antisense compound
ggcaaaggctgagcttcatc

SEQ ID NO: 29256 - DNA, 20 bp, Artificial Sequence
  Antisense compound
cggcaaaggctgagcttcat

SEQ ID NO: 29257 - DNA, 20 bp, Artificial Sequence
  Antisense compound
gcggcaaaggctgagcttca

SEQ ID NO: 29258 - DNA, 20 bp, Artificial Sequence
  Antisense compound
tgcggcaaaggctgagcttc

SEQ ID NO: 29259 - DNA, 20 bp, Artificial Sequence
  Antisense compound
ctgcggcaaaggctgagctt

SEQ ID NO: 29260 - DNA, 20 bp, Artificial Sequence
  Antisense compound
tctgcggcaaaggctgagct

SEQ ID NO: 29261 - DNA, 20 bp, Artificial Sequence
  Antisense compound
ctctgcggcaaaggctgagc

SEQ ID NO: 29262 - DNA, 20 bp, Artificial Sequence
  Antisense compound
tctctgcggcaaaggctgag

SEQ ID NO: 29263 - DNA, 20 bp, Artificial Sequence
  Antisense compound
gtctctgcggcaaaggctga

SEQ ID NO: 29264 - DNA, 20 bp, Artificial Sequence
  Antisense compound
tgtctctgcggcaaaggctg

SEQ ID NO: 29265 - DNA, 20 bp, Artificial Sequence
  Antisense compound
ttgtctctgcggcaaaggct

SEQ ID NO: 29266 - DNA, 20 bp, Artificial Sequence
  Antisense compound
tttgtctctgcggcaaaggc

SEQ ID NO: 29267 - DNA, 20 bp, Artificial Sequence
  Antisense compound
ttttgtctctgcggcaaagg

SEQ ID NO: 29268 - DNA, 20 bp, Artificial Sequence
  Antisense compound
cttttgtctctgcggcaaag

SEQ ID NO: 29269 - DNA, 20 bp, Artificial Sequence
  Antisense compound
tcttttgtctctgcggcaaa

SEQ ID NO: 29270 - DNA, 20 bp, Artificial Sequence
  Antisense compound
ttcttttgtctctgcggcaa

SEQ ID NO: 29271 - DNA, 20 bp, Artificial Sequence
  Antisense compound
cttcttttgtctctgcggca

SEQ ID NO: 29272 - DNA, 20 bp, Artificial Sequence
  Antisense compound
gcttcttttgtctctgcggc

SEQ ID NO: 29273 - DNA, 20 bp, Artificial Sequence
  Antisense compound
tgcttcttttgtctctgcgg

SEQ ID NO: 29274 - DNA, 20 bp, Artificial Sequence
  Antisense compound
ctgcttcttttgtctctgcg

SEQ ID NO: 29275 - DNA, 20 bp, Artificial Sequence
  Antisense compound
gctgcttcttttgtctctgc

SEQ ID NO: 29276 - DNA, 20 bp, Artificial Sequence
  Antisense compound
ggctgcttcttttgtctctg

SEQ ID NO: 29277 - DNA, 20 bp, Artificial Sequence
  Antisense compound
gggctgcttcttttgtctct

SEQ ID NO: 29278 - DNA, 20 bp, Artificial Sequence
  Antisense compound
tgggctgcttcttttgtctc

SEQ ID NO: 29279 - DNA, 20 bp, Artificial Sequence
  Antisense compound
gtgggctgcttcttttgtct

SEQ ID NO: 29280 - DNA, 20 bp, Artificial Sequence
  Antisense compound
agtgggctgcttcttttgtc

SEQ ID NO: 29281 - DNA, 20 bp, Artificial Sequence
  Antisense compound
cagtgggctgcttcttttgt

SEQ ID NO: 29282 - DNA, 20 bp, Artificial Sequence
  Antisense compound
acagtgggctgcttcttttg

SEQ ID NO: 29283 - DNA, 20 bp, Artificial Sequence
  Antisense compound
cacagtgggctgcttctttt

SEQ ID NO: 29284 - DNA, 20 bp, Artificial Sequence
  Antisense compound
tcacagtgggctgcttcttt

SEQ ID NO: 29285 - DNA, 20 bp, Artificial Sequence
  Antisense compound
gtcacagtgggctgcttctt

SEQ ID NO: 29286 - DNA, 20 bp, Artificial Sequence
  Antisense compound
agtcacagtgggctgcttct

SEQ ID NO: 29287 - DNA, 20 bp, Artificial Sequence
  Antisense compound
gagtcacagtgggctgcttc

SEQ ID NO: 29288 - DNA, 20 bp, Artificial Sequence
  Antisense compound
agagtcacagtgggctgctt

SEQ ID NO: 29289 - DNA, 20 bp, Artificial Sequence
  Antisense compound
aagagtcacagtgggctgct

SEQ ID NO: 29290 - DNA, 20 bp, Artificial Sequence
  Antisense compound
gaagagtcacagtgggctgc

SEQ ID NO: 29291 - DNA, 20 bp, Artificial Sequence
  Antisense compound
agaagagtcacagtgggctg

SEQ ID NO: 29292 - DNA, 20 bp, Artificial Sequence
  Antisense compound
aagaagagtcacagtgggct

SEQ ID NO: 29293 - DNA, 20 bp, Artificial Sequence
  Antisense compound
gaagaagagtcacagtgggc

SEQ ID NO: 29294 - DNA, 20 bp, Artificial Sequence
  Antisense compound
ggaagaagagtcacagtggg

SEQ ID NO: 29295 - DNA, 20 bp, Artificial Sequence
  Antisense compound
aggaagaagagtcacagtgg

SEQ ID NO: 29296 - DNA, 20 bp, Artificial Sequence
  Antisense compound
caggaagaagagtcacagtg

SEQ ID NO: 29297 - DNA, 20 bp, Artificial Sequence
  Antisense compound
gcaggaagaagagtcacagt

SEQ ID NO: 29298 - DNA, 20 bp, Artificial Sequence
  Antisense compound
cgcaggaagaagagtcacag

SEQ ID NO: 29299 - DNA, 20 bp, Artificial Sequence
  Antisense compound
ccgcaggaagaagagtcaca

SEQ ID NO: 29300 - DNA, 20 bp, Artificial Sequence
  Antisense compound
gccgcaggaagaagagtcac

SEQ ID NO: 29301 - DNA, 20 bp, Artificial Sequence
  Antisense compound
agccgcaggaagaagagtca

SEQ ID NO: 29302 - DNA, 20 bp, Artificial Sequence
  Antisense compound
cagccgcaggaagaagagtc

SEQ ID NO: 29303 - DNA, 20 bp, Artificial Sequence
  Antisense compound
tcagccgcaggaagaagagt

SEQ ID NO: 29304 - DNA, 20 bp, Artificial Sequence
  Antisense compound
gtcagccgcaggaagaagag

SEQ ID NO: 29305 - DNA, 20 bp, Artificial Sequence
  Antisense compound
tgtcagccgcaggaagaaga

SEQ ID NO: 29306 - DNA, 20 bp, Artificial Sequence
  Antisense compound
atgtcagccgcaggaagaag

SEQ ID NO: 29307 - DNA, 20 bp, Artificial Sequence
  Antisense compound
catgtcagccgcaggaagaa

SEQ ID NO: 29308 - DNA, 20 bp, Artificial Sequence
  Antisense compound
ccatgtcagccgcaggaaga

SEQ ID NO: 29309 - DNA, 20 bp, Artificial Sequence
  Antisense compound
tccatgtcagccgcaggaag

SEQ ID NO: 29310 - DNA, 20 bp, Artificial Sequence
  Antisense compound
atccatgtcagccgcaggaa

SEQ ID NO: 29311 - DNA, 20 bp, Artificial Sequence
  Antisense compound
catccatgtcagccgcagga

SEQ ID NO: 29312 - DNA, 20 bp, Artificial Sequence
  Antisense compound
tcatccatgtcagccgcagg

SEQ ID NO: 29313 - DNA, 20 bp, Artificial Sequence
  Antisense compound
atcatccatgtcagccgcag

SEQ ID NO: 29314 - DNA, 20 bp, Artificial Sequence
  Antisense compound
aatcatccatgtcagccgca

SEQ ID NO: 29315 - DNA, 20 bp, Artificial Sequence
  Antisense compound
aaatcatccatgtcagccgc

SEQ ID NO: 29316 - DNA, 20 bp, Artificial Sequence
  Antisense compound
gaaatcatccatgtcagccg

SEQ ID NO: 29317 - DNA, 20 bp, Artificial Sequence
  Antisense compound
agaaatcatccatgtcagcc

SEQ ID NO: 29318 - DNA, 20 bp, Artificial Sequence
  Antisense compound
gagaaatcatccatgtcagc

SEQ ID NO: 29319 - DNA, 20 bp, Artificial Sequence
  Antisense compound
ggagaaatcatccatgtcag

SEQ ID NO: 29320 - DNA, 20 bp, Artificial Sequence
  Antisense compound
tggagaaatcatccatgtca

SEQ ID NO: 29321 - DNA, 20 bp, Artificial Sequence
  Antisense compound
ctggagaaatcatccatgtc

SEQ ID NO: 29322 - DNA, 20 bp, Artificial Sequence
  Antisense compound
tctggagaaatcatccatgt

SEQ ID NO: 29323 - DNA, 20 bp, Artificial Sequence
  Antisense compound
gtctggagaaatcatccatg

SEQ ID NO: 29324 - DNA, 20 bp, Artificial Sequence
  Antisense compound
tgtctggagaaatcatccat

SEQ ID NO: 29325 - DNA, 20 bp, Artificial Sequence
  Antisense compound
ttgtctggagaaatcatcca

SEQ ID NO: 29326 - DNA, 20 bp, Artificial Sequence
  Antisense compound
gttgtctggagaaatcatcc

SEQ ID NO: 29327 - DNA, 20 bp, Artificial Sequence
  Antisense compound
agttgtctggagaaatcatc

SEQ ID NO: 29328 - DNA, 20 bp, Artificial Sequence
  Antisense compound
aagttgtctggagaaatcat

SEQ ID NO: 29329 - DNA, 20 bp, Artificial Sequence
  Antisense compound
gaagttgtctggagaaatca

SEQ ID NO: 29330 - DNA, 20 bp, Artificial Sequence
  Antisense compound
tgaagttgtctggagaaatc

SEQ ID NO: 29331 - DNA, 20 bp, Artificial Sequence
  Antisense compound
ttgaagttgtctggagaaat

SEQ ID NO: 29332 - DNA, 20 bp, Artificial Sequence
  Antisense compound
tttgaagttgtctggagaaa

SEQ ID NO: 29333 - DNA, 20 bp, Artificial Sequence
  Antisense compound
ttttgaagttgtctggagaa

SEQ ID NO: 29334 - DNA, 20 bp, Artificial Sequence
  Antisense compound
attttgaagttgtctggaga

SEQ ID NO: 29335 - DNA, 20 bp, Artificial Sequence
  Antisense compound
aattttgaagttgtctggag

SEQ ID NO: 29336 - DNA, 20 bp, Artificial Sequence
  Antisense compound
gaattttgaagttgtctgga

SEQ ID NO: 29337 - DNA, 20 bp, Artificial Sequence
  Antisense compound
ggaattttgaagttgtctgg

SEQ ID NO: 29338 - DNA, 20 bp, Artificial Sequence
  Antisense compound
tggaattttgaagttgtctg

SEQ ID NO: 29339 - DNA, 20 bp, Artificial Sequence
  Antisense compound
atggaattttgaagttgtct

SEQ ID NO: 29340 - DNA, 20 bp, Artificial Sequence
  Antisense compound
catggaattttgaagttgtc

SEQ ID NO: 29341 - DNA, 20 bp, Artificial Sequence
  Antisense compound
tcatggaattttgaagttgt

SEQ ID NO: 29342 - DNA, 20 bp, Artificial Sequence
  Antisense compound
ctcatggaattttgaagttg

SEQ ID NO: 29343 - DNA, 20 bp, Artificial Sequence
  Antisense compound
actcatggaattttgaagtt

SEQ ID NO: 29344 - DNA, 20 bp, Artificial Sequence
  Antisense compound
cactcatggaattttgaagt

SEQ ID NO: 29345 - DNA, 20 bp, Artificial Sequence
  Antisense compound
ccactcatggaattttgaag

SEQ ID NO: 29346 - DNA, 20 bp, Artificial Sequence
  Antisense compound
tccactcatggaattttgaa

SEQ ID NO: 29347 - DNA, 20 bp, Artificial Sequence
  Antisense compound
ctccactcatggaattttga

SEQ ID NO: 29348 - DNA, 20 bp, Artificial Sequence
  Antisense compound
gctccactcatggaattttg

SEQ ID NO: 29349 - DNA, 20 bp, Artificial Sequence
  Antisense compound
agctccactcatggaatttt

SEQ ID NO: 29350 - DNA, 20 bp, Artificial Sequence
  Antisense compound
aagctccactcatggaattt

SEQ ID NO: 29351 - DNA, 20 bp, Artificial Sequence
  Antisense compound
gaagctccactcatggaatt

SEQ ID NO: 29352 - DNA, 20 bp, Artificial Sequence
  Antisense compound
agaagctccactcatggaat

SEQ ID NO: 29353 - DNA, 20 bp, Artificial Sequence
  Antisense compound
cagaagctccactcatggaa

SEQ ID NO: 29354 - DNA, 20 bp, Artificial Sequence
  Antisense compound
gcagaagctccactcatgga

SEQ ID NO: 29355 - DNA, 20 bp, Artificial Sequence
  Antisense compound
agcagaagctccactcatgg

SEQ ID NO: 29356 - DNA, 20 bp, Artificial Sequence
  Antisense compound
cagcagaagctccactcatg

SEQ ID NO: 29357 - DNA, 20 bp, Artificial Sequence
  Antisense compound
tcagcagaagctccactcat

SEQ ID NO: 29358 - DNA, 20 bp, Artificial Sequence
  Antisense compound
atcagcagaagctccactca

SEQ ID NO: 29359 - DNA, 20 bp, Artificial Sequence
  Antisense compound
aatcagcagaagctccactc

SEQ ID NO: 29360 - DNA, 20 bp, Artificial Sequence
  Antisense compound
gaatcagcagaagctccact

SEQ ID NO: 29361 - DNA, 20 bp, Artificial Sequence
  Antisense compound
tgaatcagcagaagctccac

SEQ ID NO: 29362 - DNA, 20 bp, Artificial Sequence
  Antisense compound
ttgaatcagcagaagctcca

SEQ ID NO: 29363 - DNA, 20 bp, Artificial Sequence
  Antisense compound
gttgaatcagcagaagctcc

SEQ ID NO: 29364 - DNA, 20 bp, Artificial Sequence
  Antisense compound
agttgaatcagcagaagctc

SEQ ID NO: 29365 - DNA, 20 bp, Artificial Sequence
  Antisense compound
gagttgaatcagcagaagct

SEQ ID NO: 29366 - DNA, 20 bp, Artificial Sequence
  Antisense compound
tgagttgaatcagcagaagc

SEQ ID NO: 29367 - DNA, 20 bp, Artificial Sequence
  Antisense compound
ctgagttgaatcagcagaag

SEQ ID NO: 29368 - DNA, 20 bp, Artificial Sequence
  Antisense compound
cctgagttgaatcagcagaa

SEQ ID NO: 29369 - DNA, 20 bp, Artificial Sequence
  Antisense compound
gcctgagttgaatcagcaga

SEQ ID NO: 29370 - DNA, 20 bp, Artificial Sequence
  Antisense compound
tgcctgagttgaatcagcag

SEQ ID NO: 29371 - DNA, 20 bp, Artificial Sequence
  Antisense compound
atgcctgagttgaatcagca

SEQ ID NO: 29372 - DNA, 20 bp, Artificial Sequence
  Antisense compound
tatgcctgagttgaatcagc

SEQ ID NO: 29373 - DNA, 20 bp, Artificial Sequence
  Antisense compound
ttatgcctgagttgaatcag

SEQ ID NO: 29374 - DNA, 20 bp, Artificial Sequence
  Antisense compound
tttatgcctgagttgaatca

SEQ ID NO: 29375 - DNA, 20 bp, Artificial Sequence
  Antisense compound
gtttatgcctgagttgaatc

SEQ ID NO: 29376 - DNA, 20 bp, Artificial Sequence
  Antisense compound
tgtttatgcctgagttgaat

SEQ ID NO: 29377 - DNA, 20 bp, Artificial Sequence
  Antisense compound
gtgtttatgcctgagttgaa

SEQ ID NO: 29378 - DNA, 20 bp, Artificial Sequence
  Antisense compound
agtgtttatgcctgagttga

SEQ ID NO: 29379 - DNA, 20 bp, Artificial Sequence
  Antisense compound
gagtgtttatgcctgagttg

SEQ ID NO: 29380 - DNA, 20 bp, Artificial Sequence
  Antisense compound
tgagtgtttatgcctgagtt

SEQ ID NO: 29381 - DNA, 20 bp, Artificial Sequence
  Antisense compound
atgagtgtttatgcctgagt

SEQ ID NO: 29382 - DNA, 20 bp, Artificial Sequence
  Antisense compound
catgagtgtttatgcctgag

SEQ ID NO: 29383 - DNA, 20 bp, Artificial Sequence
  Antisense compound
tcatgagtgtttatgcctga

SEQ ID NO: 29384 - DNA, 20 bp, Artificial Sequence
  Antisense compound
atcatgagtgtttatgcctg

SEQ ID NO: 29385 - DNA, 20 bp, Artificial Sequence
  Antisense compound
catcatgagtgtttatgcct

SEQ ID NO: 29386 - DNA, 20 bp, Artificial Sequence
  Antisense compound
tcatcatgagtgtttatgcc

SEQ ID NO: 29387 - DNA, 20 bp, Artificial Sequence
  Antisense compound
gtcatcatgagtgtttatgc

SEQ ID NO: 29388 - DNA, 20 bp, Artificial Sequence
  Antisense compound
ggtcatcatgagtgtttatg

SEQ ID NO: 29389 - DNA, 20 bp, Artificial Sequence
  Antisense compound
tggtcatcatgagtgtttat

SEQ ID NO: 29390 - DNA, 20 bp, Artificial Sequence
  Antisense compound
gtggtcatcatgagtgttta

SEQ ID NO: 29391 - DNA, 20 bp, Artificial Sequence
  Antisense compound
tgtggtcatcatgagtgttt

SEQ ID NO: 29392 - DNA, 20 bp, Artificial Sequence
  Antisense compound
gtgtggtcatcatgagtgtt

SEQ ID NO: 29393 - DNA, 20 bp, Artificial Sequence
  Antisense compound
tgtgtggtcatcatgagtgt

SEQ ID NO: 29394 - DNA, 20 bp, Artificial Sequence
  Antisense compound
ttgtgtggtcatcatgagtg

SEQ ID NO: 29395 - DNA, 20 bp, Artificial Sequence
  Antisense compound
cttgtgtggtcatcatgagt

SEQ ID NO: 29396 - DNA, 20 bp, Artificial Sequence
  Antisense compound
ccttgtgtggtcatcatgag

SEQ ID NO: 29397 - DNA, 20 bp, Artificial Sequence
  Antisense compound
gccttgtgtggtcatcatga

SEQ ID NO: 29398 - DNA, 20 bp, Artificial Sequence
  Antisense compound
tgccttgtgtggtcatcatg

SEQ ID NO: 29399 - DNA, 20 bp, Artificial Sequence
  Antisense compound
ctgccttgtgtggtcatcat

SEQ ID NO: 29400 - DNA, 20 bp, Artificial Sequence
  Antisense compound
tctgccttgtgtggtcatca

SEQ ID NO: 29401 - DNA, 20 bp, Artificial Sequence
  Antisense compound
atctgccttgtgtggtcatc

SEQ ID NO: 29402 - DNA, 20 bp, Artificial Sequence
  Antisense compound
catctgccttgtgtggtcat

SEQ ID NO: 29403 - DNA, 20 bp, Artificial Sequence
  Antisense compound
ccatctgccttgtgtggtca

SEQ ID NO: 29404 - DNA, 20 bp, Artificial Sequence
  Antisense compound
cccatctgccttgtgtggtc

SEQ ID NO: 29405 - DNA, 20 bp, Artificial Sequence
  Antisense compound
gcccatctgccttgtgtggt

SEQ ID NO: 29406 - DNA, 20 bp, Artificial Sequence
  Antisense compound
agcccatctgccttgtgtgg

SEQ ID NO: 29407 - DNA, 20 bp, Artificial Sequence
  Antisense compound
tagcccatctgccttgtgtg

SEQ ID NO: 29408 - DNA, 20 bp, Artificial Sequence
  Antisense compound
atagcccatctgccttgtgt

SEQ ID NO: 29409 - DNA, 20 bp, Artificial Sequence
  Antisense compound
catagcccatctgccttgtg

SEQ ID NO: 29410 - DNA, 20 bp, Artificial Sequence
  Antisense compound
acatagcccatctgccttgt

SEQ ID NO: 29411 - DNA, 20 bp, Artificial Sequence
  Antisense compound
tacatagcccatctgccttg

SEQ ID NO: 29412 - DNA, 20 bp, Artificial Sequence
  Antisense compound
ttacatagcccatctgcctt

SEQ ID NO: 29413 - DNA, 20 bp, Artificial Sequence
  Antisense compound
tttacatagcccatctgcct

SEQ ID NO: 29414 - DNA, 20 bp, Artificial Sequence
  Antisense compound
gtttacatagcccatctgcc

SEQ ID NO: 29415 - DNA, 20 bp, Artificial Sequence
  Antisense compound
cgtttacatagcccatctgc

SEQ ID NO: 29416 - DNA, 20 bp, Artificial Sequence
  Antisense compound
acgtttacatagcccatctg

SEQ ID NO: 29417 - DNA, 20 bp, Artificial Sequence
  Antisense compound
aacgtttacatagcccatct

SEQ ID NO: 29418 - DNA, 20 bp, Artificial Sequence
  Antisense compound
aaacgtttacatagcccatc

SEQ ID NO: 29419 - DNA, 20 bp, Artificial Sequence
  Antisense compound
aaaacgtttacatagcccat

SEQ ID NO: 29420 - DNA, 20 bp, Artificial Sequence
  Antisense compound
gaaaacgtttacatagccca

SEQ ID NO: 29421 - DNA, 20 bp, Artificial Sequence
  Antisense compound
cgaaaacgtttacatagccc

SEQ ID NO: 29422 - DNA, 20 bp, Artificial Sequence
  Antisense compound
gcgaaaacgtttacatagcc

SEQ ID NO: 29423 - DNA, 20 bp, Artificial Sequence
  Antisense compound
tgcgaaaacgtttacatagc

SEQ ID NO: 29424 - DNA, 20 bp, Artificial Sequence
  Antisense compound
ttgcgaaaacgtttacatag

SEQ ID NO: 29425 - DNA, 20 bp, Artificial Sequence
  Antisense compound
attgcgaaaacgtttacata

SEQ ID NO: 29426 - DNA, 20 bp, Artificial Sequence
  Antisense compound
aattgcgaaaacgtttacat

SEQ ID NO: 29427 - DNA, 20 bp, Artificial Sequence
  Antisense compound
gaattgcgaaaacgtttaca

SEQ ID NO: 29428 - DNA, 20 bp, Artificial Sequence
  Antisense compound
ggaattgcgaaaacgtttac

SEQ ID NO: 29429 - DNA, 20 bp, Artificial Sequence
  Antisense compound
cggaattgcgaaaacgttta

SEQ ID NO: 29430 - DNA, 20 bp, Artificial Sequence
  Antisense compound
acggaattgcgaaaacgttt

SEQ ID NO: 29431 - DNA, 20 bp, Artificial Sequence
  Antisense compound
aacggaattgcgaaaacgtt

SEQ ID NO: 29432 - DNA, 20 bp, Artificial Sequence
  Antisense compound
aaacggaattgcgaaaacgt

SEQ ID NO: 29433 - DNA, 20 bp, Artificial Sequence
  Antisense compound
taaacggaattgcgaaaacg

SEQ ID NO: 29434 - DNA, 20 bp, Artificial Sequence
  Antisense compound
gtaaacggaattgcgaaaac

SEQ ID NO: 29435 - DNA, 20 bp, Artificial Sequence
  Antisense compound
cgtaaacggaattgcgaaaa

SEQ ID NO: 29436 - DNA, 20 bp, Artificial Sequence
  Antisense compound
tcgtaaacggaattgcgaaa

SEQ ID NO: 29437 - DNA, 20 bp, Artificial Sequence
  Antisense compound
atcgtaaacggaattgcgaa

SEQ ID NO: 29438 - DNA, 20 bp, Artificial Sequence
  Antisense compound
tatcgtaaacggaattgcga

SEQ ID NO: 29439 - DNA, 20 bp, Artificial Sequence
  Antisense compound
gtatcgtaaacggaattgcg

SEQ ID NO: 29440 - DNA, 20 bp, Artificial Sequence
  Antisense compound
tgtatcgtaaacggaattgc

SEQ ID NO: 29441 - DNA, 20 bp, Artificial Sequence
  Antisense compound
atgtatcgtaaacggaattg

SEQ ID NO: 29442 - DNA, 20 bp, Artificial Sequence
  Antisense compound
tatgtatcgtaaacggaatt

SEQ ID NO: 29443 - DNA, 20 bp, Artificial Sequence
  Antisense compound
ctatgtatcgtaaacggaat

SEQ ID NO: 29444 - DNA, 20 bp, Artificial Sequence
  Antisense compound
actatgtatcgtaaacggaa

SEQ ID NO: 29445 - DNA, 20 bp, Artificial Sequence
  Antisense compound
gactatgtatcgtaaacgga

SEQ ID NO: 29446 - DNA, 20 bp, Artificial Sequence
  Antisense compound
agactatgtatcgtaaacgg

SEQ ID NO: 29447 - DNA, 20 bp, Artificial Sequence
  Antisense compound
tagactatgtatcgtaaacg

SEQ ID NO: 29448 - DNA, 20 bp, Artificial Sequence
  Antisense compound
gtagactatgtatcgtaaac

SEQ ID NO: 29449 - DNA, 20 bp, Artificial Sequence
  Antisense compound
agtagactatgtatcgtaaa

SEQ ID NO: 29450 - DNA, 20 bp, Artificial Sequence
  Antisense compound
gagtagactatgtatcgtaa

SEQ ID NO: 29451 - DNA, 20 bp, Artificial Sequence
  Antisense compound
agagtagactatgtatcgta

SEQ ID NO: 29452 - DNA, 20 bp, Artificial Sequence
  Antisense compound
aagagtagactatgtatcgt

SEQ ID NO: 29453 - DNA, 20 bp, Artificial Sequence
  Antisense compound
caagagtagactatgtatcg

SEQ ID NO: 29454 - DNA, 20 bp, Artificial Sequence
  Antisense compound
acaagagtagactatgtatc

SEQ ID NO: 29455 - DNA, 20 bp, Artificial Sequence
  Antisense compound
cacaagagtagactatgtat

SEQ ID NO: 29456 - DNA, 20 bp, Artificial Sequence
  Antisense compound
gcacaagagtagactatgta

SEQ ID NO: 29457 - DNA, 20 bp, Artificial Sequence
  Antisense compound
tgcacaagagtagactatgt

SEQ ID NO: 29458 - DNA, 20 bp, Artificial Sequence
  Antisense compound
ctgcacaagagtagactatg

SEQ ID NO: 29459 - DNA, 20 bp, Artificial Sequence
  Antisense compound
tctgcacaagagtagactat

SEQ ID NO: 29460 - DNA, 20 bp, Artificial Sequence
  Antisense compound
ttctgcacaagagtagacta

SEQ ID NO: 29461 - DNA, 20 bp, Artificial Sequence
  Antisense compound
attctgcacaagagtagact

SEQ ID NO: 29462 - DNA, 20 bp, Artificial Sequence
  Antisense compound
cattctgcacaagagtagac

SEQ ID NO: 29463 - DNA, 20 bp, Artificial Sequence
  Antisense compound
tcattctgcacaagagtaga

SEQ ID NO: 29464 - DNA, 20 bp, Artificial Sequence
  Antisense compound
ttcattctgcacaagagtag

SEQ ID NO: 29465 - DNA, 20 bp, Artificial Sequence
  Antisense compound
attcattctgcacaagagta

SEQ ID NO: 29466 - DNA, 20 bp, Artificial Sequence
  Antisense compound
aattcattctgcacaagagt

SEQ ID NO: 29467 - DNA, 20 bp, Artificial Sequence
  Antisense compound
gaattcattctgcacaagag

SEQ ID NO: 29468 - DNA, 20 bp, Artificial Sequence
  Antisense compound
agaattcattctgcacaaga

SEQ ID NO: 29469 - DNA, 20 bp, Artificial Sequence
  Antisense compound
gagaattcattctgcacaag

SEQ ID NO: 29470 - DNA, 20 bp, Artificial Sequence
  Antisense compound
cgagaattcattctgcacaa

SEQ ID NO: 29471 - DNA, 20 bp, Artificial Sequence
  Antisense compound
acgagaattcattctgcaca

SEQ ID NO: 29472 - DNA, 20 bp, Artificial Sequence
  Antisense compound
tacgagaattcattctgcac

SEQ ID NO: 29473 - DNA, 20 bp, Artificial Sequence
  Antisense compound
ttacgagaattcattctgca

SEQ ID NO: 29474 - DNA, 20 bp, Artificial Sequence
  Antisense compound
gttacgagaattcattctgc

SEQ ID NO: 29475 - DNA, 20 bp, Artificial Sequence
  Antisense compound
agttacgagaattcattctg

SEQ ID NO: 29476 - DNA, 20 bp, Artificial Sequence
  Antisense compound
tagttacgagaattcattct

SEQ ID NO: 29477 - DNA, 20 bp, Artificial Sequence
  Antisense compound
ttagttacgagaattcattc

SEQ ID NO: 29478 - DNA, 20 bp, Artificial Sequence
  Antisense compound
tttagttacgagaattcatt

SEQ ID NO: 29479 - DNA, 20 bp, Artificial Sequence
  Antisense compound
gtttagttacgagaattcat

SEQ ID NO: 29480 - DNA, 20 bp, Artificial Sequence
  Antisense compound
tgtttagttacgagaattca

SEQ ID NO: 29481 - DNA, 20 bp, Artificial Sequence
  Antisense compound
ctgtttagttacgagaattc

SEQ ID NO: 29482 - DNA, 20 bp, Artificial Sequence
  Antisense compound
gctgtttagttacgagaatt

SEQ ID NO: 29483 - DNA, 20 bp, Artificial Sequence
  Antisense compound
tgctgtttagttacgagaat

SEQ ID NO: 29484 - DNA, 20 bp, Artificial Sequence
  Antisense compound
gtgctgtttagttacgagaa

SEQ ID NO: 29485 - DNA, 20 bp, Artificial Sequence
  Antisense compound
tgtgctgtttagttacgaga

SEQ ID NO: 29486 - DNA, 20 bp, Artificial Sequence
  Antisense compound
ttgtgctgtttagttacgag

SEQ ID NO: 29487 - DNA, 20 bp, Artificial Sequence
  Antisense compound
cttgtgctgtttagttacga

SEQ ID NO: 29488 - DNA, 20 bp, Artificial Sequence
  Antisense compound
acttgtgctgtttagttacg

SEQ ID NO: 29489 - DNA, 20 bp, Artificial Sequence
  Antisense compound
tacttgtgctgtttagttac

SEQ ID NO: 29490 - DNA, 20 bp, Artificial Sequence
  Antisense compound
ctacttgtgctgtttagtta

SEQ ID NO: 29491 - DNA, 20 bp, Artificial Sequence
  Antisense compound
cctacttgtgctgtttagtt

SEQ ID NO: 29492 - DNA, 20 bp, Artificial Sequence
  Antisense compound
acctacttgtgctgtttagt

SEQ ID NO: 29493 - DNA, 20 bp, Artificial Sequence
  Antisense compound
aacctacttgtgctgtttag

SEQ ID NO: 29494 - DNA, 20 bp, Artificial Sequence
  Antisense compound
aaacctacttgtgctgttta

SEQ ID NO: 29495 - DNA, 20 bp, Artificial Sequence
  Antisense compound
taaacctacttgtgctgttt

SEQ ID NO: 29496 - DNA, 20 bp, Artificial Sequence
  Antisense compound
ctaaacctacttgtgctgtt

SEQ ID NO: 29497 - DNA, 20 bp, Artificial Sequence
  Antisense compound
actaaacctacttgtgctgt

SEQ ID NO: 29498 - DNA, 20 bp, Artificial Sequence
  Antisense compound
aactaaacctacttgtgctg

SEQ ID NO: 29499 - DNA, 20 bp, Artificial Sequence
  Antisense compound
taactaaacctacttgtgct

SEQ ID NO: 29500 - DNA, 20 bp, Artificial Sequence
  Antisense compound
ttaactaaacctacttgtgc

SEQ ID NO: 29501 - DNA, 20 bp, Artificial Sequence
  Antisense compound
gttaactaaacctacttgtg

SEQ ID NO: 29502 - DNA, 20 bp, Artificial Sequence
  Antisense compound
agttaactaaacctacttgt

SEQ ID NO: 29503 - DNA, 20 bp, Artificial Sequence
  Antisense compound
aagttaactaaacctacttg

SEQ ID NO: 29504 - DNA, 20 bp, Artificial Sequence
  Antisense compound
aaagttaactaaacctactt

SEQ ID NO: 29505 - DNA, 20 bp, Artificial Sequence
  Antisense compound
taaagttaactaaacctact

SEQ ID NO: 29506 - DNA, 20 bp, Artificial Sequence
  Antisense compound
ttaaagttaactaaacctac

SEQ ID NO: 29507 - DNA, 20 bp, Artificial Sequence
  Antisense compound
attaaagttaactaaaccta

SEQ ID NO: 29508 - DNA, 20 bp, Artificial Sequence
  Antisense compound
gattaaagttaactaaacct

SEQ ID NO: 29509 - DNA, 20 bp, Artificial Sequence
  Antisense compound
agattaaagttaactaaacc

SEQ ID NO: 29510 - DNA, 20 bp, Artificial Sequence
  Antisense compound
gagattaaagttaactaaac

SEQ ID NO: 29511 - DNA, 20 bp, Artificial Sequence
  Antisense compound
tgagattaaagttaactaaa

SEQ ID NO: 29512 - DNA, 20 bp, Artificial Sequence
  Antisense compound
gtgagattaaagttaactaa

SEQ ID NO: 29513 - DNA, 20 bp, Artificial Sequence
  Antisense compound
tgtgagattaaagttaacta

SEQ ID NO: 29514 - DNA, 20 bp, Artificial Sequence
  Antisense compound
atgtgagattaaagttaact

SEQ ID NO: 29515 - DNA, 20 bp, Artificial Sequence
  Antisense compound
tatgtgagattaaagttaac

SEQ ID NO: 29516 - DNA, 20 bp, Artificial Sequence
  Antisense compound
ctatgtgagattaaagttaa

SEQ ID NO: 29517 - DNA, 20 bp, Artificial Sequence
  Antisense compound
gctatgtgagattaaagtta

SEQ ID NO: 29518 - DNA, 20 bp, Artificial Sequence
  Antisense compound
tgctatgtgagattaaagtt

SEQ ID NO: 29519 - DNA, 20 bp, Artificial Sequence
  Antisense compound
ttgctatgtgagattaaagt

SEQ ID NO: 29520 - DNA, 20 bp, Artificial Sequence
  Antisense compound
attgctatgtgagattaaag

SEQ ID NO: 29521 - DNA, 20 bp, Artificial Sequence
  Antisense compound
gattgctatgtgagattaaa

SEQ ID NO: 29522 - DNA, 20 bp, Artificial Sequence
  Antisense compound
agattgctatgtgagattaa

SEQ ID NO: 29523 - DNA, 20 bp, Artificial Sequence
  Antisense compound
aagattgctatgtgagatta

SEQ ID NO: 29524 - DNA, 20 bp, Artificial Sequence
  Antisense compound
aaagattgctatgtgagatt

SEQ ID NO: 29525 - DNA, 20 bp, Artificial Sequence
  Antisense compound
taaagattgctatgtgagat

SEQ ID NO: 29526 - DNA, 20 bp, Artificial Sequence
  Antisense compound
ttaaagattgctatgtgaga

SEQ ID NO: 29527 - DNA, 20 bp, Artificial Sequence
  Antisense compound
attaaagattgctatgtgag

SEQ ID NO: 29528 - DNA, 20 bp, Artificial Sequence
  Antisense compound
gattaaagattgctatgtga

SEQ ID NO: 29529 - DNA, 20 bp, Artificial Sequence
  Antisense compound
tgattaaagattgctatgtg

SEQ ID NO: 29530 - DNA, 20 bp, Artificial Sequence
  Antisense compound
ttgattaaagattgctatgt

SEQ ID NO: 29531 - DNA, 20 bp, Artificial Sequence
  Antisense compound
attgattaaagattgctatg

SEQ ID NO: 29532 - DNA, 20 bp, Artificial Sequence
  Antisense compound
cattgattaaagattgctat

SEQ ID NO: 29533 - DNA, 20 bp, Artificial Sequence
  Antisense compound
acattgattaaagattgcta

SEQ ID NO: 29534 - DNA, 20 bp, Artificial Sequence
  Antisense compound
cacattgattaaagattgct

SEQ ID NO: 29535 - DNA, 20 bp, Artificial Sequence
  Antisense compound
acacattgattaaagattgc

SEQ ID NO: 29536 - DNA, 20 bp, Artificial Sequence
  Antisense compound
tacacattgattaaagattg

SEQ ID NO: 29537 - DNA, 20 bp, Artificial Sequence
  Antisense compound
ttacacattgattaaagatt

SEQ ID NO: 29538 - DNA, 20 bp, Artificial Sequence
  Antisense compound
gttacacattgattaaagat

SEQ ID NO: 29539 - DNA, 20 bp, Artificial Sequence
  Antisense compound
tgttacacattgattaaaga

SEQ ID NO: 29540 - DNA, 20 bp, Artificial Sequence
  Antisense compound
atgttacacattgattaaag

SEQ ID NO: 29541 - DNA, 20 bp, Artificial Sequence
  Antisense compound
aatgttacacattgattaaa

SEQ ID NO: 29542 - DNA, 20 bp, Artificial Sequence
  Antisense compound
taatgttacacattgattaa

SEQ ID NO: 29543 - DNA, 20 bp, Artificial Sequence
  Antisense compound
ctaatgttacacattgatta

SEQ ID NO: 29544 - DNA, 20 bp, Artificial Sequence
  Antisense compound
cctaatgttacacattgatt

SEQ ID NO: 29545 - DNA, 20 bp, Artificial Sequence
  Antisense compound
ccctaatgttacacattgat

SEQ ID NO: 29546 - DNA, 20 bp, Artificial Sequence
  Antisense compound
tccctaatgttacacattga

SEQ ID NO: 29547 - DNA, 20 bp, Artificial Sequence
  Antisense compound
ctccctaatgttacacattg

SEQ ID NO: 29548 - DNA, 20 bp, Artificial Sequence
  Antisense compound
cctccctaatgttacacatt

SEQ ID NO: 29549 - DNA, 20 bp, Artificial Sequence
  Antisense compound
tcctccctaatgttacacat

SEQ ID NO: 29550 - DNA, 20 bp, Artificial Sequence
  Antisense compound
gtcctccctaatgttacaca

SEQ ID NO: 29551 - DNA, 20 bp, Artificial Sequence
  Antisense compound
agtcctccctaatgttacac

SEQ ID NO: 29552 - DNA, 20 bp, Artificial Sequence
  Antisense compound
aagtcctccctaatgttaca

SEQ ID NO: 29553 - DNA, 20 bp, Artificial Sequence
  Antisense compound
caagtcctccctaatgttac

SEQ ID NO: 29554 - DNA, 20 bp, Artificial Sequence
  Antisense compound
tcaagtcctccctaatgtta

SEQ ID NO: 29555 - DNA, 20 bp, Artificial Sequence
  Antisense compound
ttcaagtcctccctaatgtt

SEQ ID NO: 29556 - DNA, 20 bp, Artificial Sequence
  Antisense compound
tttcaagtcctccctaatgt

SEQ ID NO: 29557 - DNA, 20 bp, Artificial Sequence
  Antisense compound
ctttcaagtcctccctaatg

SEQ ID NO: 29558 - DNA, 20 bp, Artificial Sequence
  Antisense compound
tctttcaagtcctccctaat

SEQ ID NO: 29559 - DNA, 20 bp, Artificial Sequence
  Antisense compound
ctctttcaagtcctccctaa

SEQ ID NO: 29560 - DNA, 20 bp, Artificial Sequence
  Antisense compound
gctctttcaagtcctcccta

SEQ ID NO: 29561 - DNA, 20 bp, Artificial Sequence
  Antisense compound
ggctctttcaagtcctccct

SEQ ID NO: 29562 - DNA, 20 bp, Artificial Sequence
  Antisense compound
tggctctttcaagtcctccc

SEQ ID NO: 29563 - DNA, 20 bp, Artificial Sequence
  Antisense compound
gtggctctttcaagtcctcc

SEQ ID NO: 29564 - DNA, 20 bp, Artificial Sequence
  Antisense compound
ggtggctctttcaagtcctc

SEQ ID NO: 29565 - DNA, 20 bp, Artificial Sequence
  Antisense compound
tggtggctctttcaagtcct

SEQ ID NO: 29566 - DNA, 20 bp, Artificial Sequence
  Antisense compound
gtggtggctctttcaagtcc

SEQ ID NO: 29567 - DNA, 20 bp, Artificial Sequence
  Antisense compound
tgtggtggctctttcaagtc

SEQ ID NO: 29568 - DNA, 20 bp, Artificial Sequence
  Antisense compound
atgtggtggctctttcaagt

SEQ ID NO: 29569 - DNA, 20 bp, Artificial Sequence
  Antisense compound
aatgtggtggctctttcaag

SEQ ID NO: 29570 - DNA, 20 bp, Artificial Sequence
  Antisense compound
aaatgtggtggctctttcaa

SEQ ID NO: 29571 - DNA, 20 bp, Artificial Sequence
  Antisense compound
aaaatgtggtggctctttca

SEQ ID NO: 29572 - DNA, 20 bp, Artificial Sequence
  Antisense compound
gaaaatgtggtggctctttc

SEQ ID NO: 29573 - DNA, 20 bp, Artificial Sequence
  Antisense compound
tgaaaatgtggtggctcttt

SEQ ID NO: 29574 - DNA, 20 bp, Artificial Sequence
  Antisense compound
atgaaaatgtggtggctctt

SEQ ID NO: 29575 - DNA, 20 bp, Artificial Sequence
  Antisense compound
gatgaaaatgtggtggctct

SEQ ID NO: 29576 - DNA, 20 bp, Artificial Sequence
  Antisense compound
cgatgaaaatgtggtggctc

SEQ ID NO: 29577 - DNA, 20 bp, Artificial Sequence
  Antisense compound
tcgatgaaaatgtggtggct

SEQ ID NO: 29578 - DNA, 20 bp, Artificial Sequence
  Antisense compound
ctcgatgaaaatgtggtggc

SEQ ID NO: 29579 - DNA, 20 bp, Artificial Sequence
  Antisense compound
cctcgatgaaaatgtggtgg

SEQ ID NO: 29580 - DNA, 20 bp, Artificial Sequence
  Antisense compound
gcctcgatgaaaatgtggtg

SEQ ID NO: 29581 - DNA, 20 bp, Artificial Sequence
  Antisense compound
ggcctcgatgaaaatgtggt

SEQ ID NO: 29582 - DNA, 20 bp, Artificial Sequence
  Antisense compound
tggcctcgatgaaaatgtgg

SEQ ID NO: 29583 - DNA, 20 bp, Artificial Sequence
  Antisense compound
gtggcctcgatgaaaatgtg

SEQ ID NO: 29584 - DNA, 20 bp, Artificial Sequence
  Antisense compound
cgtggcctcgatgaaaatgt

SEQ ID NO: 29585 - DNA, 20 bp, Artificial Sequence
  Antisense compound
gcgtggcctcgatgaaaatg

SEQ ID NO: 29586 - DNA, 20 bp, Artificial Sequence
  Antisense compound
cgcgtggcctcgatgaaaat

SEQ ID NO: 29587 - DNA, 20 bp, Artificial Sequence
  Antisense compound
ccgcgtggcctcgatgaaaa

SEQ ID NO: 29588 - DNA, 20 bp, Artificial Sequence
  Antisense compound
tccgcgtggcctcgatgaaa

SEQ ID NO: 29589 - DNA, 20 bp, Artificial Sequence
  Antisense compound
ctccgcgtggcctcgatgaa

SEQ ID NO: 29590 - DNA, 20 bp, Artificial Sequence
  Antisense compound
actccgcgtggcctcgatga

SEQ ID NO: 29591 - DNA, 20 bp, Artificial Sequence
  Antisense compound
tactccgcgtggcctcgatg

SEQ ID NO: 29592 - DNA, 20 bp, Artificial Sequence
  Antisense compound
gtactccgcgtggcctcgat

SEQ ID NO: 29593 - DNA, 20 bp, Artificial Sequence
  Antisense compound
cgtactccgcgtggcctcga

SEQ ID NO: 29594 - DNA, 20 bp, Artificial Sequence
  Antisense compound
tcgtactccgcgtggcctcg

SEQ ID NO: 29595 - DNA, 20 bp, Artificial Sequence
  Antisense compound
atcgtactccgcgtggcctc

SEQ ID NO: 29596 - DNA, 20 bp, Artificial Sequence
  Antisense compound
gatcgtactccgcgtggcct

SEQ ID NO: 29597 - DNA, 20 bp, Artificial Sequence
  Antisense compound
cgatcgtactccgcgtggcc

SEQ ID NO: 29598 - DNA, 20 bp, Artificial Sequence
  Antisense compound
tcgatcgtactccgcgtggc

SEQ ID NO: 29599 - DNA, 20 bp, Artificial Sequence
  Antisense compound
ctcgatcgtactccgcgtgg

SEQ ID NO: 29600 - DNA, 20 bp, Artificial Sequence
  Antisense compound
cctcgatcgtactccgcgtg

SEQ ID NO: 29601 - DNA, 20 bp, Artificial Sequence
  Antisense compound
ccctcgatcgtactccgcgt

SEQ ID NO: 29602 - DNA, 20 bp, Artificial Sequence
  Antisense compound
accctcgatcgtactccgcg

SEQ ID NO: 29603 - DNA, 20 bp, Artificial Sequence
  Antisense compound
taccctcgatcgtactccgc

SEQ ID NO: 29604 - DNA, 20 bp, Artificial Sequence
  Antisense compound
gtaccctcgatcgtactccg

SEQ ID NO: 29605 - DNA, 20 bp, Artificial Sequence
  Antisense compound
tgtaccctcgatcgtactcc

SEQ ID NO: 29606 - DNA, 20 bp, Artificial Sequence
  Antisense compound
ctgtaccctcgatcgtactc

SEQ ID NO: 29607 - DNA, 20 bp, Artificial Sequence
  Antisense compound
actgtaccctcgatcgtact

SEQ ID NO: 29608 - DNA, 20 bp, Artificial Sequence
  Antisense compound
cactgtaccctcgatcgtac

SEQ ID NO: 29609 - DNA, 20 bp, Artificial Sequence
  Antisense compound
tcactgtaccctcgatcgta

SEQ ID NO: 29610 - DNA, 20 bp, Artificial Sequence
  Antisense compound
ttcactgtaccctcgatcgt

SEQ ID NO: 29611 - DNA, 20 bp, Artificial Sequence
  Antisense compound
attcactgtaccctcgatcg

SEQ ID NO: 29612 - DNA, 20 bp, Artificial Sequence
  Antisense compound
tattcactgtaccctcgatc

SEQ ID NO: 29613 - DNA, 20 bp, Artificial Sequence
  Antisense compound
ttattcactgtaccctcgat

SEQ ID NO: 29614 - DNA, 20 bp, Artificial Sequence
  Antisense compound
attattcactgtaccctcga

SEQ ID NO: 29615 - DNA, 20 bp, Artificial Sequence
  Antisense compound
cattattcactgtaccctcg

SEQ ID NO: 29616 - DNA, 20 bp, Artificial Sequence
  Antisense compound
gcattattcactgtaccctc

SEQ ID NO: 29617 - DNA, 20 bp, Artificial Sequence
  Antisense compound
agcattattcactgtaccct

SEQ ID NO: 29618 - DNA, 20 bp, Artificial Sequence
  Antisense compound
tagcattattcactgtaccc

SEQ ID NO: 29619 - DNA, 20 bp, Artificial Sequence
  Antisense compound
ctagcattattcactgtacc

SEQ ID NO: 29620 - DNA, 20 bp, Artificial Sequence
  Antisense compound
cctagcattattcactgtac

SEQ ID NO: 29621 - DNA, 20 bp, Artificial Sequence
  Antisense compound
ccctagcattattcactgta

SEQ ID NO: 29622 - DNA, 20 bp, Artificial Sequence
  Antisense compound
tccctagcattattcactgt

SEQ ID NO: 29623 - DNA, 20 bp, Artificial Sequence
  Antisense compound
ctccctagcattattcactg

SEQ ID NO: 29624 - DNA, 20 bp, Artificial Sequence
  Antisense compound
tctccctagcattattcact

SEQ ID NO: 29625 - DNA, 20 bp, Artificial Sequence
  Antisense compound
ctctccctagcattattcac

SEQ ID NO: 29626 - DNA, 20 bp, Artificial Sequence
  Antisense compound
gctctccctagcattattca

SEQ ID NO: 29627 - DNA, 20 bp, Artificial Sequence
  Antisense compound
agctctccctagcattattc

SEQ ID NO: 29628 - DNA, 20 bp, Artificial Sequence
  Antisense compound
cagctctccctagcattatt

SEQ ID NO: 29629 - DNA, 20 bp, Artificial Sequence
  Antisense compound
gcagctctccctagcattat

SEQ ID NO: 29630 - DNA, 20 bp, Artificial Sequence
  Antisense compound
ggcagctctccctagcatta

SEQ ID NO: 29631 - DNA, 20 bp, Artificial Sequence
  Antisense compound
aggcagctctccctagcatt

SEQ ID NO: 29632 - DNA, 20 bp, Artificial Sequence
  Antisense compound
taggcagctctccctagcat

SEQ ID NO: 29633 - DNA, 20 bp, Artificial Sequence
  Antisense compound
ataggcagctctccctagca

SEQ ID NO: 29634 - DNA, 20 bp, Artificial Sequence
  Antisense compound
tataggcagctctccctagc

SEQ ID NO: 29635 - DNA, 20 bp, Artificial Sequence
  Antisense compound
atataggcagctctccctag

SEQ ID NO: 29636 - DNA, 20 bp, Artificial Sequence
  Antisense compound
catataggcagctctcccta

SEQ ID NO: 29637 - DNA, 20 bp, Artificial Sequence
  Antisense compound
ccatataggcagctctccct

SEQ ID NO: 29638 - DNA, 20 bp, Artificial Sequence
  Antisense compound
tccatataggcagctctccc

SEQ ID NO: 29639 - DNA, 20 bp, Artificial Sequence
  Antisense compound
ttccatataggcagctctcc

SEQ ID NO: 29640 - DNA, 20 bp, Artificial Sequence
  Antisense compound
cttccatataggcagctctc

SEQ ID NO: 29641 - DNA, 20 bp, Artificial Sequence
  Antisense compound
tcttccatataggcagctct

SEQ ID NO: 29642 - DNA, 20 bp, Artificial Sequence
  Antisense compound
ctcttccatataggcagctc

SEQ ID NO: 29643 - DNA, 20 bp, Artificial Sequence
  Antisense compound
gctcttccatataggcagct

SEQ ID NO: 29644 - DNA, 20 bp, Artificial Sequence
  Antisense compound
ggctcttccatataggcagc

SEQ ID NO: 29645 - DNA, 20 bp, Artificial Sequence
  Antisense compound
gggctcttccatataggcag

SEQ ID NO: 29646 - DNA, 20 bp, Artificial Sequence
  Antisense compound
agggctcttccatataggca

SEQ ID NO: 29647 - DNA, 20 bp, Artificial Sequence
  Antisense compound
tagggctcttccatataggc

SEQ ID NO: 29648 - DNA, 20 bp, Artificial Sequence
  Antisense compound
ttagggctcttccatatagg

SEQ ID NO: 29649 - DNA, 20 bp, Artificial Sequence
  Antisense compound
attagggctcttccatatag

SEQ ID NO: 29650 - DNA, 20 bp, Artificial Sequence
  Antisense compound
cattagggctcttccatata

SEQ ID NO: 29651 - DNA, 20 bp, Artificial Sequence
  Antisense compound
acattagggctcttccatat

SEQ ID NO: 29652 - DNA, 20 bp, Artificial Sequence
  Antisense compound
cacattagggctcttccata

SEQ ID NO: 29653 - DNA, 20 bp, Artificial Sequence
  Antisense compound
acacattagggctcttccat

SEQ ID NO: 29654 - DNA, 20 bp, Artificial Sequence
  Antisense compound
tacacattagggctcttcca

SEQ ID NO: 29655 - DNA, 20 bp, Artificial Sequence
  Antisense compound
ttacacattagggctcttcc

SEQ ID NO: 29656 - DNA, 20 bp, Artificial Sequence
  Antisense compound
tttacacattagggctcttc

SEQ ID NO: 29657 - DNA, 20 bp, Artificial Sequence
  Antisense compound
ttttacacattagggctctt

SEQ ID NO: 29658 - DNA, 20 bp, Artificial Sequence
  Antisense compound
attttacacattagggctct

SEQ ID NO: 29659 - DNA, 20 bp, Artificial Sequence
  Antisense compound
aattttacacattagggctc

SEQ ID NO: 29660 - DNA, 20 bp, Artificial Sequence
  Antisense compound
taattttacacattagggct

SEQ ID NO: 29661 - DNA, 20 bp, Artificial Sequence
  Antisense compound
ttaattttacacattagggc

SEQ ID NO: 29662 - DNA, 20 bp, Artificial Sequence
  Antisense compound
attaattttacacattaggg

SEQ ID NO: 29663 - DNA, 20 bp, Artificial Sequence
  Antisense compound
aattaattttacacattagg

SEQ ID NO: 29664 - DNA, 20 bp, Artificial Sequence
  Antisense compound
aaattaattttacacattag

SEQ ID NO: 29665 - DNA, 20 bp, Artificial Sequence
  Antisense compound
aaaattaattttacacatta

SEQ ID NO: 29666 - DNA, 20 bp, Artificial Sequence
  Antisense compound
taaaattaattttacacatt

SEQ ID NO: 29667 - DNA, 20 bp, Artificial Sequence
  Antisense compound
ctaaaattaattttacacat

SEQ ID NO: 29668 - DNA, 20 bp, Artificial Sequence
  Antisense compound
actaaaattaattttacaca

SEQ ID NO: 29669 - DNA, 20 bp, Artificial Sequence
  Antisense compound
tactaaaattaattttacac

SEQ ID NO: 29670 - DNA, 20 bp, Artificial Sequence
  Antisense compound
ctactaaaattaattttaca

SEQ ID NO: 29671 - DNA, 20 bp, Artificial Sequence
  Antisense compound
actactaaaattaattttac

SEQ ID NO: 29672 - DNA, 20 bp, Artificial Sequence
  Antisense compound
cactactaaaattaatttta

SEQ ID NO: 29673 - DNA, 20 bp, Artificial Sequence
  Antisense compound
gcactactaaaattaatttt

SEQ ID NO: 29674 - DNA, 20 bp, Artificial Sequence
  Antisense compound
agcactactaaaattaattt

SEQ ID NO: 29675 - DNA, 20 bp, Artificial Sequence
  Antisense compound
tagcactactaaaattaatt

SEQ ID NO: 29676 - DNA, 20 bp, Artificial Sequence
  Antisense compound
atagcactactaaaattaat

SEQ ID NO: 29677 - DNA, 20 bp, Artificial Sequence
  Antisense compound
gatagcactactaaaattaa

SEQ ID NO: 29678 - DNA, 20 bp, Artificial Sequence
  Antisense compound
ggatagcactactaaaatta

SEQ ID NO: 29679 - DNA, 20 bp, Artificial Sequence
  Antisense compound
gggatagcactactaaaatt

SEQ ID NO: 29680 - DNA, 20 bp, Artificial Sequence
  Antisense compound
ggggatagcactactaaaat

SEQ ID NO: 29681 - DNA, 20 bp, Artificial Sequence
  Antisense compound
tggggatagcactactaaaa

SEQ ID NO: 29682 - DNA, 20 bp, Artificial Sequence
  Antisense compound
atggggatagcactactaaa

SEQ ID NO: 29683 - DNA, 20 bp, Artificial Sequence
  Antisense compound
catggggatagcactactaa

SEQ ID NO: 29684 - DNA, 20 bp, Artificial Sequence
  Antisense compound
acatggggatagcactacta

SEQ ID NO: 29685 - DNA, 20 bp, Artificial Sequence
  Antisense compound
cacatggggatagcactact

SEQ ID NO: 29686 - DNA, 20 bp, Artificial Sequence
  Antisense compound
tcacatggggatagcactac

SEQ ID NO: 29687 - DNA, 20 bp, Artificial Sequence
  Antisense compound
atcacatggggatagcacta

SEQ ID NO: 29688 - DNA, 20 bp, Artificial Sequence
  Antisense compound
aatcacatggggatagcact

SEQ ID NO: 29689 - DNA, 20 bp, Artificial Sequence
  Antisense compound
aaatcacatggggatagcac

SEQ ID NO: 29690 - DNA, 20 bp, Artificial Sequence
  Antisense compound
aaaatcacatggggatagca

SEQ ID NO: 29691 - DNA, 20 bp, Artificial Sequence
  Antisense compound
taaaatcacatggggatagc

SEQ ID NO: 29692 - DNA, 20 bp, Artificial Sequence
  Antisense compound
ttaaaatcacatggggatag

SEQ ID NO: 29693 - DNA, 20 bp, Artificial Sequence
  Antisense compound
attaaaatcacatggggata

SEQ ID NO: 29694 - DNA, 20 bp, Artificial Sequence
  Antisense compound
tattaaaatcacatggggat

SEQ ID NO: 29695 - DNA, 20 bp, Artificial Sequence
  Antisense compound
ctattaaaatcacatgggga

SEQ ID NO: 29696 - DNA, 20 bp, Artificial Sequence
  Antisense compound
gctattaaaatcacatgggg

SEQ ID NO: 29697 - DNA, 20 bp, Artificial Sequence
  Antisense compound
agctattaaaatcacatggg

SEQ ID NO: 29698 - DNA, 20 bp, Artificial Sequence
  Antisense compound
aagctattaaaatcacatgg

SEQ ID NO: 29699 - DNA, 20 bp, Artificial Sequence
  Antisense compound
gaagctattaaaatcacatg

SEQ ID NO: 29700 - DNA, 20 bp, Artificial Sequence
  Antisense compound
agaagctattaaaatcacat

SEQ ID NO: 29701 - DNA, 20 bp, Artificial Sequence
  Antisense compound
aagaagctattaaaatcaca

SEQ ID NO: 29702 - DNA, 20 bp, Artificial Sequence
  Antisense compound
taagaagctattaaaatcac

SEQ ID NO: 29703 - DNA, 20 bp, Artificial Sequence
  Antisense compound
ctaagaagctattaaaatca

SEQ ID NO: 29704 - DNA, 20 bp, Artificial Sequence
  Antisense compound
cctaagaagctattaaaatc

SEQ ID NO: 29705 - DNA, 20 bp, Artificial Sequence
  Antisense compound
tcctaagaagctattaaaat

SEQ ID NO: 29706 - DNA, 20 bp, Artificial Sequence
  Antisense compound
ctcctaagaagctattaaaa

SEQ ID NO: 29707 - DNA, 20 bp, Artificial Sequence
  Antisense compound
tctcctaagaagctattaaa

SEQ ID NO: 29708 - DNA, 20 bp, Artificial Sequence
  Antisense compound
ttctcctaagaagctattaa

SEQ ID NO: 29709 - DNA, 20 bp, Artificial Sequence
  Antisense compound
attctcctaagaagctatta

SEQ ID NO: 29710 - DNA, 20 bp, Artificial Sequence
  Antisense compound
cattctcctaagaagctatt

SEQ ID NO: 29711 - DNA, 20 bp, Artificial Sequence
  Antisense compound
tcattctcctaagaagctat

SEQ ID NO: 29712 - DNA, 20 bp, Artificial Sequence
  Antisense compound
gtcattctcctaagaagcta

SEQ ID NO: 29713 - DNA, 20 bp, Artificial Sequence
  Antisense compound
tgtcattctcctaagaagct

SEQ ID NO: 29714 - DNA, 20 bp, Artificial Sequence
  Antisense compound
ttgtcattctcctaagaagc

SEQ ID NO: 29715 - DNA, 20 bp, Artificial Sequence
  Antisense compound
tttgtcattctcctaagaag

SEQ ID NO: 29716 - DNA, 20 bp, Artificial Sequence
  Antisense compound
ttttgtcattctcctaagaa

SEQ ID NO: 29717 - DNA, 20 bp, Artificial Sequence
  Antisense compound
tttttgtcattctcctaaga

SEQ ID NO: 29718 - DNA, 20 bp, Artificial Sequence
  Antisense compound
ttttttgtcattctcctaag

SEQ ID NO: 29719 - DNA, 20 bp, Artificial Sequence
  Antisense compound
tttttttgtcattctcctaa

SEQ ID NO: 29720 - DNA, 20 bp, Artificial Sequence
  Antisense compound
ttttttttgtcattctccta

SEQ ID NO: 29721 - DNA, 20 bp, Artificial Sequence
  Antisense compound
tttttttttgtcattctcct

SEQ ID NO: 29722 - DNA, 20 bp, Artificial Sequence
  Antisense compound
ttttttttttgtcattctcc

SEQ ID NO: 29723 - DNA, 20 bp, Artificial Sequence
  Antisense compound
tttttttttttgtcattctc

SEQ ID NO: 29724 - DNA, 20 bp, Artificial Sequence
  Antisense compound
ttttttttttttgtcattct

SEQ ID NO: 29725 - DNA, 20 bp, Artificial Sequence
  Antisense compound
tttttttttttttgtcattc

SEQ ID NO: 29726 - DNA, 20 bp, Artificial Sequence
  Antisense compound
ttttttttttttttgtcatt

SEQ ID NO: 29727 - DNA, 20 bp, Artificial Sequence
  Antisense compound
tttttttttttttttgtcat

SEQ ID NO: 29728 - DNA, 20 bp, Artificial Sequence
  Antisense compound
ttttttttttttttttgtca

SEQ ID NO: 29729 - DNA, 20 bp, Artificial Sequence
  Antisense compound
tttttttttttttttttgtc

SEQ ID NO: 29730 - DNA, 20 bp, Artificial Sequence
  Antisense compound
ttttttttttttttttttgt

SEQ ID NO: 29731 - DNA, 20 bp, Artificial Sequence
  Antisense compound
tttttttttttttttttttg

SEQ ID NO: 29732 - DNA, 20 bp, Artificial Sequence
  Antisense compound
tttttttttttttttttttt

SEQ ID NO: 29733 - DNA, 20 bp, Artificial Sequence
  Antisense compound
tttttttttttttttttttt

SEQ ID NO: 29734 - DNA, 20 bp, Artificial Sequence
  Antisense compound
tttttttttttttttttttt

SEQ ID NO: 29735 - DNA, 20 bp, Artificial Sequence
  Antisense compound
tttttttttttttttttttt

SEQ ID NO: 29736 - DNA, 20 bp, Artificial Sequence
  Antisense compound
tttttttttttttttttttt

SEQ ID NO: 29737 - DNA, 29727 bp, SARS Coronavirus
atattaggtttttacctacccaggaaaagccaaccaacctcgatctcttgtagatctgttctctaaacgaactttaaaatctgtgtagctgtcgctcggctgcatgcctagtgcacctacgcagtataaacaataataaattttactgtcgttgacaagaaacgagtaactcgtccctcttctgcagactgcttacggtttcgtccgtgttgcagtcgatcatcagcatacctaggtttcgtccgggtgtgaccgaaaggtaagatggagagccttgttcttggtgtcaacgagaaaacacacgtccaactcagtttgcctgtccttcaggttagagacgtgctagtgcgtggcttcggggactctgtggaagaggccctatcggaggcacgtgaacacctcaaaaatggcacttgtggtctagtagagctggaaaaaggcgtactgccccagcttgaacagccctatgtgttcattaaacgttctgatgccttaagcaccaatcacggccacaaggtcgttgagctggttgcagaaatggacggcattcagtacggtcgtagcggtataacactgggagtactcgtgccacatgtgggcgaaaccccaattgcataccgcaatgttcttcttcgtaagaacggtaataagggagccggtggtcatagctatggcatcgatctaaagtcttatgacttaggtgacgagcttggcactgatcccattgaagattatgaacaaaactggaacactaagcatggcagtggtgcactccgtgaactcactcgtgagctcaatggaggtgcagtcactcgctatgtcgacaacaatttctgtggcccagatgggtaccctcttgattgcatcaaagattttctcgcacgcgcgggcaagtcaatgtgcactctttccgaacaacttgattacatcgagtcgaagagaggtgtctactgctgccgtgaccatgagcatgaaattgcctggttcactgagcgctctgataagagctacgagcaccagacacccttcgaaattaagagtgccaagaaatttgacactttcaaaggggaatgcccaaagtttgtgtttcctcttaactcaaaagtcaaagtcattcaaccacgtgttgaaaagaaaaagactgagggtttcatggggcgtatacgctctgtgtaccctgttgcatctccacaggagtgtaacaatatgcacttgtctaccttgatgaaatgtaatcattgcgatgaagtttcatggcagacgtgcgactttctgaaagccacttgtgaacattgtggcactgaaaatttagttattgaaggacctactacatgtgggtacctacctactaatgctgtagtgaaaatgccatgtcctgcctgtcaagacccagagattggacctgagcatagtgttgcagattatcacaaccactcaaacattgaaactcgactccgcaagggaggtaggactagatgttttggaggctgtgtgtttgcctatgttggctgctataataagcgtgcctactgggttcctcgtgctagtgctgatattggctcaggccatactggcattactggtgacaatgtggagaccttgaatgaggatctccttgagatactgagtcgtgaacgtgttaacattaacattgttggcgattttcatttgaatgaagaggttgccatcattttggcatctttctctgcttctacaagtgcctttattgacactataaagagtcttgattacaagtctttcaaaaccattgttgagtcctgcggtaactataaagttaccaagggaaagcccgtaaaaggtgcttggaacattggacaacagagatcagttttaacaccactgtgtggttttccctcacaggctgctggtgttatcagatcaatttttgcgcgcacacttgatgcagcaaaccactcaattcctgatttgcaaagagcagctgtcaccatacttgatggtatttctgaacagtcattacgtcttgtcgacgccatggtttatacttcagacctgctcaccaacagtgtcattattatggcatatgtaactggtggtcttgtacaacagacttctcagtggttgtctaatcttttgggcactactgttgaaaaactcaggcctatctttgaatggattgaggcgaaacttagtgcaggagttgaatttctcaaggatgcttgggagattctcaaatttctcattacaggtgtttttgacatcgtcaagggtcaaatacaggttgcttcagataacatcaaggattgtgtaaaatgcttcattgatgttgttaacaaggcactcgaaatgtgcattgatcaagtcactatcgctggcgcaaagttgcgatcactcaacttaggtgaagtcttcatcgctcaaagcaagggactttaccgtcagtgtatacgtggcaaggagcagctgcaactactcatgcctcttaaggcaccaaaagaagtaacctttcttgaaggtgattcacatgacacagtacttacctctgaggaggttgttctcaagaacggtgaactcgaagcactcgagacgcccgttgatagcttcacaaatggagctatcgttggcacaccagtctgtgtaaatggcctcatgctcttagagattaaggacaaagaacaatactgcgcattgtctcctggtttactggctacaaacaatgtctttcgcttaaaagggggtgcaccaattaaaggtgtaacctttggagaagatactgtttgggaagttcaaggttacaagaatgtgagaatcacatttgagcttgatgaacgtgttgacaaagtgcttaatgaaaagtgctctgtctacactgttgaatccggtaccgaagttactgagtttgcatgtgttgtagcagaggctgttgtgaagactttacaaccagtttctgatctccttaccaacatgggtattgatcttgatgagtggagtgtagctacattctacttatttgatgatgctggtgaagaaaacttttcatcacgtatgtattgttccttttaccctccagatgaggaagaagaggacgatgcagagtgtgaggaagaagaaattgatgaaacctgtgaacatgagtacggtacagaggatgattatcaaggtctccctctggaatttggtgcctcagctgaaacagttcgagttgaggaagaagaagaggaagactggctggatgatactactgagcaatcagagattgagccagaaccagaacctacacctgaagaaccagttaatcagtttactggttatttaaaacttactgacaatgttgccattaaatgtgttgacatcgttaaggaggcacaaagtgctaatcctatggtgattgtaaatgctgctaacatacacctgaaacatggtggtggtgtagcaggtgcactcaacaaggcaaccaatggtgccatgcaaaaggagagtgatgattacattaagctaaatggccctcttacagtaggagggtcttgtttgctttctggacataatcttgctaagaagtgtctgcatgttgttggacctaacctaaatgcaggtgaggacatccagcttcttaaggcagcatatgaaaatttcaattcacaggacatcttacttgcaccattgttgtcagcaggcatatttggtgctaaaccacttcagtctttacaagtgtgcgtgcagacggttcgtacacaggtttatattgcagtcaatgacaaagctctttatgagcaggttgtcatggattatcttgataacctgaagcctagagtggaagcacctaaacaagaggagccaccaaacacagaagattccaaaactgaggagaaatctgtcgtacagaagcctgtcgatgtgaagccaaaaattaaggcctgcattgatgaggttaccacaacactggaagaaactaagtttcttaccaataagttactcttgtttgctgatatcaatggtaagctttaccatgattctcagaacatgcttagaggtgaagatatgtctttccttgagaaggatgcaccttacatggtaggtgatgttatcactagtggtgatatcacttgtgttgtaataccctccaaaaaggctggtggcactactgagatgctctcaagagctttgaagaaagtgccagttgatgagtatataaccacgtaccctggacaaggatgtgctggttatacacttgaggaagctaagactgctcttaagaaatgcaaatctgcattttatgtactaccttcagaagcacctaatgctaaggaagagattctaggaactgtatcctggaatttgagagaaatgcttgctcatgctgaagagacaagaaaattaatgcctatatgcatggatgttagagccataatggcaaccatccaacgtaagtataaaggaattaaaattcaagagggcatcgttgactatggtgtccgattcttcttttatactagtaaagagcctgtagcttctattattacgaagctgaactctctaaatgagccgcttgtcacaatgccaattggttatgtgacacatggttttaatcttgaagaggctgcgcgctgtatgcgttctcttaaagctcctgccgtagtgtcagtatcatcaccagatgctgttactacatataatggatacctcacttcgtcatcaaagacatctgaggagcactttgtagaaacagtttctttggctggctcttacagagattggtcctattcaggacagcgtacagagttaggtgttgaatttcttaagcgtggtgacaaaattgtgtaccacactctggagagccccgtcgagtttcatcttgacggtgaggttctttcacttgacaaactaaagagtctcttatccctgcgggaggttaagactataaaagtgttcacaactgtggacaacactaatctccacacacagcttgtggatatgtctatgacatatggacagcagtttggtccaacatacttggatggtgctgatgttacaaaaattaaacctcatgtaaatcatgagggtaagactttctttgtactacctagtgatgacacactacgtagtgaagctttcgagtactaccatactcttgatgagagttttcttggtaggtacatgtctgctttaaaccacacaaagaaatggaaatttcctcaagttggtggtttaacttcaattaaatgggctgataacaattgttatttgtctagtgttttattagcacttcaacagcttgaagtcaaattcaatgcaccagcacttcaagaggcttattatagagcccgtgctggtgatgctgctaacttttgtgcactcatactcgcttacagtaataaaactgttggcgagcttggtgatgtcagagaaactatgacccatcttctacagcatgctaatttggaatctgcaaagcgagttcttaatgtggtgtgtaaacattgtggtcagaaaactactaccttaacgggtgtagaagctgtgatgtatatgggtactctatcttatgataatcttaagacaggtgtttccattccatgtgtgtgtggtcgtgatgctacacaatatctagtacaacaagagtcttcttttgttatgatgtctgcaccacctgctgagtataaattacagcaaggtacattcttatgtgcgaatgagtacactggtaactatcagtgtggtcattacactcatataactgctaaggagaccctctatcgtattgacggagctcaccttacaaagatgtcagagtacaaaggaccagtgactgatgttttctacaaggaaacatcttacactacaaccatcaagcctgtgtcgtataaactcgatggagttacttacacagagattgaaccaaaattggatgggtattataaaaaggataatgcttactatacagagcagcctatagaccttgtaccaactcaaccattaccaaatgcgagttttgataatttcaaactcacatgttctaacacaaaatttgctgatgatttaaatcaaatgacaggcttcacaaagccagcttcacgagagctatctgtcacattcttcccagacttgaatggcgatgtagtggctattgactatagacactattcagcgagtttcaagaaaggtgctaaattactgcataagccaattgtttggcacattaaccaggctacaaccaagacaacgttcaaaccaaacacttggtgtttacgttgtctttggagtacaaagccagtagatacttcaaattcatttgaagttctggcagtagaagacacacaaggaatggacaatcttgcttgtgaaagtcaacaacccacctctgaagaagtagtggaaaatcctaccatacagaaggaagtcatagagtgtgacgtgaaaactaccgaagttgtaggcaatgtcatacttaaaccatcagatgaaggtgttaaagtaacacaagagttaggtcatgaggatcttatggctgcttatgtggaaaacacaagcattaccattaagaaacctaatgagctttcactagccttaggtttaaaaacaattgccactcatggtattgctgcaattaatagtgttccttggagtaaaattttggcttatgtcaaaccattcttaggacaagcagcaattacaacatcaaattgcgctaagagattagcacaacgtgtgtttaacaattatatgccttatgtgtttacattattgttccaattgtgtacttttactaaaagtaccaattctagaattagagcttcactacctacaactattgctaaaaatagtgttaagagtgttgctaaattatgtttggatgccggcattaattatgtgaagtcacccaaattttctaaattgttcacaatcgctatgtggctattgttgttaagtatttgcttaggttctctaatctgtgtaactgctgcttttggtgtactcttatctaattttggtgctccttcttattgtaatggcgttagagaattgtatcttaattcgtctaacgttactactatggatttctgtgaaggttcttttccttgcagcatttgtttaagtggattagactcccttgattcttatccagctcttgaaaccattcaggtgacgatttcatcgtacaagctagacttgacaattttaggtctggccgctgagtgggttttggcatatatgttgttcacaaaattcttttatttattaggtctttcagctataatgcaggtgttctttggctattttgctagtcatttcatcagcaattcttggctcatgtggtttatcattagtattgtacaaatggcacccgtttctgcaatggttaggatgtacatcttctttgcttctttctactacatatggaagagctatgttcatatcatggatggttgcacctcttcgacttgcatgatgtgctataagcgcaatcgtgccacacgcgttgagtgtacaactattgttaatggcatgaagagatctttctatgtctatgcaaatggaggccgtggcttctgcaagactcacaattggaattgtctcaattgtgacacattttgcactggtagtacattcattagtgatgaagttgctcgtgatttgtcactccagtttaaaagaccaatcaaccctactgaccagtcatcgtatattgttgatagtgttgctgtgaaaaatggcgcgcttcacctctactttgacaaggctggtcaaaagacctatgagagacatccgctctcccattttgtcaatttagacaatttgagagctaacaacactaaaggttcactgcctattaatgtcatagtttttgatggcaagtccaaatgcgacgagtctgcttctaagtctgcttctgtgtactacagtcagctgatgtgccaacctattctgttgcttgaccaagttcttgtatcagacgttggagatagtactgaagtttccgttaagatgtttgatgcttatgtcgacaccttttcagcaacttttagtgttcctatggaaaaacttaaggcacttgttgctacagctcacagcgagttagcaaagggtgtagctttagatggtgtcctttctacattcgtgtcagctgcccgacaaggtgttgttgataccgatgttgacacaaaggatgttattgaatgtctcaaactttcacatcactctgacttagaagtgacaggtgacagttgtaacaatttcatgctcacctataataaggttgaaaacatgacgcccagagatcttggcgcatgtattgactgtaatgcaaggcatatcaatgcccaagtagcaaaaagtcacaatgtttcactcatctggaatgtaaaagactacatgtctttatctgaacagctgcgtaaacaaattcgtagtgctgccaagaagaacaacataccttttagactaacttgtgctacaactagacaggttgtcaatgtcataactactaaaatctcactcaagggtggtaagattgttagtacttgttttaaacttatgcttaaggccacattattgtgcgttcttgctgcattggtttgttatatcgttatgccagtacatacattgtcaatccatgatggttacacaaatgaaatcattggttacaaagccattcaggatggtgtcactcgtgacatcatttctactgatgattgttttgcaaataaacatgctggttttgacgcatggtttagccagcgtggtggttcatacaaaaatgacaaaagctgccctgtagtagctgctatcattacaagagagattggtttcatagtgcctggcttaccgggtactgtgctgagagcaatcaatggtgacttcttgcattttctacctcgtgtttttagtgctgttggcaacatttgctacacaccttccaaactcattgagtatagtgattttgctacctctgcttgcgttcttgctgctgagtgtacaatttttaaggatgctatgggcaaacctgtgccatattgttatgacactaatttgctagagggttctatttcttatagtgagcttcgtccagacactcgttatgtgcttatggatggttccatcatacagtttcctaacacttacctggagggttctgttagagtagtaacaacttttgatgctgagtactgtagacatggtacatgcgaaaggtcagaagtaggtatttgcctatctaccagtggtagatgggttcttaataatgagcattacagagctctatcaggagttttctgtggtgttgatgcgatgaatctcatagctaacatctttactcctcttgtgcaacctgtgggtgctttagatgtgtctgcttcagtagtggctggtggtattattgccatattggtgacttgtgctgcctactactttatgaaattcagacgtgtttttggtgagtacaaccatgttgttgctgctaatgcacttttgtttttgatgtctttcactatactctgtctggtaccagcttacagctttctgccgggagtctactcagtcttttacttgtacttgacattctatttcaccaatgatgtttcattcttggctcaccttcaatggtttgccatgttttctcctattgtgcctttttggataacagcaatctatgtattctgtatttctctgaagcactgccattggttctttaacaactatcttaggaaaagagtcatgtttaatggagttacatttagtaccttcgaggaggctgctttgtgtacctttttgctcaacaaggaaatgtacctaaaattgcgtagcgagacactgttgccacttacacagtataacaggtatcttgctctatataacaagtacaagtatttcagtggagccttagatactaccagctatcgtgaagcagcttgctgccacttagcaaaggctctaaatgactttagcaactcaggtgctgatgttctctaccaaccaccacagacatcaatcacttctgctgttctgcagagtggttttaggaaaatggcattcccgtcaggcaaagttgaagggtgcatggtacaagtaacctgtggaactacaactcttaatggattgtggttggatgacacagtatactgtccaagacatgtcatttgcacagcagaagacatgcttaatcctaactatgaagatctgctcattcgcaaatccaaccatagctttcttgttcaggctggcaatgttcaacttcgtgttattggccattctatgcaaaattgtctgcttaggcttaaagttgatacttctaaccctaagacacccaagtataaatttgtccgtatccaacctggtcaaacattttcagttctagcatgctacaatggttcaccatctggtgtttatcagtgtgccatgagacctaatcataccattaaaggttctttccttaatggatcatgtggtagtgttggttttaacattgattatgattgcgtgtctttctgctatatgcatcatatggagcttccaacaggagtacacgctggtactgacttagaaggtaaattctatggtccatttgttgacagacaaactgcacaggctgcaggtacagacacaaccataacattaaatgttttggcatggctgtatgctgctgttatcaatggtgataggtggtttcttaatagattcaccactactttgaatgactttaaccttgtggcaatgaagtacaactatgaacctttgacacaagatcatgttgacatattgggacctctttctgctcaaacaggaattgccgtcttagatatgtgtgctgctttgaaagagctgctgcagaatggtatgaatggtcgtactatccttggtagcactattttagaagatgagtttacaccatttgatgttgttagacaatgctctggtgttaccttccaaggtaagttcaagaaaattgttaagggcactcatcattggatgcttttaactttcttgacatcactattgattcttgttcaaagtacacagtggtcactgtttttctttgtttacgagaatgctttcttgccatttactcttggtattatggcaattgctgcatgtgctatgctgcttgttaagcataagcacgcattcttgtgcttgtttctgttaccttctcttgcaacagttgcttactttaatatggtctacatgcctgctagctgggtgatgcgtatcatgacatggcttgaattggctgacactagcttgtctggttataggcttaaggattgtgttatgtatgcttcagctttagttttgcttattctcatgacagctcgcactgtttatgatgatgctgctagacgtgtttggacactgatgaatgtcattacacttgtttacaaagtctactatggtaatgctttagatcaagctatttccatgtgggccttagttatttctgtaacctctaactattctggtgtcgttacgactatcatgtttttagctagagctatagtgtttgtgtgtgttgagtattacccattgttatttattactggcaacaccttacagtgtatcatgcttgtttattgtttcttaggctattgttgctgctgctactttggccttttctgtttactcaaccgttacttcaggcttactcttggtgtttatgactacttggtctctacacaagaatttaggtatatgaactcccaggggcttttgcctcctaagagtagtattgatgctttcaagcttaacattaagttgttgggtattggaggtaaaccatgtatcaaggttgctactgtacagtctaaaatgtctgacgtaaagtgcacatctgtggtactgctctcggttcttcaacaacttagagtagagtcatcttctaaattgtgggcacaatgtgtacaactccacaatgatattcttcttgcaaaagacacaactgaagctttcgagaagatggtttctcttttgtctgttttgctatccatgcagggtgctgtagacattaataggttgtgcgaggaaatgctcgataaccgtgctactcttcaggctattgcttcagaatttagttctttaccatcatatgccgcttatgccactgcccaggaggcctatgagcaggctgtagctaatggtgattctgaagtcgttctcaaaaagttaaagaaatctttgaatgtggctaaatctgagtttgaccgtgatgctgccatgcaacgcaagttggaaaagatggcagatcaggctatgacccaaatgtacaaacaggcaagatctgaggacaagagggcaaaagtaactagtgctatgcaaacaatgctcttcactatgcttaggaagcttgataatgatgcacttaacaacattatcaacaatgcgcgtgatggttgtgttccactcaacatcataccattgactacagcagccaaactcatggttgttgtccctgattatggtacctacaagaacacttgtgatggtaacacctttacatatgcatctgcactctgggaaatccagcaagttgttgatgcggatagcaagattgttcaacttagtgaaattaacatggacaattcaccaaatttggcttggcctcttattgttacagctctaagagccaactcagctgttaaactacagaataatgaactgagtccagtagcactacgacagatgtcctgtgcggctggtaccacacaaacagcttgtactgatgacaatgcacttgcctactataacaattcgaagggaggtaggtttgtgctggcattactatcagaccaccaagatctcaaatgggctagattccctaagagtgatggtacaggtacaatttacacagaactggaaccaccttgtaggtttgttacagacacaccaaaagggcctaaagtgaaatacttgtacttcatcaaaggcttaaacaacctaaatagaggtatggtgctgggcagtttagctgctacagtacgtcttcaggctggaaatgctacagaagtacctgccaattcaactgtgctttccttctgtgcttttgcagtagaccctgctaaagcatataaggattacctagcaagtggaggacaaccaatcaccaactgtgtgaagatgttgtgtacacacactggtacaggacaggcaattactgtaacaccagaagctaacatggaccaagagtcctttggtggtgcttcatgttgtctgtattgtagatgccacattgaccatccaaatcctaaaggattctgtgacttgaaaggtaagtacgtccaaatacctaccacttgtgctaatgacccagtgggttttacacttagaaacacagtctgtaccgtctgcggaatgtggaaaggttatggctgtagttgtgaccaactccgcgaacccttgatgcagtctgcggatgcatcaacgtttttaaacgggtttgcggtgtaagtgcagcccgtcttacaccgtgcggcacaggcactagtactgatgtcgtctacagggcttttgatatttacaacgaaaaagttgctggttttgcaaagttcctaaaaactaattgctgtcgcttccaggagaaggatgaggaaggcaatttattagactcttactttgtagttaagaggcatactatgtctaactaccaacatgaagagactatttataacttggttaaagattgtccagcggttgctgtccatgactttttcaagtttagagtagatggtgacatggtaccacatatatcacgtcagcgtctaactaaatacacaatggctgatttagtctatgctctacgtcattttgatgagggtaattgtgatacattaaaagaaatactcgtcacatacaattgctgtgatgatgattatttcaataagaaggattggtatgacttcgtagagaatcctgacatcttacgcgtatatgctaacttaggtgagcgtgtacgccaatcattattaaagactgtacaattctgcgatgctatgcgtgatgcaggcattgtaggcgtactgacattagataatcaggatcttaatgggaactggtacgatttcggtgatttcgtacaagtagcaccaggctgcggagttcctattgtggattcatattactcattgctgatgcccatcctcactttgactagggcattggctgctgagtcccatatggatgctgatctcgcaaaaccacttattaagtgggatttgctgaaatatgattttacggaagagagactttgtctcttcgaccgttattttaaatattgggaccagacataccatcccaattgtattaactgtttggatgataggtgtatccttcattgtgcaaactttaatgtgttattttctactgtgtttccacctacaagttttggaccactagtaagaaaaatatttgtagatggtgttccttttgttgtttcaactggataccattttcgtgagttaggagtcgtacataatcaggatgtaaacttacatagctcgcgtctcagtttcaaggaacttttagtgtatgctgctgatccagctatgcatgcagcttctggcaatttattgctagataaacgcactacatgcttttcagtagctgcactaacaaacaatgttgcttttcaaactgtcaaacccggtaattttaataaagacttttatgactttgctgtgtctaaaggtttctttaaggaaggaagttctgttgaactaaaacacttcttctttgctcaggatggcaacgctgctatcagtgattatgactattatcgttataatctgccaacaatgtgtgatatcagacaactcctattcgtagttgaagttgttgataaatactttgattgttacgatggtggctgtattaatgccaaccaagtaatcgttaacaatctggataaatcagctggtttcccatttaataaatggggtaaggctagactttattatgactcaatgagttatgaggatcaagatgcacttttcgcgtatactaagcgtaatgtcatccctactataactcaaatgaatcttaagtatgccattagtgcaaagaatagagctcgcaccgtagctggtgtctctatctgtagtactatgacaaatagacagtttcatcagaaattattgaagtcaatagccgccactagaggagctactgtggtaattggaacaagcaagttttacggtggctggcataatatgttaaaaactgtttacagtgatgtagaaactccacaccttatgggttgggattatccaaaatgtgacagagccatgcctaacatgcttaggataatggcctctcttgttcttgctcgcaaacataacacttgctgtaacttatcacaccgtttctacaggttagctaacgagtgtgcgcaagtattaagtgagatggtcatgtgtggcggctcactatatgttaaaccaggtggaacatcatccggtgatgctacaactgcttatgctaatagtgtctttaacatttgtcaagctgttacagccaatgtaaatgcacttctttcaactgatggtaataagatagctgacaagtatgtccgcaatctacaacacaggctctatgagtgtctctatagaaatagggatgttgatcatgaattcgtggatgagttttacgcttacctgcgtaaacatttctccatgatgattctttctgatgatgccgttgtgtgctataacagtaactatgcggctcaaggtttagtagctagcattaagaactttaaggcagttctttattatcaaaataatgtgttcatgtctgaggcaaaatgttggactgagactgaccttactaaaggacctcacgaattttgctcacagcatacaatgctagttaaacaaggagatgattacgtgtacctgccttacccagatccatcaagaatattaggcgcaggctgttttgtcgatgatattgtcaaaacagatggtacacttatgattgaaaggttcgtgtcactggctattgatgcttacccacttacaaaacatcctaatcaggagtatgctgatgtctttcacttgtatttacaatacattagaaagttacatgatgagcttactggccacatgttggacatgtattccgtaatgctaactaatgataacacctcacggtactgggaacctgagttttatgaggctatgtacacaccacatacagtcttgcaggctgtaggtgcttgtgtattgtgcaattcacagacttcacttcgttgcggtgcctgtattaggagaccattcctatgttgcaagtgctgctatgaccatgtcatttcaacatcacacaaattagtgttgtctgttaatccctatgtttgcaatgccccaggttgtgatgtcactgatgtgacacaactgtatctaggaggtatgagctattattgcaagtcacataagcctcccattagttttccattatgtgctaatggtcaggtttttggtttatacaaaaacacatgtgtaggcagtgacaatgtcactgacttcaatgcgatagcaacatgtgattggactaatgctggcgattacatacttgccaacacttgtactgagagactcaagcttttcgcagcagaaacgctcaaagccactgaggaaacatttaagctgtcatatggtattgctactgtacgcgaagtactctctgacagagaattgcatctttcatgggaggttggaaaacctagaccaccattgaacagaaactatgtctttactggttaccgtgtaactaaaaatagtaaagtacagattggagagtacacctttgaaaaaggtgactatggtgatgctgttgtgtacagaggtactacgacatacaagttgaatgttggtgattactttgtgttgacatctcacactgtaatgccacttagtgcacctactctagtgccacaagagcactatgtgagaattactggcttgtacccaacactcaacatctcagatgagttttctagcaatgttgcaaattatcaaaaggtcggcatgcaaaagtactctacactccaaggaccacctggtactggtaagagtcattttgccatcggacttgctctctattacccatctgctcgcatagtgtatacggcatgctctcatgcagctgttgatgccctatgtgaaaaggcattaaaatatttgcccatagataaatgtagtagaatcatacctgcgcgtgcgcgcgtagagtgttttgataaattcaaagtgaattcaacactagaacagtatgttttctgcactgtaaatgcattgccagaaacaactgctgacattgtagtctttgatgaaatctctatggctactaattatgacttgagtgttgtcaatgctagacttcgtgcaaaacactacgtctatattggcgatcctgctcaattaccagccccccgcacattgctgactaaaggcacactagaaccagaatattttaattcagtgtgcagacttatgaaaacaataggtccagacatgttccttggaacttgtcgccgttgtcctgctgaaattgttgacactgtgagtgctttagtttatgacaataagctaaaagcacacaaggataagtcagctcaatgcttcaaaatgttctacaaaggtgttattacacatgatgtttcatctgcaatcaacagacctcaaataggcgttgtaagagaatttcttacacgcaatcctgcttggagaaaagctgtttttatctcaccttataattcacagaacgctgtagcttcaaaaatcttaggattgcctacgcagactgttgattcatcacagggttctgaatatgactatgtcatattcacacaaactactgaaacagcacactcttgtaatgtcaaccgcttcaatgtggctatcacaagggcaaaaattggcattttgtgcataatgtctgatagagatctttatgacaaactgcaatttacaagtctagaaataccacgtcgcaatgtggctacattacaagcagaaaatgtaactggactttttaaggactgtagtaagatcattactggtcttcatcctacacaggcacctacacacctcagcgttgatataaagttcaagactgaaggattatgtgttgacataccaggcataccaaaggacatgacctaccgtagactcatctctatgatgggtttcaaaatgaattaccaagtcaatggttaccctaatatgtttatcacccgcgaagaagctattcgtcacgttcgtgcgtggattggctttgatgtagagggctgtcatgcaactagagatgctgtgggtactaacctacctctccagctaggattttctacaggtgttaacttagtagctgtaccgactggttatgttgacactgaaaataacacagaattcaccagagttaatgcaaaacctccaccaggtgaccagtttaaacatcttataccactcatgtataaaggcttgccctggaatgtagtgcgtattaagatagtacaaatgctcagtgatacactgaaaggattgtcagacagagtcgtgttcgtcctttgggcgcatggctttgagcttacatcaatgaagtactttgtcaagattggacctgaaagaacgtgttgtctgtgtgacaaacgtgcaacttgcttttctacttcatcagatacttatgcctgctggaatcattctgtgggttttgactatgtctataacccatttatgattgatgttcagcagtggggctttacgggtaaccttcagagtaaccatgaccaacattgccaggtacatggaaatgcacatgtggctagttgtgatgctatcatgactagatgtttagcagtccatgagtgctttgttaagcgcgttgattggtctgttgaataccctattataggagatgaactgagggttaattctgcttgcagaaaagtacaacacatggttgtgaagtctgcattgcttgctgataagtttccagttcttcatgacattggaaatccaaaggctatcaagtgtgtgcctcaggctgaagtagaatggaagttctacgatgctcagccatgtagtgacaaagcttacaaaatagaggagctcttctattcttatgctacacatcacgataaattcactgatggtgtttgtttgttttggaattgtaacgttgatcgttacccagccaatgcaattgtgtgtaggtttgacacaagagtcttgtcaaacttgaacttaccaggctgtgatggtggtagtttgtatgtgaataagcatgcattccacactccagctttcgataaaagtgcatttactaatttaaagcaattgcctttcttttactattctgatagtccttgtgagtctcatggcaaacaagtagtgtcggatattgattatgttccactcaaatctgctacgtgtattacacgatgcaatttaggtggtgctgtttgcagacaccatgcaaatgagtaccgacagtacttggatgcatataatatgatgatttctgctggatttagcctatggatttacaaacaatttgatacttataacctgtggaatacatttaccaggttacagagtttagaaaatgtggcttataatgttgttaataaaggacactttgatggacacgccggcgaagcacctgtttccatcattaataatgctgtttacacaaaggtagatggtattgatgtggagatctttgaaaataagacaacacttcctgttaatgttgcatttgagctttgggctaagcgtaacattaaaccagtgccagagattaagatactcaataatttgggtgttgatatcgctgctaatactgtaatctgggactacaaaagagaagccccagcacatgtatctacaataggtgtctgcacaatgactgacattgccaagaaacctactgagagtgcttgttcttcacttactgtcttgtttgatggtagagtggaaggacaggtagacctttttagaaacgcccgtaatggtgttttaataacagaaggttcagtcaaaggtctaacaccttcaaagggaccagcacaagctagcgtcaatggagtcacattaattggagaatcagtaaaaacacagtttaactactttaagaaagtagacggcattattcaacagttgcctgaaacctactttactcagagcagagacttagaggattttaagcccagatcacaaatggaaactgactttctcgagctcgctatggatgaattcatacagcgatataagctcgagggctatgccttcgaacacatcgtttatggagatttcagtcatggacaacttggcggtcttcatttaatgataggcttagccaagcgctcacaagattcaccacttaaattagaggattttatccctatggacagcacagtgaaaaattacttcataacagatgcgcaaacaggttcatcaaaatgtgtgtgttctgtgattgatcttttacttgatgactttgtcgagataataaagtcacaagatttgtcagtgatttcaaaagtggtcaaggttacaattgactatgctgaaatttcattcatgctttggtgtaaggatggacatgttgaaaccttctacccaaaactacaagcaagtcaagcgtggcaaccaggtgttgcgatgcctaacttgtacaagatgcaaagaatgcttcttgaaaagtgtgaccttcagaattatggtgaaaatgctgttataccaaaaggaataatgatgaatgtcgcaaagtatactcaactgtgtcaatacttaaatacacttactttagctgtaccctacaacatgagagttattcactttggtgctggctctgataaaggagttgcaccaggtacagctgtgctcagacaatggttgccaactggcacactacttgtcgattcagatcttaatgacttcgtctccgacgcagattctactttaattggagactgtgcaacagtacatacggctaataaatgggaccttattattagcgatatgtatgaccctaggaccaaacatgtgacaaaagagaatgactctaaagaagggtttttcacttatctgtgtggatttataaagcaaaaactagccctgggtggttctatagctgtaaagataacagagcattcttggaatgctgacctttacaagcttatgggccatttctcatggtggacagcttttgttacaaatgtaaatgcatcatcatcggaagcatttttaattggggctaactatcttggcaagccgaaggaacaaattgatggctataccatgcatgctaactacattttctggaggaacacaaatcctatccagttgtcttcctattcactctttgacatgagcaaatttcctcttaaattaagaggaactgctgtaatgtctcttaaggagaatcaaatcaatgatatgatttattctcttctggaaaaaggtaggcttatcattagagaaaacaacagagttgtggtttcaagtgatattcttgttaacaactaaacgaacatgtttattttcttattatttcttactctcactagtggtagtgaccttgaccggtgcaccacttttgatgatgttcaagctcctaattacactcaacatacttcatctatgaggggggtttactatcctgatgaaatttttagatcagacactctttatttaactcaggatttatttcttccattttattctaatgttacagggtttcatactattaatcatacgtttggcaaccctgtcataccttttaaggatggtatttattttgctgccacagagaaatcaaatgttgtccgtggttgggtttttggttctaccatgaacaacaagtcacagtcggtgattattattaacaattctactaatgttgttatacgagcatgtaactttgaattgtgtgacaaccctttctttgctgtttctaaacccatgggtacacagacacatactatgatattcgataatgcatttaattgcactttcgagtacatatctgatgccttttcgcttgatgtttcagaaaagtcaggtaattttaaacacttacgagagtttgtgtttaaaaataaagatgggtttctctatgtttataagggctatcaacctatagatgtagttcgtgatctaccttctggttttaacactttgaaacctatttttaagttgcctcttggtattaacattacaaattttagagccattcttacagccttttcacctgctcaagacatttggggcacgtcagctgcagcctattttgttggctatttaaagccaactacatttatgctcaagtatgatgaaaatggtacaatcacagatgctgttgattgttctcaaaatccacttgctgaactcaaatgctctgttaagagctttgagattgacaaaggaatttaccagacctctaatttcagggttgttccctcaggagatgttgtgagattccctaatattacaaacttgtgtccttttggagaggtttttaatgctactaaattcccttctgtctatgcatgggagagaaaaaaaatttctaattgtgttgctgattactctgtgctctacaactcaacatttttttcaacctttaagtgctatggcgtttctgccactaagttgaatgatctttgcttctccaatgtctatgcagattcttttgtagtcaagggagatgatgtaagacaaatagcgccaggacaaactggtgttattgctgattataattataaattgccagatgatttcatgggttgtgtccttgcttggaatactaggaacattgatgctacttcaactggtaattataattataaatataggtatcttagacatggcaagcttaggccctttgagagagacatatctaatgtgcctttctcccctgatggcaaaccttgcaccccacctgctcttaattgttattggccattaaatgattatggtttttacaccactactggcattggctaccaaccttacagagttgtagtactttcttttgaacttttaaatgcaccggccacggtttgtggaccaaaattatccactgaccttattaagaaccagtgtgtcaattttaattttaatggactcactggtactggtgtgttaactccttcttcaaagagatttcaaccatttcaacaatttggccgtgatgtttctgatttcactgattccgttcgagatcctaaaacatctgaaatattagacatttcaccttgctcttttgggggtgtaagtgtaattacacctggaacaaatgcttcatctgaagttgctgttctatatcaagatgttaactgcactgatgtttctacagcaattcatgcagatcaactcacaccagcttggcgcatatattctactggaaacaatgtattccagactcaagcaggctgtcttataggagctgagcatgtcgacacttcttatgagtgcgacattcctattggagctggcatttgtgctagttaccatacagtttctttattacgtagtactagccaaaaatctattgtggcttatactatgtctttaggtgctgatagttcaattgcttactctaataacaccattgctatacctactaacttttcaattagcattactacagaagtaatgcctgtttctatggctaaaacctccgtagattgtaatatgtacatctgcggagattctactgaatgtgctaatttgcttctccaatatggtagcttttgcacacaactaaatcgtgcactctcaggtattgctgctgaacaggatcgcaacacacgtgaagtgttcgctcaagtcaaacaaatgtacaaaaccccaactttgaaatattttggtggttttaatttttcacaaatattacctgaccctctaaagccaactaagaggtcttttattgaggacttgctctttaataaggtgacactcgctgatgctggcttcatgaagcaatatggcgaatgcctaggtgatattaatgctagagatctcatttgtgcgcagaagttcaatggacttacagtgttgccacctctgctcactgatgatatgattgctgcctacactgctgctctagttagtggtactgccactgctggatggacatttggtgctggcgctgctcttcaaataccttttgctatgcaaatggcatataggttcaatggcattggagttacccaaaatgttctctatgagaaccaaaaacaaatcgccaaccaatttaacaaggcgattagtcaaattcaagaatcacttacaacaacatcaactgcattgggcaagctgcaagacgttgttaaccagaatgctcaagcattaaacacacttgttaaacaacttagctctaattttggtgcaatttcaagtgtgctaaatgatatcctttcgcgacttgataaagtcgaggcggaggtacaaattgacaggttaattacaggcagacttcaaagccttcaaacctatgtaacacaacaactaatcagggctgctgaaatcagggcttctgctaatcttgctgctactaaaatgtctgagtgtgttcttggacaatcaaaaagagttgacttttgtggaaagggctaccaccttatgtccttcccacaagcagccccgcatggtgttgtcttcctacatgtcacgtatgtgccatcccaggagaggaacttcaccacagcgccagcaatttgtcatgaaggcaaagcatacttccctcgtgaaggtgtttttgtgtttaatggcacttcttggtttattacacagaggaacttcttttctccacaaataattactacagacaatacatttgtctcaggaaattgtgatgtcgttattggcatcattaacaacacagtttatgatcctctgcaacctgagctcgactcattcaaagaagagctggacaagtacttcaaaaatcatacatcaccagatgttgatcttggcgacatttcaggcattaacgcttctgtcgtcaacattcaaaaagaaattgaccgcctcaatgaggtcgctaaaaatttaaatgaatcactcattgaccttcaagaattgggaaaatatgagcaatatattaaatggccttggtatgtttggctcggcttcattgctggactaattgccatcgtcatggttacaatcttgctttgttgcatgactagttgttgcagttgcctcaagggtgcatgctcttgtggttcttgctgcaagtttgatgaggatgactctgagccagttctcaagggtgtcaaattacattacacataaacgaacttatggatttgtttatgagattttttactcttggatcaattactgcacagccagtaaaaattgacaatgcttctcctgcaagtactgttcatgctacagcaacgataccgctacaagcctcactccctttcggatggcttgttattggcgttgcatttcttgctgtttttcagagcgctaccaaaataattgcgctcaataaaagatggcagctagccctttataagggcttccagttcatttgcaatttactgctgctatttgttaccatctattcacatcttttgcttgtcgctgcaggtatggaggcgcaatttttgtacctctatgccttgatatattttctacaatgcatcaacgcatgtagaattattatgagatgttggctttgttggaagtgcaaatccaagaacccattactttatgatgccaactactttgtttgctggcacacacataactatgactactgtataccatataacagtgtcacagatacaattgtcgttactgaaggtgacggcatttcaacaccaaaactcaaagaagactaccaaattggtggttattctgaggataggcactcaggtgttaaagactatgtcgttgtacatggctatttcaccgaagtttactaccagcttgagtctacacaaattactacagacactggtattgaaaatgctacattcttcatctttaacaagcttgttaaagacccaccgaatgtgcaaatacacacaatcgacggctcttcaggagttgctaatccagcaatggatccaatttatgatgagccgacgacgactactagcgtgcctttgtaagcacaagaaagtgagtacgaacttatgtactcattcgtttcggaagaaacaggtacgttaatagttaatagcgtacttctttttcttgctttcgtggtattcttgctagtcacactagccatccttactgcgcttcgattgtgtgcgtactgctgcaatattgttaacgtgagtttagtaaaaccaacggtttacgtctactcgcgtgttaaaaatctgaactcttctgaaggagttcctgatcttctggtctaaacgaactaactattattattattctgtttggaactttaacattgcttatcatggcagacaacggtactattaccgttgaggagcttaaacaactcctggaacaatggaacctagtaataggtttcctattcctagcctggattatgttactacaatttgcctattctaatcggaacaggtttttgtacataataaagcttgttttcctctggctcttgtggccagtaacacttgcttgttttgtgcttgctgctgtctacagaattaattgggtgactggcgggattgcgattgcaatggcttgtattgtaggcttgatgtggcttagctacttcgttgcttccttcaggctgtttgctcgtacccgctcaatgtggtcattcaacccagaaacaaacattcttctcaatgtgcctctccgggggacaattgtgaccagaccgctcatggaaagtgaacttgtcattggtgctgtgatcattcgtggtcacttgcgaatggccggacaccccctagggcgctgtgacattaaggacctgccaaaagagatcactgtggctacatcacgaacgctttcttattacaaattaggagcgtcgcagcgtgtaggcactgattcaggttttgctgcatacaaccgctaccgtattggaaactataaattaaatacagaccacgccggtagcaacgacaatattgctttgctagtacagtaagtgacaacagatgtttcatcttgttgacttccaggttacaatagcagagatattgattatcattatgaggactttcaggattgctatttggaatcttgacgttataataagttcaatagtgagacaattatttaagcctctaactaagaagaattattcggagttagatgatgaagaacctatggagttagattatccataaaacgaacatgaaaattattctcttcctgacattgattgtatttacatcttgcgagctatatcactatcaggagtgtgttagaggtacgactgtactactaaaagaaccttgcccatcaggaacatacgagggcaattcaccatttcaccctcttgctgacaataaatttgcactaacttgcactagcacacactttgcttttgcttgtgctgacggtactcgacatacctatcagctgcgtgcaagatcagtttcaccaaaacttttcatcagacaagaggaggttcaacaagagctctactcgccactttttctcattgttgctgctctagtatttttaatactttgcttcaccattaagagaaagacagaatgaatgagctcactttaattgacttctatttgtgctttttagcctttctgctattccttgttttaataatgcttattatattttggttttcactcgaaatccaggatctagaagaaccttgtaccaaagtctaaacgaacatgaaacttctcattgttttgacttgtatttctctatgcagttgcatatgcactgtagtacagcgctgtgcatctaataaacctcatgtgcttgaagatccttgtaaggtacaacactaggggtaatacttatagcactgcttggctttgtgctctaggaaaggttttaccttttcatagatggcacactatggttcaaacatgcacacctaatgttactatcaactgtcaagatccagctggtggtgcgcttatagctaggtgttggtaccttcatgaaggtcaccaaactgctgcatttagagacgtacttgttgttttaaataaacgaacaaattaaaatgtctgataatggaccccaatcaaaccaacgtagtgccccccgcattacatttggtggacccacagattcaactgacaataaccagaatggaggacgcaatggggcaaggccaaaacagcgccgaccccaaggtttacccaataatactgcgtcttggttcacagctctcactcagcatggcaaggaggaacttagattccctcgaggccagggcgttccaatcaacaccaatagtggtccagatgaccaaattggctactaccgaagagctacccgacgagttcgtggtggtgacggcaaaatgaaagagctcagccccagatggtacttctattacctaggaactggcccagaagcttcacttccctacggcgctaacaaagaaggcatcgtatgggttgcaactgagggagccttgaatacacccaaagaccacattggcacccgcaatcctaataacaatgctgccaccgtgctacaacttcctcaaggaacaacattgccaaaaggcttctacgcagagggaagcagaggcggcagtcaagcctcttctcgctcctcatcacgtagtcgcggtaattcaagaaattcaactcctggcagcagtaggggaaattctcctgctcgaatggctagcggaggtggtgaaactgccctcgcgctattgctgctagacagattgaaccagcttgagagcaaagtttctggtaaaggccaacaacaacaaggccaaactgtcactaagaaatctgctgctgaggcatctaaaaagcctcgccaaaaacgtactgccacaaaacagtacaacgtcactcaagcatttgggagacgtggtccagaacaaacccaaggaaatttcggggaccaagacctaatcagacaaggaactgattacaaacattggccgcaaattgcacaatttgctccaagtgcctctgcattctttggaatgtcacgcattggcatggaagtcacaccttcgggaacatggctgacttatcatggagccattaaattggatgacaaagatccacaattcaaagacaacgtcatactgctgaacaagcacattgacgcatacaaaacattcccaccaacagagcctaaaaaggacaaaaagaaaaagactgatgaagctcagcctttgccgcagagacaaaagaagcagcccactgtgactcttcttcctgcggctgacatggatgatttctccagacaacttcaaaattccatgagtggagcttctgctgattcaactcaggcataaacactcatgatgaccacacaaggcagatgggctatgtaaacgttttcgcaattccgtttacgatacatagtctactcttgtgcagaatgaattctcgtaactaaacagcacaagtaggtttagttaactttaatctcacatagcaatctttaatcaatgtgtaacattagggaggacttgaaagagccaccacattttcatcgaggccacgcggagtacgatcgagggtacagtgaataatgctagggagagctgcctatatggaagagccctaatgtgtaaaattaattttagtagtgctatccccatgtgattttaatagcttcttaggagaatgac

SEQ ID NO: 29738 - DNA, 29291 bp, SARS Coronavirus
  misc_feature 6112, 10070-10169, 10560, 10775, 10849-10948, 21378-21477, 22501,23795-23894, 25144-25243, 26737, 26823-26922, 28128, 28463: n = A,T,C or G
tagatctgttctctaaacgaactttaaaatctgtgtagctgtcgctcggctgcatgcctagtgcacctacgcagtataaacaataataaattttactgtcgttgacaagaaacgagtaactcgtccctcttctgcagactgcttacggtttcgtccgtgttgcagtcgatcatcagcatacctaggtttcgtccgggtgtgaccgaaaggtaagatggagagccttgttcttggtgtcaacgagaaaacacacgtccaactcagtttgcctgtccttcaggttagagacgtgctagtgcgtggcttcggggactctgtggaagaggccctatcggaggcacgtgaacacctcaaaaatggcacttgtggtctagtagagctggaaaaaggcgtactgccccagcttgaacagccctatgtgttcattaaacgttctgatgccttaagcaccaatcacggccacaaggtcgttgagctggttgcagaaatggacggcattcagtacggtcgtagcggtataacactgggagtactcgtgccacatgtgggcgaaaccccaattgcataccgcaatgttcttcttcgtaagaacggtaataagggagccggtggtcatagctatggcatcgatctaaagtcttatgacttaggtgacgagcttggcactgatcccattgaagattatgaacaaaactggaacactaagcatggcagtggtgcactccgtgaactcactcgtgagctcaatggaggtgcagtcactcgctatgtcgacaacaatttctgtggcccagatgggtaccctcttgattgcatcaaagattttctcgcacgcgcgggcaagtcaatgtgcactctttccgaacaacttgattacatcgagtcgaagagaggtgtctactgctgccgtgaccatgagcatgaaattgcctggttcactgagcgctctgataagagctacgagcaccagacacccttcgaaattaagagtgccaagaaatttgacactttcaaaggggaatgcccaaagtttgtgtttcctcttaactcaaaagtcaaagtcattcaaccacgtgttgaaaagaaaaagactgagggtttcatggggcgtatacgctctgtgtaccctgttgcatctccacaggagtgtaacaatatgcacttgtctaccttgatgaaatgtaatcattgcgatgaagtttcatggcagacgtgcgactttctgaaagccacttgtgaacattgtggcactgaaaatttagttattgaaggacctactacatgtgggtacctacctactaatgctgtagtgaaaatgccatgtcctgcctgtcaagacccagagattggacctgagcatagtgttgcagattatcacaaccactcaaacattgaaactcgactccgcaagggaggtaggactagatgttttggaggctgtgtgtttgcctatgttggctgctataataagcgtgcctactgggttcctcgtgctagtgctgatattggctcaggccatactggcattactggtgacaatgtggagaccttgaatgaggatctccttgagatactgagtcgtgaacgtgttaacattaacattgttggcgattttcatttgaatgaagaggttgccatcattttggcatctttctctgcttctacaagtgcctttattgacactataaagagtcttgattacaagtctttcaaaaccattgttgagtcctgcggtaactataaagttaccaagggaaagcccgtaaaaggtgcttggaacattggacaacagagatcagttttaacaccactgtgtggttttccctcacaggctgctggtgttatcagatcaatttttgcgcgcacacttgatgcagcaaaccactcaattcctgatttgcaaagagcagctgtcaccatacttgatggtatttctgaacagtcattacgtcttgtcgacgccatggtttatacttcagacctgctcaccaacagtgtcattattatggcatatgtaactggtggtcttgtacaacagacttctcagtggttgtctaatcttttgggcactactgttgaaaaactcaggcctatctttgaatggattgaggcgaaacttagtgcaggagttgaatttctcaaggatgcttgggagattctcaaatttctcattacaggtgtttttgacatcgtcaagggtcaaatacaggttgcttcagataacatcaaggattgtgtaaaatgcttcattgatgttgttaacaaggcactcgaaatgtgcattgatcaagtcactatcgctggcgcaaagttgcgatcactcaacttaggtgaagtcttcatcgctcaaagcaagggactttaccgtcagtgtatacgtggcaaggagcagctgcaactactcatgcctcttaaggcaccaaaagaagtaacctttcttgaaggtgattcacatgacacagtacttacctctgaggaggttgttctcaagaacggtgaactcgaagcactcgagacgcccgttgatagcttcacaaatggagctatcgttggcacaccagtctgtgtaaatggcctcatgctcttagagattaaggacaaagaacaatactgcgcattgtctcctggtttactggctacaaacaatgtctttcgcttaaaagggggtgcaccaattaaaggtgtaacctttggagaagatactgtttgggaagttcaaggttacaagaatgtgagaatcacatttgagcttgatgaacgtgttgacaaagtgcttaatgaaaagtgctctgtctacactgttgaatccggtaccgaagttactgagtttgcatgtgttgtagcagaggctgttgtgaagactttacaaccagtttctgatctccttaccaacatgggtattgatcttgatgagtggagtgtagctacattctacttatttgatgatgctggtgaagaaaacttttcatcacgtatgtattgttccttttaccctccagatgaggaagaagaggacgatgcagagtgtgaggaagaagaaattgatgaaacctgtgaacatgagtacggtacagaggatgattatcaaggtctccctctggaatttggtgcctcagctgaaacagttcgagttgaggaagaagaagaggaagactggctggatgatactactgagcaatcagagattgagccagaaccagaacctacacctgaagaaccagttaatcagtttactggttatttaaaacttactgacaatgttgccattaaatgtgttgacatcgttaaggaggcacaaagtgctaatcctatggtgattgtaaatgctgctaacatacacctgaaacatggtggtggtgtagcaggtgcactcaacaaggcaaccaatggtgccatgcaaaaggagagtgatgattacattaagctaaatggccctcttacagtaggagggtcttgtttgctttctggacataatcttgctaagaagtgtctgcatgttgttggacctaacctaaatgcaggtgaggacatccagcttcttaaggcagcatatgaaaatttcaattcacaggacatcttacttgcaccattgttgtcagcaggcatatttggtgctaaaccacttcagtctttacaagtgtgcgtgcagacggttcgtacacaggtttatattgcagtcaatgacaaagctctttatgagcaggttgtcatggattatcttgataacctgaagcctagagtggaagcacctaaacaagaggagccaccaaacacagaagattccaaaactgaggagaaatctgtcgtacagaagcctgtcgatgtgaagccaaaaattaaggcctgcattgatgaggttaccacaacactggaagaaactaagtttcttaccaataagttactcttgtttgctgatatcaatggtaagctttaccatgattctcagaacatgcttagaggtgaagatatgtctttccttgagaaggatgcaccttacatggtaggtgatgttatcactagtggtgatatcacttgtgttgtaataccctccaaaaaggctggtggcactactgagatgctctcaagagctttgaagaaagtgccagttgatgagtatataaccacgtaccctggacaaggatgtgctggttatacacttgaggaagctaagactgctcttaagaaatgcaaatctgcattttatgtactaccttcagaagcacctaatgctaaggaagagattctaggaactgtatcctggaatttgagagaaatgcttgctcatgctgaagagacaagaaaattaatgcctatatgcatggatgttagagccataatggcaaccatccaacgtaagtataaaggaattaaaattcaagagggcatcgttgactatggtgtccgattcttcttttatactagtaaagagcctgtagcttctattattacgaagctgaactctctaaatgagccgcttgtcacaatgccaattggttatgtgacacatggttttaatcttgaagaggctgcgcgctgtatgcgttctcttaaagctcctgccgtagtgtcagtatcatcaccagatgctgttactacatataatggatacctcacttcgtcatcaaagacatctgaggagcactttgtagaaacagtttctttggctggctcttacagagattggtcctattcaggacagcgtacagagttaggtgttgaatttcttaagcgtggtgacaaaattgtgtaccacactctggagagccccgtcgagtttcatcttgacggtgaggttctttcacttgacaaactaaagagtctcttatccctgcgggaggttaagactataaaagtgttcacaactgtggacaacactaatctccacacacagcttgtggatatgtctatgacatatggacagcagtttggtccaacatacttggatggtgctgatgttacaaaaattaaacctcatgtaaatcatgagggtaagactttctttgtactacctagtgatgacacactacgtagtgaagctttcgagtactaccatactcttgatgagagttttcttggtaggtacatgtctgctttaaaccacacaaagaaatggaaatttcctcaagttggtggtttaacttcaattaaatgggctgataacaattgttatttgtctagtgttttattagcacttcaacagcttgaagtcaaattcaatgcaccagcacttcaagaggcttattatagagcccgtgctggtgatgctgctaacttttgtgcactcatactcgcttacagtaataaaactgttggcgagcttggtgatgtcagagaaactatgacccatcttctacagcatgctaatttggaatctgcaaagcgagttcttaatgtggtgtgtaaacattgtggtcagaaaactactaccttaacgggtgtagaagctgtgatgtatatgggtactctatcttatgataatcttaagacaggtgtttccattccatgtgtgtgtggtcgtgatgctacacaatatctagtacaacaagagtcttcttttgttatgatgtctgcaccacctgctgagtataaattacagcaaggtacattcttatgtgcgaatgagtacactggtaactatcagtgtggtcattacactcatataactgctaaggagaccctctatcgtattgacggagctcaccttacaaagatgtcagagtacaaaggaccagtgactgatgttttctacaaggaaacatcttacactacaaccatcaagcctgtgtcgtataaactcgatggagttacttacacagagattgaaccaaaattggatgggtattataaaaaggataatgcttactatacagagcagcctatagaccttgtaccaactcaaccattaccaaatgcgagttttgataatttcaaactcacatgttctaacacaaaatttgctgatgatttaaatcaaatgacaggcttcacaaagccagcttcacgagagctatctgtcacattcttcccagacttgaatggcgatgtagtggctattgactatagacactattcagcgagtttcaagaaaggtgctaaattactgcataagccnattgtttggcacattaaccaggctacaaccaagacaacgttcaaaccaaacacttggtgtttacgttgtctttggagtacaaagccagtagatacttcaaattcatttgaagttctggcagtagaagacacacaaggaatggacaatcttgcttgtgaaagtcaacaacccacctctgaagaagtagtggaaaatcctaccatacagaaggaagtcatagagtgtgacgtgaaaactaccgaagttgtaggcaatgtcatacttaaaccatcagatgaaggtgttaaagtaacacaagagttaggtcatgaggatcttatggctgcttatgtggaaaacacaagcattaccattaagaaacctaatgagctttcactagccttaggtttaaaaacaattgccactcatggtattgctgcaattaatagtgttccttggagtaaaattttggcttatgtcaaaccattcttaggacaagcagcaattacaacatcaaattgcgctaagagattagcacaacgtgtgtttaacaattatatgccttatgtgtttacattattgttccaattgtgtacttttactaaaagtaccaattctagaattagagcttcactacctacaactattgctaaaaatagtgttaagagtgttgctaaattatgtttggatgccggcattaattatgtgaagtcacccaaattttctaaattgttcacaatcgctatgtggctattgttgttaagtatttgcttaggttctctaatctgtgtaactgctgcttttggtgtactcttatctaattttggtgctccttcttattgtaatggcgttagagaattgtatcttaattcgtctaacgttactactatggatttctgtgaaggttcttttccttgcagcatttgtttaagtggattagactcccttgattcttatccagctcttgaaaccattcaggtgacgatttcatcgtacaagctagacttgacaattttaggtctggccgctgagtgggttttggcatatatgttgttcacaaaattcttttatttattaggtctttcagctataatgcaggtgttctttggctattttgctagtcatttcatcagcaattcttggctcatgtggtttatcattagtattgtacaaatggcacccgtttctgcaatggttaggatgtacatcttctttgcttctttgctactacatatggaagagctatgttcatatcatggatggttgcacctcttcgacttgcatgatgtgctataagcgcaatcgtgccacacgcgttgagtgtacaactattgttaatggcatgaagagatctttctatgtctatgcaaatggaggccgtggcttctgcaagactcacaattggaattgtctcaattgtgacacattttgcactggtagtacattcattagtgatgaagttgctcgtgatttgtcactccagtttaaaagaccaatcaaccctactgaccagtcatcgtatattgttgatagtgttgctgtgaaaaatggcgcgcttcacctctactttgacaaggctggtcaaaagacctatgagagacatccgctctcccattttgtcaatttagacaatttgagagctaacaacactaaaggttcactgcctattaatgtcatagtttttgatggcaagtccaaatgcgacgagtctgcttctaagtctgcttctgtgtactacagtcagctgatgtgccaacctattctgttgcttgaccaagttcttgtatcagacgttggagatagtactgaagtttccgttaagatgtttgatgcttatgtcgacaccttttcagcaacttttagtgttcctatggaaaaacttaaggcacttgttgctacagctcacagcgagttagcaaagggtgtagctttagatggtgtcctttctacattcgtgtcagctgcccgacaaggtgttgttgaaaccgatgttgacacaaaggatgttattgaatgtctcaaactttcacatcactctgacttagaagtgacaggtgacagttgtaacaatttcatgctcacctataataaggttgaaaacatgacgcccagagatcttggcgcatgtattgactgtaatgcaaggcatatcaatgcccaagtagcaaaaagtcacaatgtttcactcatctggaatgtaaaagactacatgtctttatctgaacagctgcgtaaacaaattcgtagtgctgccaagaagaacaacataccttttagactaacttgtgctacaactagacaggttgtcaatgtcataactactaaaatctcactcaagggtggtaagattgttagtacttgttttaaacttatgcttaaggccacattattgtgcgttcttgctgcattggtttgttatatcgttatgccagtacatacattgtcaatccatgatggttacacaaatgaaatcattggttacaaagccattcaggatggtgtcactcgtgacatcatttctactgatgattgttttgcaaataaacatgctggttttgacgcatggtttagccagcgtggtggttcatacaaaaatgacaaaagctgccctgtagtagctgctatcattacaagagagattggtttcatagtgcctggcttaccgggtactgtgctgagagcaatcaatggtgacttcttgcattttctacctcgtgtttttagtgctgttggcaacatttgctacacaccttccaaactcattgagtatagtgattttgctacctctgcttgcgttcttgctgctgagtgtacaatttttaaggatgctatgggcaaacctgtgccatattgttatgacactaatttgctagagggttctatttcttatagtgagcttcgtccagacactcgttatgtgcttatggatggttccatcatacagtttcctaacacttacctggagggttctgttagagtagtaacaacttttgatgctgagtactgtagacatggtacatgcgaaaggtcagaagtaggtatttgcctatctaccagtggtagatgggttcttaataatgagcattacagagctctatcaggagttttctgtggtgttgatgcgatgaatctcatagctaacatctttactcctcttgtgcaacctgtgggtgctttagatgtgtctgcttcagtagtggctggtggtattattgccatattggtgacttgtgctgcctactactttatgaaattcagacgtgcttttggtgagtacaaccatgttgttgctgctaatgcacttttgtttttgatgtctttcactatactctgtctggtaccagcttacagctttctgccgggagtctactcagtcttttacttgtacttgacattctatttcaccaatgatgtttcattcttggctcaccttcaatggtttgccatgttttctcctattgtgcctttttggataacagcaatctatgtattctgtatttctctgaagcactgccattggttctttaacaactatcttaggaaaagagtcatgtttaatggagttacatttagtaccttcgaggaggctgctttgtgtacctttttgctcaacaaggaaatgtacctaaaattgcgtagcgagacactgttgccacttacacagtataacaggtatcttgctctatataacaagtacaagtatttcagtggagtcttagatactaccagctatcgtgaagcagcttgctgccacttagcaaaggctctaaatgactttagcaactcaggtgctgatgttctctaccaaccaccacagacatcaatcacttctgctgttctgcagagtggttttaggaaaatggcattcccgtcaggcaaagttgaagggtgcatggtacaagtaacctgtggaactacaactcttaatggattgtggttggatgacacagtatactgtccaagacatgtcatttgcacnnnnnnnnnnnnnnnnnnnnnnnnnnnnnnnnnnnnnnnnnnnnnnnnnnnnnnnnnnnnnnnnnnnnnnnnnnnnnnnnnnnnnnnnnnnnnnnnnnnngatctgctcattcgcaaatccaaccatagctttcttgttcaggctggcaatgttcaacttcgtgttattggccattctatgcaaaattgtctgcttaggcttaaagttgatacttctaaccctaagacacccaagtataaatttgtccgtatccaacctggtcaaacattttcagttctagcatgctacaatggttcaccatctggtgtttatcagtgtgccatgagacctaatcataccattaaaggttctttccttaatggatcatgtggtagtgttggttttaacattgattatgattgcgtgtctttctgctatatgcatcatatggagcttccaacaggagtacacgctggtactgacttagaaggtaaattctatggtccatttnttgacagacaaactgcacaggctgcaggtacagacacaaccataacattaaatgttttggcatggctgtatgctgctgttatcaatggtgataggtggtttcttaatagattcaccactactttgaatgactttaaccttgtggcaatgaagtacaactatgaacctttgacacaagatcatgttgacatattgggacctctttctgctcaaacnggaattgccgtcttagatatgtgtgctgctttgaaagagctgctgcagaatggtatgaatggtcgtactatccnnnnnnnnnnnnnnnnnnnnnnnnnnnnnnnnnnnnnnnnnnnnnnnnnnnnnnnnnnnnnnnnnnnnnnnnnnnnnnnnnnnnnnnnnnnnnnnnnnnncaaggtaagttcaagaaaattgttaagggcactcatcattggatgcttttaactttcttgacatcactattgattcttgttcaaagtacacagtggtcactgtttttcttgtttacgagaatgctttcttgccatttactcttggtattatggcaattgctgcatgtgctatgctgcttgttaagcataagcacgcattcttgtgcttgtttctgttaccttctcttgcaacagttgcttactttaatatggtctacatgcctgctagctgggtgatgcgtatcatgacatggcttgaattggctgacactagcttgtctggttataggcttaaggattgtgttatgtatgcttcagctttagttttgcttattctcatgacagctcgcactgtttatgatgatgctgctagacgtgtttggacactgatgaatgtcattacacttgtttacaaagtctactatggtaatgctttagatcaagctatttccatgtgggccttagttatttctgtaacctctaactattctggtgtcgttacgactatcatgtttttagctagagctatagtgtttgtgtgtgttgagtattacccattgttatttattactggcaacaccttacagtgtatcatgcttgtttattgtttcttaggctattgttgctgctgctactttggccttttctgtttactcaaccgttacttcaggcttactcttggtgtttatgactacttggtctctacacaagaatttaggtatataaactcccagggggcttttgcctcctaagagtagtattgatgctttcaagcttaacattaagttgttgggtattggaggtaaaccatgtatcaaggttgctactgtacagtctaaaatgtctgacgtaaagtgcacatctgtggtactagctctcgcgattcttcaaggcaacttagagtagagtcatcttctaaattgtgggcacaatgtgtacaactccacaatgatattcttcttgcaaaagacacaactgaagctttcgagaagatggtttctcttttgtctgttttgctatccatgcagggtgctgtagacattaataggttgtgcgaggaaatgctcgataaccgtgctactcttcaggctattgcttcagaatttagttctttaccatcatatgccgcttatgccactgcccaggaggcctatgagcaggctgtagctaatggtgattctgaagtcgttctcaaaaagttaaagaaatctttgaatgtggctaaatctgagtttgaccgtgatgctgccatgcaacgcaagttggaaaagatggcagatcaggctatgacccaaatgtacaaacaggcaagatctgaggacaagagggcaaaagtaactagtgctatgcaaacaatgctcttcactatgcttaggaagcttgataatgatgcacttaacaacattatcaacaatgcgcgtgatggttgtgttccactcaacatcataccattgactacagcagccaaactcatggttgttgtccctgattatggtacctacaagaacacttgtgatggtaacacctttacatatgcatctgcactctgggaaatccagcaagttgttgatgcggatagcaagattgttcaacttagtgaaattaacatggacaattcaccaaatttggcttggcctcttattgttacagctctaagagccaactcagctgttaaactacagaataatgaactgagtccagtagcactacgacagatgtcctgtgcggctggtaccacacaaacagcttgtactgatgacaatgcacttgcctactataacaattcgaagggaggtaggtttgtgctggcattactatcagaccaccaagatctcaaatgggctagattccctaagagtgatggtacaggtacaatttacacagaactggaaccaccttgtaggtttgttacagacacaccaaaagggcctaaagtgaaatacttgtacttcatcaaaggcttaaacaacctaaatagaggtatggtgctgggcagtttagctgctacagtacgtcttcaggctggaaatgctacagaagtacctgccaattcaactgtgctttccttctgtgcttttgcagtagaccctgctaaagcatataaggattacctagcaagtggaggacaaccaatcaccaactgtgtgaagatgttgtgtacacacactggtacaggacaggcaattactgtaacaccagaagctaacatggaccaagagtcctttggtggtgcttcatgttgtctgtattgtagatgccacattgaccatccaaatcctaaaggattctgtgacttgaaaggtaagtacgtccaaatacctaccacttgtgctaatgacccagtgggttttacacttagaaacacagtctgtaccgtctgcggaatgtggaaaggttatggctgtagttgtgaccaactccgcgaacccttgatgcagtctgcggatgcatcaacgtttttaaacgggtttgcggtgtaagtgcagcccgtcttacaccgtgcggcacaggcactagtactgatgtcgtctacagggcttttgatatttacaacgaaaaagttgctggttttgcaaagttcctaaaaactaattgctgtcgcttccaggagaaggatgaggaaggcaatttattagactcttactttgtagttaagaggcatactatgtctaactaccaacatgaagagactatttataacttggttaaagattgtccagcggttgctgtccatgactttttcaagtttagagtagatgtgacatggtaccacatatatcacgtcagcgtctaactaaatacacaatggctgatttagtctatgctctacgtcattttgatgagggtaattgtgatacattaaaagaaatactcgtcacatacaattgctgtgatgatgattatttcaataagaaggattggtatgacttcgtagagaatcctgacatcttacgcgtatatgctaacttaggtgagcgtgtacgccaatcattattaaagactgtacaattctgcgatgctatgcgtgatgcaggcattgtaggcgtactgacattagataatcaggatcttaatgggaactggtacgatttcggtgatttcgtacaagtagcaccaggctgcggagttcctattgtggattcatattactcattgctgatgcccatcctcactttgactagggcattggctgctgagtcccatatggatgctgatctcgcaaaaccacttattaagtgggatttgctgaaatatgattttacggaagagagactttgtctcttcgaccgttattttaaatattgggaccagacataccatcccaattgtattaactgtttggatgataggtgtatccttcattgtgcaaactttaatgtgttattttctactgtgtttccacctacaagttttggaccactagtaagaaaaatatttgtagatggtgttccttttgttgtttcaactggataccattttcgtgagttaggagtcgtacataatcaggatgtaaacttacatagctcgcgtctcagtttcaaggaacttttagtgtatgctgctgatccagctatgcatgcagcttctggcaatttattgctagataaacgcactacatgcttttcagtagctgcactaacaaacaatgttgcttttcaaactgtcaaacccggtaattttaataaagacttttatgactttgctgtgtctaaaggtttctttaaggaaggaagttctgttgaactaaaacacttcttctttgctcaggatggcaacgctgctatcagtgattatgactattatcgttataatctgccaacaatgtgtgatatcagacaactcctattcgtagttgaagttgttgataaatactttgattgttacgatggtggctgtattaatgccaaccaagtaatcgttaacaatctggataaatcagctggtttcccatttaataaatggggtaaggctagactttattatgactcaatgagttatgaggatcaagatgcacttttcgcgtatactaagcgtaatgtcatccctactataactcaaatgaatcttaagtatgccattagtgcaaagaatagagctcgcaccgtagctggtgtctctatctgtagtactatgacaaatagacagtttcatcagaaattattgaagtcaatagccgccactagaggagctactgtggtaattggaacaagcaagttttacggtggctggcataatatgttaaaaactgtttacagtgatgtagaaactccacaccttatgggttgggattatccaaaatgtgacagagccatgcctaacatgcttaggataatggcctctcttgttcttgctcgcaaacataacacttgctgtaacttatcacaccgtttctacaggttagctaacgagtgtgcgcaagtattaagtgagatggtcatgtgtggcggctcactatatgttaaaccaggtggaacatcatccggtgatgctacaactgcttatgctaatagtgtctttaacatttgtcaagctgttacagccaatgtaaatgcacttctttcaactgatggtaataagatagctgacaagtatgtccgcaatctacaacacaggctctatgagtgtctctatagaaatagggatgttgatcatgaattcgtggatgagttttacgcttacctgcgtaaacatttctccatgatgattctttctgatgatgccgttgtgtgctataacagtaactatgcggctcaaggtttagtagctagcattaagaactttaaggcagttctttattatcaaaataatgtgttcatgtctgaggcaaaatgttggactgagactgaccttactaaaggacctcacgaatttggctcacagcatacaatgctagttaaacaaggagatgattacgtgtacctgccttacccagatccatcaagaatattaggcgcaggctgttttgtcgatgatattgtcaaaacagatggtacacttatgattgaaaggttcgtgtcactggctattgatgcttacccacttacaaaacatcctaatcaggagtatgctgatgtctttcacttgtatttacaatacattagaaagttacatgatgagcttactggccacatgttggacatgtattccgtaatgctaactaatgataacacctcacggtactgggaacctgagttttatgaggctatgtacacaccacatacagtcttgcaggctgtaggtgcttgtgtattgtgcaattcacagacttcacttcgttgcggtgcctgtattaggagaccattcctatgttgcaagtgctgctatgaccatgtcatttcaacatcacacaaattagtgttgtctgttaatccctatgtttgcaatgccccaggttgtgatgtcactgatgtgacacaactgtatctaggaggtatgagctattattgcaagtcacataagcctcccattagttttccattatgtgctaatggtcaggtttttggtttatacaaaaacacatgtgtaggcagtgacaatgtcactgacttcaatgcgatagcaacatgtgattggactaatgctggcgattacatacttgccaacacttgtactgagagactcaagcttttcgcagcagaaacgctcaaagccactgaggaaacatttaagctgtcatatggtattgccactgtacgcgaagtactctctgacagagaattgcatctttcatgggaggttggaaaacctagaccaccattgaacagaaactatgtctttactggttaccgtgtaactaaaaatagtaaagtacagattggagagtacacctttgaaaaaggtgactatggtgatgctgttgtgtacagaggtactacgacatacaagttgaatgttggtgattactttgtgttgacatctcacactgtaatgccacttagtgcacctactctagtgccacaagagcactatgtgagaattactggcttgtacccaacactcaacatctcagatgagttttctagcaatgttgcaaattatcaaaaggtcggcatgcaaaagtactctacactccaaggaccacctggtactggtaagagtcattttgccatcggacttgctctctattacccatctgctcgcatagtgtatacggcatgctctcatgcagctgttgatgccctatgtgaaaaggcattaaaatatttgcccatagataaatgtagtagaatcatacctgcgcgtgcgcgcgtagagtgttttgataaattcaaagtgaattcaacactagaacagtatgttttctgcactgtaaatgcattgccagaaacaactgctgacattgtagtctttgatgaaatctctatggctactaattatgacttgagtgttgtcaatgctagacttcgtgcaaaacactacgtctatattggcgatcctgctcaattaccagccccccgcacattgctgactaaaggcacactagaaccagaatattttaattcagtgtgcagacttatgaaaacaataggtccagacatgttccttggaacttgtcgccgttgtcctgctgaaattgttgacactgtgagtgctttagtttatgacaataagctaaaagcacacaaggagaagtcagctcaatgcttcaaaatgttctacaaaggtgttattacacatgatgtttcatctgcaatcaacagacctcaaataggcgttgtaagagaatttcttacacgcaatcctgcttggagaaaagctgtttttatctcaccttataattcacagaacgctgtagcttcaaaaatcttaggattgcctacgcagactgttgattcatcacagggttctgaatatgactatgtcatattcacacaaactactgaaacagcacactcttgtaatgtcaaccgcttcaatgtggctatcacaagggcaaaaattggcattttgtgcataatgtctgatagagatctttatgacaaactgcaatttacaagtctagaaataccacgtcgcaatgtggctacattacaagcagaaaatgtaactggactttttaaggactgtagtaagatcattactggtcttcatcctacacaggcacctacacacctcagcgttgatataaagttcaagactgaaggattatgtgttgacataccaggcataccaaaggacatgacctaccgtagactcatctctatgatgggtttcaaaatgaattaccaagtcaatggttaccctaatatgtttatcacccgcgaagaagctattcgtcacgttcgtgcgtggattggctttgatgtagagggctgtcatgcaactagagatgctgtgggtactaacctacctctccagctaggattttctacaggtgttaacttagtagctgtaccgactggttatgttgacactgaaaataacacagaattcaccagagttaatgcaaaacctccaccaggtgaccagtttaaacatcttataccactcatgtataaaggcttgccctggaatgtagtgcgtattaagatagtacaaatgctcagtgatacactgaaaggattgtcagacagagtcgtgttcgtcctttgggcgcatggctttgagcttacatcaatgaagtactttgtcaagattggacctgaaagaacgtgttgtctgtgtgacaaacgtgcaacttgcttttctacttcatcagatacttatgcctgctggaatcattctgtgggttttgactatgtctataacccatttatgattgatgttcagcagtggggctttacgggtaaccttcagagtaaccatgaccaacattgccaggtacatggaaatgcacatgtggctagttgtgatgctatcatgactagatgtttagcagtccatgagtgctttgttaagcgcgttgattggtctgttgaataccctattataggagatgaactgagggttaattctgcttgcagaaaagtacaacacatggttgtgaagtctgcattgcttgctgataagtttccagttcttcatgacattggaaatccaaaggctatcaagtgtgtgcctcaggctgaagtagaatggaagttctacgatgctcagccatgtagtgacaaagcttacaaaatagaggaactcttctattcttatgctacacatcacgataaattcactgatggtgtttgtttgttttggaattgtaacgttgatcgttacccagccaatgcaattgtgtgtaggtttgacacaagagtcttgtcaaacttgaacttaccaggctgtgatggtggtagtttgtatgtgaataagcatgcattccacactccagctttcgataaaagtgcatttactaatttaaagcaattgcctttcttttactattctgatagtccttgtgagtctcatggcaaacaagtagtgtcggatattgattatgttccactcaaatctgctacgtgtattacacgatgcaatttaggtggtgctgtttgcagacaccatgcaaatgagtaccgacagtacttggatgcatataatatgatgatttctgctggatttagcctatggatttacaaacaatttgatacttataacctgtggaatacatttaccaggttacagagtttagaaaatgtggcttataatgttgttaataaaggacactttgatggacacgccggcgaagcacctgtttccatcattaataatgctgtttacacaaaggtagatggtattgatgtggagatctttgaaaataagacaacacttcctgttaatgttgcatttgagctttgggctaagcgtaacattaaaccagtgccagagattaagatactcaataatttgggtgttgatatcgctgctaatactgtaatctgggactacaaaagagaagccccagcacatgtgtctacaataggtgtctgcacaatgactgacattgccaagaaacctactgagagtgcttgttcttcacttactgtcttgtttgatggtagagtggaaggacaggtagacctttttagaaacgcccgtaatggtgttttaataacagaaggttcagtcaaaggtctaacaccttcaaagggaccagcacaagctagcgtcaatggagtcacattaattggagaatcagtaaaaacacagtttaactactttaagaaagtagacggcattattcaacagttgcctgaaacctactttactcagagcagagacttagaggattttaagcccagatcacaaatggaaactgactttctcgagctcgctatggatgaattcatacagcgatataagctcgagggctatgccttcgaacacatcgtttatggagatttcagtcatggacaacttggcggtcttcatttaatgataggcttagccaagcgctcacaagattcaccacttaaattagaggattttatccctattgacagcacagtgaaaaattacttcataacagatgcgcaaacaggttcatcaaaatgtgtgtgttctgtgattgatcttttacttgatgactttgtcgagataataaagtcacaagatttgtcagtgatttcaaaagtggtcaaggttacaattgactatgctgaaatttcattcatgctttggtgtaaggatggacatgttgaaaccttctacccaaaactacaagcaagtcaagcgtggcaaccaggtgttgcgatgcctaacttgtacaagatgcaaagaatgcttcttgaaaagtgtgaccttcagaattatggtgaaaatgctgttataccaaaaggaataatgatgaatgtcgcaaagtatactcaactgtgtcaatacttaaatacacttactttagctgtaccctacaacatgagagttattcactttggtgctggctctgataaaggagttgcaccaggtacagctgtgctcagacaatggttgccaactggcacactaacttgtcgattcagatcttaatgacttcgtctccgacgcagattctactttaattggagactgtgcaacagtacatacggctaataaatgggaccttattattagcgatatgtatgaccctaggaccaaacatgtgacaaaagagaatgactctaaagaagggtttttcacttatctgtgtggatttataaagcaaaaactagccctgggtggttctatagctgtaaagataacagagcattcttggaatgctgacctttacaagcttatgggccatttctcatggtggacagcttttgttacaaatgtaaatgcatcatcatcggaagcatttttaattggggctaactatcttggcaagccgaaggaacaaattgatggctataccatgcatgctaactacattttctggaggaacacaaatcctatccagttgtcttcctattcactctttnnnnnnnnnnnnnnnnnnnnnnnnnnnnnnnnnnnnnnnnnnnnnnnnnnnnnnnnnnnnnnnnnnnnnnnnnnnnnnnnnnnnnnnnnnnnnnnnnnnnggtatttattttgctgccacagagaaatcaaatgtgtccgtggttgggtttttggttctaccatgaacaacaagtcacagtcggtgattattattaacaattctactaatgttgttatacgagcatgtaactttgaattgtgtgacaaccctttctttgctgtttctaaacccatgggtacacagacacatactatgatattcgataatgcatttaattgcactttcgagtacatatctgatgccttttcgcttgatgtttcagaaaagtcaggtaattttaaacacttacgagagtttgtgtttaaaaataaagatgggtttctctatgtttataagggctatcaacctatagatgtagttcgtgatctaccttctggttttaacactttgaaacctatttttaagttgcctcttggtattaacattacaaattttagagccattcttacagccttttcacctgctcaagacacttggggcacgtcagctgcagcctattttgttggctatttaaagccaactacatttatgctcaagtatgatgaaaatggtacaatcacagatgctgttgattgttctcaaaatccacttgctgaactcaaatgctctgttaagagctttgagattgacaaaggaatttaccagacctctaatttcagggttgttccctcaggagatgttgtgagattccctaatattacaaacttgtgtccttttggagaggttttttatgctactaaattcccttctgtctatgcatgggagagaaaaaaaatttctaattgtgttgctgagttactctgtgctctacaactcaacatttttttcaacctttaagtgctatggcgtttctgccactaagttgaatgatctttgcttctccaaagtctatgcagattcttttgtagtcaagggagatgatgtaagacaaatagcgccaggacaaactggtgttattgctgattataattataaattgccagatgatttcatgggttgtgtccttgcttggaatactaggnacattgatgctacttcaactggtaattataattataaatataggtatcttagacatggcaagcttaggccctttgagagagacatatctaatgtgcctttctcccctgatggcaaaccttgcaccccacctgctcttaattgttattggccattaaatgattatggtttttacaccactactggcattggctaccaaccttacagagttgtagtactttcttttgaacttttaaatgcaccggccacggtttgtggaccaaaattatccactgaccttattaagaaccagtgtgtcaattttaattttaatggactcactggtactggtgtgttaactccttcttcaaagagatttcaaccatttcaacaatttggccgtgatgtttctgatttcactgattccgttcgagatcctaaaacatctgaaatattagacatttcaccttgctcttttgggggtgtaagtgtaattacacctggaacaaatgcttcatctgaagttgctgttctatatcaagatgttaactgcactgatgtttctacagcaattcatgcagatcaactcacaccagcttggcgcatatattctactggaaacaatgtattccagactcaagcaggctgtcttataggagctgagcatgtcgacacttcttatgagtgcgacattcctattggagctggcatttgtgctagttaccatacagtttctttattacgtagtactagccaaaaatctattgtggcttatactatgtctttaggtgctgatagttcaattgcttactctaataacaccattgctatacctactaacttttcaattagcattactacagaagtaatgcctgtttctatggctaaaacctccgtagattgtaatatgtacatctgcggagattctactgaatgtgctaatttgcttctccaatatggtagcttttgcacacaactaaatcgtgcactctcaggtattgctgctgaacaggatcgcaacacacgtgaagtgttcgctcaagtcaaacaaatgtacaaaaccccaactttgaaatattttggtggttttaatttttcacaaatattacctgaccctctaaagccaactaagaggtcttttattgaggacttgctctttaataaggtgacactcgctgatgctggcttcatgaagcaatatggcgaatgcctaggtgatattaatgctagagatctcatttgtgcgcagaagttcaatggacttacagtgttgccacctctgctcactgatgatatgattgctgcctacactgctgnnnnnnnnnnnnnnnnnnnnnnnnnnnnnnnnnnnnnnnnnnnnnnnnnnnnnnnnnnnnnnnnnnnnnnnnnnnnnnnnnnnnnnnnnnnnnnnnnnnnggtactgccactgctggatggacatttggtgctggcgctgctcttcaaataccttttgctatgcaaatggcatataggttcaatggcattggagttacccaaaatgttctctatgagaaccaaaaacaaatcgccaaccaatttaacaaggcgattagtcaaattcaagaatcacttacaacaacatcaactgcattgggcaagctgcaagacgttgttaaccagaatgctcaagcattaaacacacttgttaaacaacttagctctaattttggtgcaatttcaagtgtgctaaatgatatcctttcgcgacttgataaagtcgaggcggaggtacaaattgacaggttaattacaggcagacttcaaagccttcaaacctatgtaacacaacaactaatcagggctgctgaaatcagggcttctgctaatcttgctgctactaaaatgtctgagtgtgttcttggacaatcaaaaagagttgacttttgtggaaagggctaccaccttatgtccttcccacaagcagccccgcatggtgttgtcttcctacatgtcacgtatgtgccatcccaggagaggaacttcaccacagcgccagcaatttgtcatgaaggcaaagcatacttccctcgtgaaggtgtttttgtgtttaatggcacttcttggtttattacacagaggaacttcttttctccacaaataattactacagacaatacatttgtctcaggaaattgtgatgtcgttattggcatcattaacaacacagtttatgatcctctgcaacctgagcttgactcattcaaagaagagctggacaagtacttcaaaaatcatacatcaccagatgttgatcttggcgacatttcaggcattaacgcttctgtcgtcaacattcaaaaagaaattgaccgcctcaatgaggtcgctaaaaatttaaatgaatcactcattgaccttcaagaattgggaaaatatgagcaatatattaaatggccttggtatgtttggctcggcttcattgctggactaattgccatcgtcatggttacaatcttgctttgttgcatgactagttgttgcagttgcctcaagggtgcatgctcttgtggttcttgctgcaagtttgatgaggatgactctgagccagttctcaagggtgtcaaattacattacacataaacgaacttatggatttgtttatgagattttttactcttggatcaattactgcacagccagtaaannnnnnnnnnnnnnnnnnnnnnnnnnnnnnnnnnnnnnnnnnnnnnnnnnnnnnnnnnnnnnnnnnnnnnnnnnnnnnnnnnnnnnnnnnnnnnnnnnnnaagaacccattactttatgatgccaactactttgtttgctggcacacacataactatgactactgtataccatataacagtgtcacagatacaattgtcgttactgaaggtgacggcatttcaacaccaaaactcaaagaagactaccaaattggtggttattctgaggataggcactcaggtgttaaagactatgtcgttgtacatggctatttcaccgaagtttactaccagcttgagtctacacaaattactacagacactggtattgaaaatgctacattcttcatctttaacaagcttgttaaagacccaccgaatgtgcaaatacacacaatcgacggctcttcaggagttgctaatccagcaatggatccaatttatgatgagccgacgacgactactagcgtgcctttgtaagcacaagaaagtgagtacgaacttatgtactcattcgtttcggaagaaacaggtacgttaatagttaatagcgtacttctttttcttgctttcgtggtattcttgctagtcacactagccatccttactgcgcttcgattgtgtgcgtactgctgcaatattgttaacgtgagtttagtaaaaccaacggtttacgtctactcgcgtgttaaaaatctgaactcttctgaaggagttcctgatcttctggtctaaacgaactaactattattattattctgtttggaactttaacattgcttatcatggcagacaacggtactattaccgttgaggagcttaaacaactcctggaacaatggaacctagtaataggtttcctattcctagcctggattatgttactacaatttgcctattctaatcggaacaggtttttgtacataataaagcttgttttcctctggctcttgtggccagtaacacttgcttgttttgtgcttgctgctgtctacagaattaattgggtgactggcgggattgcgattgcaatggcttgtattgtaggcttgatgtggcttagctacttcgttgcttccttcaggctgtttgctcgtacccgctcaatgtggtcattcaacccagaaacaaacattcttctcaatgtgcctctccgggggacaattgtgaccagaccgctcatggaaagtgaacttgtcattggtgctgtgatcattcgtggtcacttgcgaatggccggacactccctagggcgctgtgacattaaggacctgccaaaagagatcactgtggctacatcacgaacgctttcttattacaaattaggagcgtcgcagcgtgtaggcactgattcaggttttgctgcatacaaccgctaccgtattggaaactataaattaaatacagaccacgccggtagcaacgacaatattgctttgctagtacagtaagtgacaacagatgtttcatcttgttgacttccaggttacaatagcagagatattgattatcattatgaggactttcaggattgctatttggaatcttgacgtnataataagttcaatagtgagacaattatttaagcctctaactaagaagaattattcggagttagatgatgaagaacttatggagtnnnnnnnnnnnnnnnnnnnnnnnnnnnnnnnnnnnnnnnnnnnnnnnnnnnnnnnnnnnnnnnnnnnnnnnnnnnnnnnnnnnnnnnnnnnnnnnnnnnngacattgattgtatttacatcttgcgagctatatcactatcaggagtgtgttagaggtacgactgtactactaaaagaaccttgcccatcaggaacatacgagggcaattcaccatttcaccctcttgctgacaataaatttgcactaacttgcactagcacacactttgcttttgcttgtgctgacggtactcgacatacctatcagctgcgtgcaagatcagtttcaccaaaacttttcatcagacaagaggaggttcaacaagagctctactcgccactttttctcattgttgctgctctagtatttttaatactttgcttcaccattaagagaaagacagaatgaatgagctcactttaattgacttctatttgtgctttttagcctttctgctattccttgttttaataatgcttattatattttggttttcactcgaaatccaggatctagaagaaccttgtaccaaagtctaaacgaacatgaaacttctcattgttttgacttgtatttctctatgcagttgcatacgcactgtagtacagcgctgtgcatctaataaacctcatgtgcttgaagatccttgtaaggtacaacactaggggtaatacttatagcactgcttggctttgtgctctaggaaaggttttaccttttcatagatggcacactatggttcaaacatgcacacctaatgttactatcaactgtcaagatccagctggtggtgcgcttatagctaggtgttggtaccttcatgaaggtcaccaaactgctgcatttagagacgtacttgttgttttaaataaacgaacaaattaaaatgtctgataatggaccccaatcaaaccaacgtagtgccccccgcattacatttggtggacccacagattcaactgacaataaccagaatggaggacgcaatggggcaaggccaaaacagcgccgaccccaaggtttacccaataatactgcgtcttggttcacagctctcactcagcatggcaaggaggaacttagattccctcgaggccagggcgttccaatcaacaccaatagtggtccagatgaccaaattggctactaccgaagagctacccgacgagttcgtggtggtgacggcaaaatgaaagagctcagccccagatggtacttctattacctaggaactggcccagaagcttcacttccctacggcgctnacaaagaaggcatcgtatgggttgcaactgagggagccttgaatacacccaaagaccacattggcacccgcaatcctaataacaatgctgccaccgtgctacaacttcctcaaggaacaacattgcctaaaaggcttctacgcagagggaagcagaggcggcagtcaagcctcttctcgctcctcatcacgtagtcgcggtaattcaagaaattcaactcctggcagcagtaggggaaattctcctgctcgaatggctagcggaggtggtgaaactgccctcgcgctattgctgctagacagattgaaccagcttgagagcaaagtttctggtanaggccaacaacaacaaggccaaactgtcactaagaaatctgctgctgaggcatctaaaaagcctcgccaaaaacgtactgccacaaaacagtacaacgtcactcaagcatttgggagacgtggtccagaacaaacccaaggaaatttcggggaccaagacctaatcagacaaggaactgattacaaacattggccgcaaattgcacaatttgctccaagtgcctctgcattctttggaatgtcacgcattggcatggaagtcacaccttcgggaacatggctgacttatcatggagccattaaattggatgacaaagatccacaattcaaagacaacgtcatactgctgaacaagcacattgacgcatacaaaacattcccaccaacagagcctaaaaaggacaaaaagaaaaagactgatgaagctcagcctttgccgcagagacaaaagaagcagcccactgtgactcttcttcctgcggctgacatggatgatttctccagacaacttcaaaattccatgagtggagcttctgctgattcaactcaggcataaacactcatgatgaccacacaaggcagatgggctatgtaaacgttttcgcaattccgtttacgatacatagtctactcttgtgcagaatgaattctcgtaactaaacagcacaagtaggtttagttaactttaatctcacatagcaatctttaatcaatgtgtaacattagggaggacttgaaagagccaccacattttcatcgaggccacgcggagtacgatcgagggtacagtgaataatgctagggagagctgcctatatggaagagccc

SEQ ID NO: 29739 - DNA, 29429 bp, SARS Coronavirus
  misc_feature 860-959, 2509-2608, 3338-3437, 5551, 5767-5866, 7296-7395, 8908,10914-11014, 11744-11843, 14993-15092, 20606, 20953, 21432-21531,25728, 25746, 26631-26730, 28364: n = A,T,C or G
cccctttattttcgcaaccagctcaacatcatctacccaggaaaagccaaccaacctcgatctcttgtagatctgttctctaaacgaactttaaaatctgtgtagctgtcgctcggctgcatgcctagtgcacctacgcagtataaacaataataaattttactgtcgttgacaagaaacgagtaactcgttcctcttctgcagactgcttacggtttcgtccgtgttgcagtcgatcatcagcatacctaggtttcgtccgggtgtgaccgaaaggtaagatggagagccttgttcttggtgtcaacgagaaaacacacgtccaactcagtttgcctgtccttcaggttagagacgtgctagtgcgtggcttcggggactctgtggaagaggccctatcggaggcacgtgaacacctcaaaaatggcacttgtggtctagtagagctggaaaaaggcgtactgccccagcttgaacagccctatgtgttcattaaacgttctgatgccttaagcaccaatcactgccacaaggtcgttgagctggttgcagaaatggacggcattcagtacggtcgtagcggtataacactgggagtactcgtgccacatgtgggcgaaaccccaattgcataccgcaatgttcttcttcgtaagaacggtaataagggagccggtggtcatagctatggcatcgatctaaagtcttatgacttaggtgacgagcttggcactgatcccattgaagattatgaacaaaactggaacactaagcatggcagtggtgcactccgtgaactcactcgtgagctcaatggaggtgcagtcactcgctatgtcgacaacaatttctgtggcccnnnnnnnnnnnnnnnnnnnnnnnnnnnnnnnnnnnnnnnnnnnnnnnnnnnnnnnnnnnnnnnnnnnnnnnnnnnnnnnnnnnnnnnnnnnnnnnnnnnntcgaagagaggtgtctactgctgccgtgaccatgagcatgaaattgcctggttcactgagcgctctgataagagctacgagcaccagacacccttcgaaattaagagtgccaagaaatttgacactttcaaaggggaatgcccaaagtttgtgtttcctcttaactcaaaagtcaaagtcattcaaccacgtgttgaaaagaaaaagactgagggtttcatggggcgtatacgctctgtgtaccctgttgcatctccacaggagtgtaacaacatgcacttgtctaccttgatgaaatgtaatcattgcgatgaagtttcatggcagacgtgcgactttctgaaagccacttgtgaacattgtggcactgaaaatttagttattgaaggacctactacatgtgggtacctacctactaatgctgtagtgaaaatgccatgtcctgcctgtcaagacccagagattggacctgagcatagtgttgcagattatcacaaccactcaaacattgaaactcgactccgcaagggaggtaggactagatgttttggaggctgtgtgtttgcctatgttggctgctataataagcgtgcctactgggttcctcgtgctagtgctgatattggctcaggccatactggcattactggtgacaatgtggagaccttgaatgaggatctccttgagatactgagtcgtgaacgtgttaacattaacattgttggcgattttcatttgaatgaagaggttgccatcattttggcatctttctctgcttctacaagtgcctttattgacactataaagagtcttgattacaagtctttcaaaaccattgttgagtcctgcggtaactataaagttaccaagggaaagcccgtaaaaggtgcttggaacattggacaacagagatcagttttaacaccactgtgtggttttccctcacaggctgctggtgttatcagatcaatttttgcgcgcacacttgatgcagcaaaccactcaattcctgatttgcaaagagcagctgtcaccatacttgatggtatttctgaacagtcattacgtcttgtcgacgccatggtttatacttcagacctgctcaccaacagtgtcattattatggcatatgtaactggtggtcttgtacaacagacttctcagtggttgtctaatcttttgggcactactgttgaaaaactcaggcctatctttgaatggattgaggcgaaacttagtgcaggagttgaatttctcaaggatgcttgggagattctcaaatttctcattacaggtgtttttgacatcgtcaagggtcaaatacaggttgcttcagataacatcaaggattgtgtaaaatgcttcattgatgttgttaacaaggcactcgaaatgtgcattgatcaagtcactatcgctggcgcaaagttgcgatcactcaacttaggtgaagtcttcatcgctcaaagcaagggactttaccgtcagtgtatacgtggcaaggagcagctgcaactactcatgcctcttaaggcaccaaaagaagtaannnnnnnnnnnnnnnnnnnnnnnnnnnnnnnnnnnnnnnnnnnnnnnnnnnnnnnnnnnnnnnnnnnnnnnnnnnnnnnnnnnnnnnnnnnnnnnnnnnngaggaggttgttctcaagaacggtgaactcgaagcactcgagacgcccgttgatagcttcacaaatggagctatcgttggcacaccagtctgtgtaaatggcctcatgctcttagagattaaggacaaagaacaatactgcgcattgtctcctggtttactggctacaaacaatgtctttcgcttaaaagggggtgcaccaattaaaggtgtaacctttggagaagatactgtttgggaagttcaaggttacaagaatgtgagaatcacatttgagcttgatgaacgtgttgacaaagtgcttaatgaaaagtgctctgtctacactgttgaatccggtaccgaagttactgagtttgcatgtgttgtagcagaggctgttgtgaagactttacaaccagtttctgatctccttaccaacatgggtattgatcttgatgagtggagtgtagctacattctacttatttgatgatgctggtgaagaaaacttttcatcacgtatgtattgttccttttaccctccagatgaggaagaagaggacgatgcagagtgtgaggaagaagaaattgatgaaacctgtgaacatgagtacggtacagaggatgattatcaaggtctccctctggaatttggtgcctcagctgaaacagttcgagttgaggaagaagaagaggaagactggctggatgatactactgagcaatcagagattgagccagaaccagaannnnnnnnnnnnnnnnnnnnnnnnnnnnnnnnnnnnnnnnnnnnnnnnnnnnnnnnnnnnnnnnnnnnnnnnnnnnnnnnnnnnnnnnnnnnnnnnnnnnccattaaatgtgctgacatcgttaaggaggcacaaagtgctaatcctatggtgattgtaaatgctgctaacatacacctgaaacatggtggtggtgtagcaggtgcactcaacaaggcaaccaatggtgccatgcaaaaggagagtgatgattacattaagctaaatggccctcttacagtaggagggtcttgtttgctttctggacataatcttgctaagaagtgtctgcatgttgttggacctaacctaaatgcaggtgaggacatccagcttcttaaggcagcatatgaaaatttcaattcacaggacaccttacttgcaccattgttgtcagcaggcatatttggtgctaaaccacttcagtctttacaagtgtgcgtgcagacggttcgtacacaggtttatattgcagtcaatgacaaagctctttatgagcaggttgtcatggattatcttgataacctgaagcctagagtggaagcacctaaacaagaggagccaccaaacacagaagattccaaaactgaggagaaatctgtcgtacagaagcctgtcgatgtgaagccaaaaattaaggcctgcattgatgaggttaccacaacactggaagaaactaagtttcttaccaataagttactcttgtttgctgatatcaatggtaagctttaccatgattctcagaacatgcttagaggtgaagatatgtctttccttgagaaggatgcaccttacatggtaggtgatgttatcactagtggtgatatcacttgtgttgtaataccctccaaaaaggctggtggcactactgagatgctctcaagagctttgaagaaagtgccagttgatgagtatataaccacgtaccctggacaaggatgtgctggttatacacttgaggaagctaggactgctcttaagaaatgcaaatctgcattttatgtactaccttcagaagcacctaatgctaaggaagagattctaggaactgtatcctggaatttgagagaaatgcttgctcatgctgaagagacaagaaaattaatgcctatatgcatggatgttagagccataatggcaaccatccaacgtaagtataaaggaattaaaattcaagagggcatcgttgactatggtgtccgattcttcttttatactagtaaagagcctgtagcttctattattacgaagctgaactctctaaatgagccgcttgtcacaatgccaattggttatgtgacacatggttttaatcttgaagaggctgcgcgctgtatgcgttctcttaaagctcctgccgtagtgtcagtatcatcaccagatgctgttactacatataatggatacctcacttcgtcatcaaagacatctgaggagcactttgtagaaacagtttctttggctggctcttacagagattggtcctattcaggacagcgtacagagttaggtgttgaatttcttaagcgtggtgacaaaattgtgtaccacactctggagagccccgtcgagtttcatcttgacggtgaggttctttcacttgacaaactaaagagtctcttatccctgcgggaggttaagactataaaagtgttcacaactgtggacaacactaatctccacacacagcttgtggatatgtctatgacatatggacagcagtttggtccaacatacttggatggtgctgatgttacaaaaattaaacctcatgtaaatcatgagggtaagactttctttgtactacctagtgatgacacactacgtagtgaagctttcgagtactaccatactcttgatgagagttttcttggtaggtacatgtctgctttaaaccacacaaagaaatggaaatttcctcaagttggtggtttaacttcaattaaatgggctgataacaattgttatttgtctagtgttttattagcacttcaacagattgaagtcaaattcaatgcaccagcacttcaagaggcttattatagagcccgtgctggtgatgctgctaacttttgtgcactcatactcgcttacagtaataaaactgttggcgagcttggtgatgtcagagaaactatgacccatcttctacagcatgctaatttggaatctgcnaagcgagttcttaatgtggtgtgtaaacattgtggtcagaaaactactaccttaacgggtgtagaagctgtgatgtatatgggtactctatcttatgataatcttaagacaggtgtttccattccatgtgtgtgtggtcgtgatgctacacaatatctagtacaacaagagtcttcttttgttatgatgtctgcaccacctgctgagtataaattnnnnnnnnnnnnnnnnnnnnnnnnnnnnnnnnnnnnnnnnnnnnnnnnnnnnnnnnnnnnnnnnnnnnnnnnnnnnnnnnnnnnnnnnnnnnnnnnnnnncactacaaccatcaagcctgtgtcgtataaactcgatggagttacttacacagagattgaaccaaaattggatgggtattataaaaaggataatgcttactatacagagcagcctatagaccttgtaccaactcaaccattaccaaatgcgagttttgataatttcaaactcacatgttctaacacaaaatttgctgatgatttaaatcaaatgacaggcttcacaaagccagcttcacgagagctatctgtcacattcttcccagacttgaatggcgatgtagtggctattgactatagacactattcagcgagtttcaagaaaggtgctaaattactgcataagccaattgtttggcacattaaccaggctacaaccaagacaacgttcaaaccaaacacttggtgtttacgttgtctttggagtacaaagccagtagatacttcaaattcatttgaagttctggcagtagaagacacacaaggaatggacaatcttgcttgtgaaagtcaacaacccacctctgaagaagtagtggaaaatcctaccatacagaaggaagtcatagagtgtgacgtgaaaactaccgaagttgtaggcaatgtcatacttaaaccatcagatgaaggtgttaaagtaacacaagagttaggtcatgaggatcttatggctgcttatgtggaaaacacaagcattaccattaagaaacctaatgagctttcactagccttaggtttaaaaacaattgccactcatggtattgctgcaattaatagtgttccttggagtaaaatttttgcttatgtcaaaccattcttaggacaagcagcaattacaacatcaaattgcgctaagagattagcacaacgtgtgtttaacaattatatgccttatgtgtttacattattgttccaattgtgtacttttactaaaagtaccaattctagaattagagcttcactacctacaactattgctaaaaatagtgttaagagtgttgctaaattatgtttggatgccggcattaattatgtgaagtcacccaaattttctaaattgttcacaatcgctatgtggctattgttgttaagtatttgcttaggttctctaatctatgtaactgctgcttttggtgtactcttatctaattttggtgctccttcttattgtaatggcgttagagaattgtatcttaattcgtctaacgttactactatggatttctgtgaaggttcttttccttgcagcatttgtttaagtggattagactcccttgattcttatccagctcttgaaaccattcaggtgacgatttcatcgtacaagctagacttgacaattttaggtctggccgctgagtgggttttggcatatatgttgttcacaaaattcttttatttattaggtctttcagctataatgcaggtgnnnnnnnnnnnnnnnnnnnnnnnnnnnnnnnnnnnnnnnnnnnnnnnnnnnnnnnnnnnnnnnnnnnnnnnnnnnnnnnnnnnnnnnnnnnnnnnnnnnngtattgtacaaatggcacccgtttctgcaatggttaggatgtacatcttctttgcttctttctactacatatggaagagctatgttcatatcatggatggttgcacctcttcgacttgcatgatgtgctataagcgcaatcgtgccacacgcgttgagtgtacaactattgttaatggcatgaagagatctttctatgtctatgcaaatggaggccgtggcttctgcaagactcacaattggaattgtctcaattgtgacacattttgcactggtagtacattcattagtgatgaagttgctcgtgatttgtcactccagtttaaaagaccaatcaaccctactgaccagtcatcgtatattgttgatagtgttgctgtgaaaaatggcgcgcttcacctctactttgacaaggctggtcaaaagacctatgagagacatccgctctcccattttgtcaatttagacaatttgagagctaacaacactaaaggttcactgcctattaatgtcatagtttttgatggcaagtccaaatgcgacgagtctgcttctaagtctgcttctgtgtactacagtcagctgatgtgccaacctattctgttgcttgaccaagctcttgtatcagacgttggagatagtactgaagtttccgttaagatgtttgatgcttatgtcgacaccttttcagcaacttttagtgttcctatggaaaaacttaaggcacttgttgctacagctcacagcgagttagcaaagggtgtagctttagatggtgtcctttctacattcgtgtcagctgcccgacaaggtgttgttgataccgatgttgacacaaaggatgttattgaatgtctcaaactttcacatcactctgacttagaagtgacaggtgacagttgtaacaatttcatgctcacctataataaggttgaaaacatgacgcccagagatcttggcgcatgtattgactgtaatgcaaggcatatcaatgcccaagtagcaaaaagtcacaatgtttcactcatctggaatgtaaaagactacatgtctttatctgaacagctgcgtaaacaaattcgtagtgctgccaagaagaacaacataccttttagactaacttgtgctacaactagacaggttgtcaatgtcataactactaaaatctcactcaagggtggtaagattgttagtacttggtttaaacttatgcttaaggccacattattgtgcgttcttgctgcattggtttgttacatcgttatgccattacatactttgtcaatccatgatggttacacaaatgaaatcattggttacaaagccattcaggatggtgtcactcgtgacatcatttctactgatgattgttttgcaaataaacatgctggttttgacgcactggtttagccagcgtggtggttcatacaaaaatgacaaaagctgccctgtagtagctgctatcattacaagagagattggtttcatagtgcctggcttaccgggtactgtgntgagagcaatcaatggtgacttcttgcattttctacctcgtgtttttagtgctgttggcaacatttgctacacaccttccaaactcattgagtatagtgattttgctacctctgcttgcgttcttgctagcagagtgtacaatttttaaggatgctatgggcaaacctgtgccatattgttatgacactaatttgctagagggttctatttcttatagtgagcttcgtccagacactcgttatgtgcttatggatggttccatcatacagtttcctaacatttacctggagggttctgttagagtagtaacaacttttgatgctgagtactgtagacatggtacatgcgaaaggtcagaagcaggtatttgcctatctaccagtggtagatgggttcttaataatgagcattacagagctctatcaggagttttctgtggtgttgatgcgatgaatctcatagctaacatctttactcctcttgtgcaacctgtgggtgctttagatgtgtctgcttcagtagtggctggtggtattattgccatattggtgacttgtgctgcctactactttatgaaattcagacgtgcttttggtgagtacaaccatgttgttgctgctaatgcacttttgtttttgatgtctttcactatactctgtctggcaccagcttacagctttctgccgggagtctactcagtcttttacttgtacttgacattctatttcaccaatgatgtttcattcttggctcaccttcaatggtttgccatgttttctcctattgtgcctttttggataacagcaatctatgtattctgtatttctctgaagcactgccattggttctttaacaactatcttaggaaaagagtcatgtttaatggagttacatttagtaccttcgaggaggctgctttgtgtacctttttgctcaacaaggaaatgtacctaaaattgcgtagcgagacactgttgccacttacacagtataacaggtatcttgctctatataacaagtacaagtatttcagtggagccttagatactaccagctatcgtgaagcagcttgctgccacttagcaaaggctctaaatgactttagcaactcaggtgctgatgttctctaccaaccaccacagacatcaatcacttctgctgttctgcagagtggttttaggaaaatggcattcccgtcaggcaaagttgaaggatgcatggtacaagtaacctgtggaactacaactcttaatggattgtggttggatgacacagtatactgtccaagacatgtcatttgcacagcagaagacatgcttaatcctaactatgaagatctgctcattcgcaaatccaaccatagctttcttgttcaggctggcaatgttcaacttcgtgttattggccattctatgcaaaattgtctgcttaggcttaaagttgatacttctaaccctaagacacccaagtataaatttgtccgtatccaacctggtcaaacattttcagttctagcatgctacaatggttcaccatctggtgtttatcagtgtgccatgagacctaatcataccattaaaggttctttccttaatggatcatgtggtagtgttggttttaacattgattatgattgcgtgtctttctgctatatgcatcatatggagcttccaacaggagtacacgctggtactgacttagaaggtaaattctatggtccatttgttgacagacaaactgcacaggctgcaggtacagacacaaccataacattaaatgttttggcatggctgtatgctgctgttatcaatggtgataggtggtttcttaatagattcaccactactttgaatgactttaaccttgtggcaatgaagtacaactatgaacctttgacacaagatcatgttgacatattgggacctctttctgctcaaacaggaattgccgtcttagatatgtgtgctgctttgaaagagctgctgcagaatggtatgaatggtcgnnnnnnnnnnnnnnnnnnnnnnnnnnnnnnnnnnnnnnnnnnnnnnnnnnnnnnnnnnnnnnnnnnnnnnnnnnnnnnnnnnnnnnnnnnnnnnnnnnnnaagaaaattgttaagggcactcatcattggatgcttttaactttcttgacatcactattgattcttgttcaaagtacacagtggtcactgtttttcttgtttacgagaatgctttcttgccatttactcttggtattatggcaattgctgcatgtgctatgctgcttgttaagcataagcacgcattcttgtgcttgtttctgttaccttctcttgcaacagttgcttactttaatatggtctacatgcctgctagctgggtgatgcgtatcatgacatggcttgaattggctgacactagcttgtctggttataggcttaaggattgtgttatgtatgcttcagctttagttttgcttattctcatgacagctcgcactgtttatgatgatgctgctagacgtgtttggacactgatgaatgtcattacacttgtttacaaagtctactatggtaatgctttagatcaagctatttccatgtgggccttagttatttctgtaacctctaactattctggtgtcgttacgactatcatgtttttagctagagctatagtgtttgtgtgtgttgagtattacccattgttatttattactggcaacaccttacagtgtatcatgcttgtttattgtttcttaggctattgttgctgctgctactttggccttttctgtttactcaaccgttacttcaggcttactcttggtgtttatgactacttggtctnnnnnnnnnnnnnnnnnnnnnnnnnnnnnnnnnnnnnnnnnnnnnnnnnnnnnnnnnnnnnnnnnnnnnnnnnnnnnnnnnnnnnnnnnnnnnnnnnnnnctgacgtaaagtgcacatctgtggtactgctctcggttcttcaacaacttagagtagagtcatcttctaaattgtgggcacaatgtgtacaactccacaatgatattcttcttgcaaaagacacaactgaagctttcgagaagatggtttctcttttgtctgttttgctatccatgccagggtgctgtagacattaataggttgtgcgaggaaatgctcgataaccgtgctactcttcagggctattgcttcagaatttagttctttaccatcatatgccgcttatgccactgcccaggaggcctatgagcaggctgtagctaatggtgattctgaagtcgttctcaaaaagttaaagaaatctttgaatgtggctaaatctgagtttgaccgtgatgctgccatgcaacgcaagttggaaaagatggcagatcaggctatgacccaaatgtacaaacaggcaagatctgaggacaagagggcaaaagtaactagtgctatgcaaacaatgctcttcactatgcttaggaagcttgataatgatgcacttaacaacattatcaacaatgcgcgtgatggttgtgttccactcaacatcataccattgactacagcagccaaactcatggttgttgtccctgattatggtacctacaagaacacttgtgatggtaacacctttacatatgcatctgcactctgggaaatccagcaagttgttgatgcggatagcaagattgttcaacttagtgaaattaacatggacaattcaccaaatttggcttggcctcttattgttacagctctaagagccaactcagctgttaaactacagaataatgaactgagtccagtagcactacgacagatgtcctgtgcggctggtaccacacaaacagcttgtactgatgacaatgcacttgcctactataacaattcgaagggaggtaggtttgtgctggcattactatcagaccaccaagatctcaaatgggctagattccctaagagtgatggtacaggtacaattacacagaactggaaccaccttgtaggtttgttacagacacaccaaaagggcctaaagtgaaatacttgtacttcatcaaaggcttaaacaacctaaatagaggtatggtgctgggcagtttagctgctacagtacgtcttcaggctggaaatgctacagaagtacctgccaattcaactgtgctttccttctgtgcttttgcagtagaccctgctaaagcatataaggattacctagcaagtggaggacaaccaatcaccaactgtgtgaagatgttgtgtacacacactggtacaggacaggcaattactgtaacaccagaagctaacatggaccaagagtcctttggtggtgcttcatgttgtctgtattgtagatgccacattgaccatccaaatcctaaaggattctgtgacttgaaaggtaagtacgtccaaatacctaccacttgtgctaatgacccagtgggttttacacttagaaacacagtctgtaccgtctgcggaatgtggaaaggttatggctgtagttgtgaccaactccgcgaacccttgatgcagtctgcggatgcatcaacgtttttaaacgggtttgcggtgtaagtgcagcccgtcttacaccgtgcggcacaggcactagtactgatgtcgtctacagggcttttgatatttacaacgaaaaagttgctggttttgcaaagttcctaaaaactaattgctgtcgcttccaggagaaggatgaggaaggcaatttattagactcttactttgtagttaagaggcatactatgtctaactaccaacatgaagagactatttataacttggttaaagattgtccagcggttgctgtccatgactttttcaagtttagagtagatggtgacatggtaccacatatatcacgtcagcgtctaactaaatacacaatggctgatttagtctatgctctacgtcattttgatgagggtaattgtgatacattaaaagaaatactcgtcacatacaattgctgtgatgatgattatttcaataagaaggattggtatgacttcgtagagaatcctgacatcttacgcgtatatgctaacttaggtgagcgtgtacgccaatcattattaaagactgtacaattctgcgatgctatgcgtgatgcaggcattgtaggcgtactgacattagataatcaggatcttaatgggaactggtacgatttcggtgatttcgtacaagtagcaccaggctgcggagttcctattgtggattcatattactcattgctgatgcccatcctcactttgactagggcattggctgctgagtcccatatggatgctgatctcgcaaaaccacttattaagtggggatttgctgaaatatgattttacggaagagagactttgtctcttcgaccgttattttaaatattgggaccagacataccatcccaattgtattaactgtttggatgataggtgtatccttcattgtgcaaactttaatgtgttattttctactgtgtttccacctacaagttttggaccactagtaagaaaaatatttgtagatggtgttccttttgttgtttcaactggataccattttcgtgagttaggagtcgtacataatcaggatgtaaacttacatagctcgcgtctcagtttcaaggaacttttagtgtatgctgctgatccagctatgcatgcagcttctggcaatttattgctagataaacgcactacatgcttttcagtagctgcactaacaaacaatgttgcttttcaaactgtcaaacccggtaattttaataaagacttttatgactttgctgtgtctaaaggtttctttaaggaaggaagttctgttgaactaaaacacttcttctttgctcaggatggcaacgctgctatcagtgattatgactattatcgttataatctgccaacaatgtgtgatatcagacaactcctattcgtagttgaagttgttgataaatactttgattgttacgatggtggctgtattaatgccaaccaagtaatcgttaacaatctggataaatcagctggtttcccatttaataaatggggtaaggctagactttattatgactcaatgagnnnnnnnnnnnnnnnnnnnnnnnnnnnnnnnnnnnnnnnnnnnnnnnnnnnnnnnnnnnnnnnnnnnnnnnnnnnnnnnnnnnnnnnnnnnnnnnnnnnntactataactcaaatgaatcttaagtatgccattagtgcaaagaatagagctcgcaccgtagctggtgtctctatctgtagtactatgacaaatagacagtttcatcagaaattattgaagtcaatagccgccactagaggagctactgtggtaattggaacaagcaagttttacggtggctggcataatatgttaaaaactgtttacagtgatgtagaaactccacaccttatgggttgggattatccaaaatgtgacagagccatgcctaacatgcttaggataatggcctctcttgttcttgctcgcaaacataacacttgctgtaacttatcacaccgtttctacaggttagctaacgagtgtgcgcaagtattaagtgagatggtcatgtgtggcggctcactatatgttaaaccaggtggaacatcatccggtgatgctacaactgcttatgctaatagtgtctttaacatttgtcaagctgttacagccaatgtaaatgcacttctttcaactgatggtaataagatagctgacaagtatgtccgcaatctacaacacaggctctatgagtgtctctatagaaatagggatgttgatcatgaattcgtggatgagttttacgcttacctgcgtaaacatttctccatgatgattctttctgatgatgccgttgtgtgctataacagtaactatgcggctcaaggtttagtagctagcattaagaactttaaggcagttctttattatcaaaataatgtgttcatgtctgaggcaaaatgttggactgagactgaccttactaaaggacctcacgaattttgctcacagcatacaatgctagttaaacaaggagatgattacgtgtacctgccttacccagatccatcaagaatattaggcgcaggctgttttgtcgatgatattgtcaaaacagatggtacacttatgattgaaaggttcgtgtcactggctattgatgcttacccacttacaaaacatcctaatcaggagtatgctgatgtctttcacttgtatttacaatacattagaaagttacatgatgagcttactggccacatgttggacatgtattccgtaatgctaactaatgataacacctcacggtactgggaacctgagttttatgaggctatgtacacaccacatacagtcttgcaggctgtaggtgcttgtgtattgtgcaattcacagacttcacttcgttgcggtgcctgtattaggagaccattcctatgttgcaagtgctgctatgaccatgtcatttcaacatcacacaaattagtgttgtctgttaatccctatgtttgcaatgccccaggttgtgatgtcactgatgtgacacaactgtatctaggaggtatgagctattattgcaagtcacataagcctcccattagttttccattatgtgctaatggtcaggtttttggtttatacaaaaacacatgtgtaggcagtgacaatgtcactgacttcaatgcgatagcaacatgtgattggactaatgctggcaattacatacttgccaacacttgtactgagagactcaagcttttcgcagcagaaacgctcaaagccactgaggaaacatttaagctgtcatatggtattgccactgtacgcgaagtactctctgacagagaattgcatctttcatgggaggttggaaaacctagaccaccattgaacagaaactatgtctttactggttaccgtgtaactaaaaatagtaaagtacagattggagagtacacctttgaaaaaggtgactatggtgatgctgttgtgtacagaggtactacgacatacaagttgaatgttggtgattactttgtgttgacatctcacactgtaatgccacttagtgcacctactctagtgccacaagagcactatgtgagaattactggcttgtacccaacactcaacatctcagatgagttttctagcaatgttgcaaattatcaaaaggtcggcatgcaaaagtactctacactccaaggaccacctggtactggtaagagtcattttgccatcggacttgctctctattacccatctgctcgcatagtgtatacggcatgctctcatgcagctgttgatgccctatgtgaaaaggcatcaaaatatttgcccatagataaatgtagtagaatcatacctgcgcgtgcgcgcgtagagtgttttgataaattcaaagtgaattcaacactagaacagtatgttttctgcactgtaaatgcattgccagaaacaactgctgacattgtagtctttgatgaaatctctatggctactaattatgacttgagtgttgtcaatgctagacttcgtgcaaaacactacgtctatattggcgatcctgctcaattaccagccccccgcacattgctgactaaaggcacactagaaccagaatattttaattcagtgtgcagacttatgaaaacaataggtccagacatgttccttggaacttgtcgccgttgtcctgctgaaattgttgacactgtgagtgctttagtttatgacaataagctaaaagcacacaaggagaagtcagctcaatgcttcaaaatgttctacaaaggtgttattacacatgatgtttcatctgcaatcaacagacctcaaataggcgttgtaagagaatttcttacacgcaatcctgcttggagaaaagctgtttttatctcaccttataattcacagaacgctgtagcttcaaaaatcttaggattgcctacgcagactgttgattcatcacagggttctgaatatgactatgtcatattcacacaaactactgaaacagcacactcttgtaatgtcaaccgcttcaatgtggctatcacaagggcaaaaattggcattttgtgcataatgtctgatagagatctttatgacaaactgcaatttacaagtctagaaataccacgtcgcaatgtggctacattacaagcagaaaatgtaactggactttttaaggactgtagtaagatcattactggtcttcatcctacacaggcacctacacacctcagcgttgatataaagttcaagactgaaggattatgtgttgacataccaggcataccaaaggacatgacctaccgtagactcatctctatgatgggtttcaaaatgaattaccaagtcaatggttatcctaatatgtttatcacccgcgaagaagctattcgtcacgttcgtgcgtggattggctttgatgtagagggctgtcatgcaactagagatgctgtgggtactaacctacctctccagctaggattttctacaggtgttaacttagtagctgtaccgactggttatgttgacactgaaaataacacagaattcaccagagttaatgcaaaacctccaccaggtgaccagtttaaacatcttataccactcatgtataaaggcttgccctggaatgtagtgcgtattaagatagtacaaatgctcagtgatacactgaaaggattgtcagacagagtcgtgttcgtcctttgggcgcatggctttgagcttacatcaatgaagtactttgtcaagattggacctgaaagaacgtgttgtctgtgtgacaaacgtgcaacttgcttttctacttcatcagatacttatgcctgctggaatcattctgtgggttttgactatgtctataacccatttatgattgatgttcagcagtggggctttacgggtaaccttcagagtaaccatgaccaacattgccaggtacatggaaatgcacatgtggctagttgtgatgctatcatgactagatgtttagcagtccatgagtgctttgttaagcgcgttgattggtctgttgaataccctattataggagatgaactgagggttaattctgcttgcagaaaagtacaacacatggttgtgaagtctgcattgcttgctgataagtttccagttcttcatgacattggaaatccaaaggctatcaaagtgtgtgcctcaggctgaagtagaatggaagttctacgatgctcagccatgtagtgacaaagcttacaaaatagaggaactcttctattcttatgctacacatcacgataaattcactgatggtgtttgtttgttttggaattgtaacgttgatcgttacccagccaatgcaattgtgtgtaggtttgacacaagagtcttgtcaaacttgaacttaccaggctgtgatggtggtagtttgtatgtgaataagcatgcattccacactccagctttcgataaaagtgcatttactaatttaaagcaattgcctttcttttactattctgatagtccttgtgagtctcatggcaaacaagtagtgtcggatattgattatgttccactcaaatctgctacgtgtattacacgatgcaatttaggtggtgctgtttgcagacaccatgcaaatgagtaccgacagtacttggatgcatataatatgatgatttctgctggatttagcctatggatttacaaacaatttgatacttataacctgtggaatacatttaccaggttacagagtttagaaaatgtggcttataatgttgttaataaaggacactttgatggacacgccggcgaagcacctgtttccatcattaataatgctgtttacacaaaggtagatggtattgatgtggagatctttgaaaataagacaacacttcctgttaatgttgcatttgagctttgggctaagcgtaacattaaaccagtgccagagattaagatactcaataatttgggtgttgatatcgctgctaatactgtaatctgggactacaaaagagaagccccagcacatgtatctacaataggtgtctgcacaatgactgacattgccaagaaacctactgagagtgcttgttcttcacttactgtcttgtttgatggtagagtggaaggacaggtagacctttttagaaacgcccgtaatggtgttttaataacagaaggttcagtcaaaggtctaacaccttcaaagggaccagcacaagctagcgtcaatggagtcacattaattggagaatcagtaaaaacacagtttaactactttaagaaagtagacggcattattcaacagttgcctgaaacctactttactcagagcagagacttagaggattttaagcccagatcacaaatggaaactgactttctcgagctcgctatggatgaattcatacagcgatataagctcgagggctatgccttcgaacacatcgtttatggagatttcagtcatggacaacttggcggtcttcatttaatgataggcttagccaagcgctcacaagattcaccacttaaattagaggattttatccctatggacagcacagtgaaaaattacttcataacagatgcgcaaacaggttcatcaaaatgtgtgtgttctgtgattgatcttttacttgatgactttgtcgagataataaagtcacaagatttgtcagtgattncaaaagtggtcaaggttacaattgactatgctgaaatttcattcatgctttggtgtaaggatggacatgttgaaaccttctacccaaaactacaagcaagtcaagcgtggcaaccaggtgttgcgatgcctaacttgtacaagatgcaaagaatgcttcttgaaaagtgtgaccttcagaattatggtgaaaatgctgttataccaaaaggaataatgatgaatgtcgcaaagtatactcaactgtgtcaatacttaaatacacttactttagctgtaccctacaacatgagagttattcactttggtgctggctctgataaaggagttgcaccaggtacagctgtnctcagacaatggttgccaactggcacactacttgtcgattcagatcttaatgacttcgtctccgacgcagattctactttaattggagactgtgcaacagtacatacggctaataaatgggaccttattattagcgatatgtatgaccctaagaccaaacatgtgacaaaagagaatgactctaaagaagggtttttcacttatctgtgtggatttataaagcaaaaactagccctgggtggttctatagctgtaaagataacagagcattcttggaatgctgacctttacaagcttatgggccatttctcatggtggacagcttttgttacaaatgtaaatgcatcatcatcggaagcatttttaattggggctaactatcttggcaagccgaaggaacaaattgatggctataccatgcatgctaactacattttctggaggaacacaaatcctatccagttgtcttcctattcacnnnnnnnnnnnnnnnnnnnnnnnnnnnnnnnnnnnnnnnnnnnnnnnnnnnnnnnnnnnnnnnnnnnnnnnnnnnnnnnnnnnnnnnnnnnnnnnnnnnnttattaacaattctactaatgttgttatacgagcatgtaactttgaattgtgtgacaaccctttctttgctgtttctaaacccatgggtacacagacacatactatgatattcgataatgcatttaattgcactttcgagtacatatctgatgccttttcgcttgatgtttcagaaaagtcaggtaattttaaacacttacgagagtttgtgtttaaaaataaagatgggtttctctatgtttataagggctatcaacctatagatgtagttcgtgatctaccttctggttttaacactttgaaacccatttttaagttgcctcttggtattaacattacaaattttagagccattcttacagcctttttacctgctcaagacacttggggcacgtcagctgcagcctattttgttggctatttaaagccaactacatttatgctcaagtatgatgaaaatggtacaatcacagatgctgttgattgttctcaaaatccacttgctgaactcaaatgctctgttaagagctttgagattgacaaaggaatttaccagacctctaatttcagggttgttccctcaagagatgttgtgagattccctaatattacaaacttgtgtccttttggagaggtttttaatgctactaaattcccttctgtctatgcatgggagaggaaaagaatttctaattgtgttgctgattactctgtgctctacaactcaacatttttttcaacctttaagtgctatggcgtttctgccactaagttgaatgatctttgcttctccaatgtctatgcagattcttttgtagtcaagggagatgatgtaagacaaatagcgccaggacaaactggtgttattgctgattataattataaattgccagatgatttcatgggttgtgtccttgcttggaatactaggaacattgatgctacttcaactggtaattataattataaatataggtatcttagacatggcaagcttaggccctttgagagagacatatctaatgtgcctttctcccctgatggcaaaccttgcaccccacctgctcttaattgttattggccattaaatgattatggtttttacaccactactggcattggctaccaaccttacagagttgtagtactttcttttgaacttttaaatgcaccggccacggtttgtggaccaaaattatccactgaccttattaagaaccagtgtgtcaattttaattttaatggactcactggtactggtgtgttaactccttcttcaaagagatttcaaccatttcaacaatttggccgtgatgtttctgatttcactgattccgttcgagatcctaaaacatctgaaatattagacatttcaccttgctcttttgggggtgtaagtgtaattacacctggaacaaatgcttcatctgaagttgctgttctatatcaagatgttaactgcactgatgtttctacagcaattcatgcagatcaactcacaccagcttggcgcatatattctactggaaacaatgtattccagactcaagcaggctgtcttataggagctgagcatgtcgacacttcttatgagtgcgacattcctattggagctggcatttgtgctagttaccatacagtttctttattacgtagtactagccaaaaatctattgtggcttatactatgtctttaggtgctgatagttcaattgcttactctaataacaccattgctatacctactaacttttcaattagcattactacagaagtaatgcctgtttctatggctaaaacctccgtagattgtaatatgtacatctgcggagattctactgaatgtgctaatttgcttctccaatatggtagcttttgcacacaactaaatcgtgcactctcaggtattgctgctgaacaggatcgcaacacacgtgaagtgttcgctcaagtcaaacaaatgtacaaaaccccaactttgaaagattttggtggttttaatttttcacaaatattacctgaccctctaaagccaactaagaggtcttttattgaggacttgctctttaataaggtgacactcgctgatgctggcttcatgaagcaatatggcgaatgcctaggtgatattaatgctagagatctcatttgtgcgcagaagttcaatggacttacagtgttgccacctctgctcactgatgatatgattgctgcctacactgctgctctagttagtggtactgccactgctggatggacatttggtgctggcgctgctcttcaaataccttttgctatgcaaatggcatataggttcaatggcattggagttacccaaaatgttctctatgagaaccaaaaacaaatcgccaaccaatttaacaaggcgattagtcaaattcaagaatcacttacaacaacatcaactgcattgggcaagctgcaagacgttgttaaccagaatgctcaagcattaaacacacttgttaaacaacttagctctaattttggtgcaatttcaagtgtgctaaatgatatcctttcgcgacttgataaagtcgaggcggaggtacaaattgacaggttaattacaggcagacttcaaagccttcaaacctatgtaacacaacaactaatcagggctgctgaaatcagggcttctgctaatcttgctgctactaaaatgtctgagtgtgttcttggacaatcaaaaagagttgacttttgcggaaagggctaccaccttatgtccttcccacaagcagccccgcatggtgttgtcttcctacatgtcacgtatgtgccatcccaggagaggaacttcaccacagcgccagcaatttgtcatgaaggcaaagcatacttccctcgtgaaggtgtttttgtgtttaatggcacttcttggtttattacacagaggaacttcttttctccacaaataattactacagacaatacatttgtctcaggaaattgtgatgtcgttattggcatcattaacaacacagtttatgatcctctgcaacctgagcttgactcattcaaagaagagctggacaagtacttcaaaaatcatacatcaccagatgttgatcttggcgacatttcaggcattaacgcttctgtcgtcaacattcaagaagaaattgaccgcctcaatgaggtcgctaaaaatttaaatgaatcactcattgaccttcaagaattgggaaaatatgagcaatatattaaatggccttggtatgtttggctcggcttcattgctggactaattgccatcgtcatggttacaatcttgctttgttgcatgactagttgttgcagttgcctcaagggtgcatgctcttgtggttcttgctgcaagtttgatgaggatgactctgagccagttctcaagggtgtcaaattacattacacataaacgaacttatggatttgtttatgagattttttactcttggatcaattactgcacagccagtaaaaattgagcaatgcttctcctgcaagtactgttcatgctacagcaacgataccgctacaagcctcactccctttcggatggcttgttattggcgttgcatttcttgctgtttttcagagcgctaccaaaataattgcgctcaataaaagatggcagctagccctttataagggcttccagttcatttgcaatttactgctgctatttgttaccatctattcacatcttttgcttgtcgctgcaggtatggaggcgcaatttttgtagcctctatgccttgatatattttctacaatgcatcaacgcatgtagaattattatgagatgttggctttgttggaagtgcaaatccaagaacccattactttatgatgccaactactttgtttgctggcacacacataactatgactactgtataccatataacagtgtcacagatacaattgtcgttactgcaggtgacggcatttcaacaccaaaactcaaagaagactaccaaattggtggttattctgaggattggcactcaggtgttaaagactatgtcgttgtacatggctatttcaccgaagtttactaccagcttgagtctacacaaattactacagacactggtattgaaaatgctacattcttcatctttaacaagcttgttaaagacccaccgaatgtgcaaatacacacaatcgacggctcttcaggagttgcnaatccagcaatggatccnatttatgatgagccgacgacgactactagcgtgcctttgtaagcacaagaaagtgagtacgaacttatgtactcattcgtttcggaagaaacaggtacgttaatagttaatagcgtacttctttttcttgctttcatggtattcttgctagtcacactagccatccttactgcgcttcgattgtgtgcgtactgctgcaatattgttaacgtgagtttagtaaaaccaacggtttacgtctactcgcgtgttaaaaatctgaactcttctgaaggagttcctgatcttctggtctaaacgaactaactattattattattctgtttggaactttaacattgcttatcatggcagacaacggtactattaccgttgaggagcttaaacaactcctggaacaatggaacctagtaataggtttcctattcctagcctggattatgttactacaatttgcctattctaatcggaacaggtttttgtacataataaagcttgttttcctctggctcttgtggccagtaacacttgcttgctttgtgcttgctgctgtctacagaattaattgggtgactggcgggattgcgattgcaatggcttgtattgtaggcttgatgtggcttagctacttcgttgcttccttcaggctgtttgctcgtacccgctcaatgtggtcattcaacccagaaacaaacattcttctcaatgtgcctctccgggggacaattgtgaccagaccgctcatggaaagtgaacttgtcattggtgctgtgatcattcgtggtcacttgcgaatggccggacactccctagggcgctgtgacattaaggacctgccaaaagagatcactgtggctacatcacgaacgctttcttattacaaannnnnnnnnnnnnnnnnnnnnnnnnnnnnnnnnnnnnnnnnnnnnnnnnnnnnnnnnnnnnnnnnnnnnnnnnnnnnnnnnnnnnnnnnnnnnnnnnnnntgcatacaaccgctaccgtattggaaactataaattaaatacagaccacgccggtagcaacgacaatattgctttgctagtacagtaagtgacaacagatgtttcatcttgttgacttccaggttacaatagcagagatattgattatcattatgaggactttcaggattgctatttggaatcttgacgttataataagttcaatagtgagacaattatttaagcctctaactaagaagaattattcggagttagatgatgaagaacctatggagttagattatccataaaacgaacatgaaaattattctcttcctgacattgattgtatttacatcttgcgagctatatcactatcaggagtgtgttagaggtacgactgtactactaaaagaaccttgcccatcaggaacatacgagggcaattcaccatttcaccctcttgctgacaataaatttgcactaacttgcactagcacacactttgcttttgcttgtgctgacggtactcgacatacctatcagctgcgtgcaagatcagtttcaccaaaacttttcatcagacaagaggaggttcaacaagagctctactcgccactttttctcattgttgctgctctagtatttttaatactttgcttcaccattaagagaaagacagaatgaatgagctcactttaattgacttctatttgtgctttttagcctttctgctattccttgttttaataatgcttattatattttggttttcactcgaaatccaggatctagaagaaccttgtaccaaagtctaaacgaacatgaaacttctcattgttttgacttgtatttctctatgcagttgcatacgcactgtagtacagcgctgtgcatctaataaacctcatgtgcttgaagatccttgtcctactggttaccaacctgaatggaatataaggtacaacactaggggtaatacttatagcactgcttggctttgtgctctaggaaaggttttaccttttcatagatggcacactatggttcaaacatgcacacctaatgttactatcaactgtcaagatccagctggtggtgcgcttatagcctaggtgttggtaccttcatgaaggtcaccaaactgctgcatttagagacgtatttgttgttttaaataaacgaacaaattaaaatgtctgataatggaccccaatcaaaccaacgtagtgccccccgcattacatttggtggacccacagattcaactgacaataaccagaatggaggacgcaatggggcaaggccaaaacagcgccgaccccaaggtttacccaataatactgcgtcttggttcacagctctcactcagcatggcaaggaggaacttagattccctcgaggccagggcgttccaatcaacaccaatagtggtccagatgaccaaattggctactaccgaagagctacccgacgagttcgtggtggtgacggcaaaatgaaagagctcagccccagatggtacttctattacctaggaactggcccagaagcttcacttccctacggcgctaacaaagaaggcatcgtatgggttgcaactgagggagccttgaatacacccaaagaccacattggcacccgcaatcctaatnacaatgctgccaccgtgctacaacttcctcaaggaacaacattgccaaaaggcttctacgcagagggaagcagaggcggcagtcaagcctcttctcgctcctcatcacgtagtcgcggtaattcaagaaattcaactcctggcagcagtaggggaaattctcctgctcgaatggctagcggaggtggtgaaactgccctcgcgctattgctgctagacagattgaaccagcttgagagcaaagtttctggtaaaggccaacaacaacaaggccaaactgtcactaagaaatctgctgctgaggcatctaaaaagcctcgccaaaaacgtactgccacaaaacagtacaacgtcactcaagcatttgggagacgtggtccagaacaaacccaaggaaatttcggggaccaagacctaatcagacaaggaactgattacaaacattggccgcaaattgcacaatttgctccaagtgcctctgcattctttggaatgtcacgcattggcatggaagtcacaccttcgggaacatggctgacttatcatggagccattaaattggatgacaaagatccacaattcaaagacaacgtcatactgctgaacaagcacattgacgcatacaaaacattcccaccaacagagcctaaaaaggacaaaaagaaaaagactgatgaagctcagcctttgccgcagagaccaaagaagcagcccactgtgactcttcttcctgcggctgacatggatgatttctccagacaacttcaaaattccatgagtggagcttctgctgattcaactcaggcataaacactcatgatgaccacacaaggcagatgggctatgtaaacgttttcgcaattccgtttacgatacatagtctactcttgtgcagaatgaattctcgtaactaaacagcacaagtaggtttagttaactttaatctcacatagcaatctttaatcaatgtgtaacattagggaggacttgaaagagccaccacattttcatcgaggccacgcggagtacgatcgagggtacagtgaataatgctagggagagctgc

SEQ ID NO: 29740 - DNA, 28920 bp, SARS Coronavirus
  misc_feature 7230-7329, 9929-10028, 10137-10236, 11646-11745, 20385-20484,21024-21123, 21753-21852, 22112-22211, 25301-25400: n = A,T,C or G
ttattaggtttttacctacccaggaaaagccaaccaacctcgatctcttgtagatctgttctctaaacgaactttaaaatctgtgtagctgtcgctcggctgcatgcctagtgcacctacgcagtataaacaataataaattttactgtcgttgacaagaaacgagtaactcgtccctcttctgcagactgcttacggtttcgtccgtgttgcagtcgatcatcagcatacctaggtttcgtccgggtgtgaccgaaaggtaagatggagagccttgttcttggtgtcaacgagaaaacacacgtccaactcagtttgcctgtccttcaggttagagacgtgctagtgcgtggcttcggggactctgtggaagaggccctatcggaggcacgtgaacacctcaaaaatggcacttgtggtctagtagagctggaaaaaggcgtactgccccagcttgaacagccctatgtgttcattaaacgttctgatgccttaagcaccaatcacggccacaaggtcgttgagctggttgcagaaatggacggcattcagtacggtcgtagcggtataacactgggagtactcgtgccacatgtgggcgaaaccccaattgcataccgcaatgttcttcttcgtaagaacggtaataagggagccggtggtcatagctatggcatcgatctaaagtcttatgacttaggtgacgagcttggcactgatcccattgaagattatgaacaaaactggaacactaagcatggcagtggtgcactccgtgaactcactcgtgagctcaatggaggtgcagtcactcgctatgtcgacaacaatttctgtggcccagatgggtaccctcttgattgcatcaaagattttctcgcacgcgcgggcaagtcaatgtgcactctttccgaacaacttgattacatcgagtcgaagagaggtgtctactgctgccgtgaccatgagcatgaaattgcctggttcactgagcgctctgataagagctacgagcaccagacacccttcgaaattaagagtgccaagaaatttgacactttcaaaggggaatgcccaaagtttgtgtttcctcttaactcaaaagtcaaagtcattcaaccacgtgttgaaaagaaaaagactgagggtttcatggggcgtatacgctctgtgtaccctgttgcatctccacaggagtgtaacaatatgcacttgtctaccttgatgaaatgtaatcattgcgatgaagtttcatggcagacgtgcgactttctgaaagccacttgtgaacattgtggcactgaaaatttagttattgaaggacctactacatgtgggtacctacctactaatgctgtagtgaaaatgccatgtcctgcctgtcaagacccagagattggacctgagcatagtgttgcagattatcacaaccactcaaacattgaaactcgactccgcaagggaggtaggactagatgttttggaggctgtgtgtttgcctatgttggctgctataataagcgtgcctactgggttcctcgtgctagtgctgatattggctcaggccatactggcattactggtgacaatgtggagaccttgaatgaggatctccttgagatactgagtcgtgaacgtgttaacattaacattgttggcgattttcatttgaatgaagaggttgccatcattttggcatctttctctgcttctacaagtgcctttattgacactataaagagtcttgattacaagtctttcaaaaccattgttgagtcctgcggtaactataaagttaccaagggaaagcccgtaaaaggtgcttggaacattggacaacagagatcagttttaacaccactgtgtggttttccctcacaggctgctggtgttatcagatcaatttttgcgcgcacacttgatgcagcaaaccactcaattcctgatttgcaaagagcagctgtcaccatacttgatggtatttctgaacagtcattacgtcttgtcgacgccatggtttatacttcagacctgctcaccaacagtgtcattattatggcatatgtaactggtggtcttgtacaacagacttctcagtggttgtctaatcttttgggcactactgttgaaaaactcaggcctatctttgaatggattgaggcgaaacttagtgcaggagttgaatttctcaaggatgcttgggagattctcaaatttctcattacaggtgtttttgacatcgtcaagggtcaaatacaggttgcttcagataacatcaaggattgtgtaaaatgcttcattgatgttgttaacaaggcactcgaaatgtgcattgatcaagtcactatcgctggcgcaaagttgcgatcactcaacttaggtgaagtcttcatcgctcaaagcaagggactttaccgtcagtgtatacgtggcaaggagcagctgcaactactcatgcctcttaaggcaccaaaagaagtaacctttcttgaaggtgattcacatgacacagtacttacctctgaggaggttgttctcaagaacggtgaactcgaagcactcgagacgcccgttgatagcttcacaaatggagctatcgttggcacaccagtctgtgtaaatggcctcatgctcttagagattaaggacaaagaacaatactgcgcattgtctcctggtttactggctacaaacaatgtctttcgcttaaaagggggtgcaccaattaaaggtgtaacctttggagaagatactgtttgggaagttcaaggttacaagaatgtgagaatcacatttgagcttgatgaacgtgttgacaaagtgcttaatgaaaagtgctctgtctacactgttgaatccggtaccgaagttactgagtttgcatgtgttgtagcagaggctgttgtgaagactttacaaccagtttctgatctccttaccaacatgggtattgatcttgatgagtggagtgtagctacattctacttatttgatgatgctggtgaagaaaacttttcatcacgtatgtattgttccttttaccctccagatgaggaagaagaggacgatgcagagtgtgaggaagaagaaattgatgaaacctgtgaacatgagtacggtacagaggatgattatcaaggtctccctctggaatttggtgcctcagctgaaacagttcgagttgaggaagaagaagaggaagactggctggatgatactactgagcaatcagagattgagccagaaccagaacctacacctgaagaaccagttaatcagtttactggttatttaaaacttactgacaatgttgccattaaatgtgttgacatcgttaaggaggcacaaagtgctaatcctatggtgattgtaaatgctgctaacatacacctgaaacatggtggtggtgtagcaggtgcactcaacaaggcaaccaatggtgccatgcaaaaggagagtgatgattacattaagctaaatggccctcttacagtaggagggtcttgtttgctttctggacataatcttgctaagaagtgtctgcatgttgttggacctaacctaaatgcaggtgaggacatccagcttcttaaggcagcatatgaaaatttcaattcacaggacatcttacttgcaccattgttgtcagcaggcatatttggtgctaaaccacttcagtctttacaagtgtgcgtgcagacggttcgtacacaggtttatattgcagtcaatgacaaagctctttatgagcaggttgtcatggattatcttgataacctgaagcctagagtggaagcacctaaacaagaggagccaccaaacacagaagattccaaaactgaggagaaatctgtcgtacagaagcctgtcgatgtgaagccaaaaattaaggcctgcattgatgaggttaccacaacactggaagaaactaagtttcttaccaataagttactcttgtttgctgatatcaatggtaagctttaccatgattctcagaacatgcttagaggtgaagatatgtctttccttgagaaggatgcaccttacatggtaggtgatgttatcactagtggtgatatcacttgtgttgtaataccctccaaaaaggctggtggcactactgagatgctctcaagagctttgaagaaagtgccagttgatgagtatataaccacgtaccctggacaaggatgtgctggttatacacttgaggaagctaagactgctcttaagaaatgcaaatctgcattttatgtactaccttcagaagcacctaatgctaaggaagagattctaggaactgtatcctggaatttgagagaaatgcttgctcatgctgaagagacaagaaaattaatgcctatatgcatggatgttagagccataatggcaaccatccaacgtaagtataaaggaattaaaattcaagagggcatcgttgactatggtgtccgattcttcttttatactagtaaagagcctgtagcttctattattacgaagctgaactctctaaatgagccgcttgtcacaatgccaattggttatgtgacacatggttttaatcttgaagaggctgcgcgctgtatgcgttctcttaaagctcctgccgtagtgtcagtatcatcaccagatgctgttactacatataatggatacctcacttcgtcatcaaagacatctgaggagcactttgtagaaacagtttctttggctggctcttacagagattggtcctattcaggacagcgtacagagttaggtgttgaatttcttaagcgtggtgacaaaattgtgtaccacactctggagagccccgtcgagtttcatcttgacggtgaggttctttcacttgacaaactaaagagtctcttatccctgcgggaggttaagactataaaagtgttcacaactgtggacaacactaatctccacacacagcttgtggatatgtctatgacatatggacagcagtttggtccaacatacttggatggtgctgatgttacaaaaattaaacctcatgtaaatcatgagggtaagactttctttgtactacctagtgatgacacactacgtagtgaagctttcgagtactaccatactcttgatgagagttttcttggtaggtacatgtctgctttaaaccacacaaagaaatggaaatttcctcaagttggtggtttaacttcaattaaatgggctgataacaattgttatttgtctagtgttttattagcacttcaacagcttgaagtcaaattcaatgcaccagcacttcaagaggcttattatagagcccgtgctggtgatgctgctaacttttgtgcactcatactcgcttacagtaataaaactgttggcgagcttggtgatgtcagagaaactatgacccatcttctacagcatgctaatttggaatctgcaaagcgagttcttaatgtggtgtgtaaacattgtggtcagaaaactactaccttaacgggtgtagaagctgtgatgtatatgggtactctatcttatgataatcttaagacaggtgtttccattccatgtgtgtgtggtcgtgatgctacacaatatctagtacaacaagagtcttcttttgttatgatgtctgcaccacctgctgagtataaattacagcaggtacattcttatgtgcgaatgagtacactggtaactatcagtgtggtcattacactcatataactgctaaggagaccctctatcgtattgacggagctcaccttacaaagatgtcagagtacaaaggaccagtgactgatgttttctacaaggaaacatcttacactacaaccatcaagcctgtgtcgtataaactcgatggagttacttacacagagattgaaccaaaattggatgggtattataaaaaggataatgcttactatacagagcagcctatagaccttgtaccaactcaaccattaccaaatgcgagttttgataatttcaaactcacatgttctaacacaaaatttgctgatgatttaaatcaaatgacaggcttcacaaagccagcttcacgagagctatctgtcacattcttcccagacttgaatggcgatgtagtggctattgactatagacactattcagcgagtttcaagaaaggtgctaaattactgcataagccaattgtttggcacattaaccaggctacaaccaagacaacgttcaaaccaaacacttggtgtttacgttgtctttggagtacaaagccagtagatacttcaaattcatttgaagttctggcagtagaagacacacaaggaatggacaatcttgcttgtgaaagtcaacaacccacctctgaagaagtagtggaaaatcctaccatacagaaggaagtcatagagtgtgacgtgaaaactaccgaagttgtaggcaatgtcatacttaaaccatcagatgaaggtgttaaagtaacacaagagttaggtcatgaggatcttatggctgcttatgtggaaaacacaagcattaccattaagaaacctaatgagctttcactagccttaggtttaaaaacaattgccactcatggtattgctgcaattaatagtgttccttggagtaaaattttggcttatgtcaaaccattcttaggacaagcagcaattacaacatcaaattgcgctaagagattagcacaacgtgtgtttaacaattatatgccttatgtgtttacattattgttccaattgtgtacttttactaaaagtaccaattctagaattagagcttcactacctacaactattgctaaaaatagtgttaagagtgttgctaaattatgtttggatgccggcattaattatgtgaagtcacccaaattttctaaattgttcacaatcgctatgtggctattgttgttaagtatttgcttaggttctctaatctgtgtaactgctgcttttggtgtactcttatctaattttggtgctccttcttattgtaatggcgttagagaattgtatcttaattcgtctaacgttactactatggatttctgtgaaggttcttttccttgcagcatttgtttaagtggattagactcccttgattcttatccagctcttgaaaccattcaggtgacgatttcatcgtacaagctagacttgacaattttaggtctggccgctgagtgggttttggcatatatgttgttcacaaaattcttttatttattaggtctttcagctnnnnnnnnnnnnnnnnnnnnnnnnnnnnnnnnnnnnnnnnnnnnnnnnnnnnnnnnnnnnnnnnnnnnnnnnnnnnnnnnnnnnnnnnnnnnnnnnnnnncaaatggcacccgtttctgcaatggttaggatgtacatcttctttgcttctttctactacatatggaagagctatgttcatatcatggatggttgcacctcttcgacttgcatgatgtgctataagcgcaatcgtgccacacgcgttgagtgtacaactattgttaatggcatgaagagatctttctatgtctatgcaaatggaggccgtggcttctgcaagactcacaattggaattgtctcaattgtgacacattttgcactggtagtacattcattagtgatgaagttgctcgtgatttgtcactccagtttaaaagaccaatcaaccctactgaccagtcatcgtatattgttgatagtgttgctgtgaaaaatggcgcgcttcacctctactttgacaaggctggtcaaaagacctatgagagacatccgctctcccattttgtcaatttagacaatttgagagctaacaacactaaaggttcactgcctattaatgtcatagtttttgatggcaagtccaaatgcgacgagtctgcttctaagtctgcttctgtgtactacagtcagctgatgtgccaacctattctgttgcttgaccaagctcttgtatcagacgttggagatagtactgaagtttccgttaagatgtttgatgcttatgtcgacaccttttcagcaacttttagtgttcctatggaaaaacttaaggcacttgttgctacagctcacagcgagttagcaaagggtgtagctttagatggtgtcctttctacattcgtgtcagctgcccgacaaggtgttgttgataccgatgttgacacaaaggatgttattgaatgtctcaaactttcacatcactctgacttagaagtgacaggtgacagttgtaacaatttcatgctcacctataataaggttgaaaacatgacgcccagagatcttggcgcatgtattgactgtaatgcaaggcatatcaatgcccaagtagcaaaaagtcacaatgtttcactcatctggaatgtaaaagactacatgtctttatctgaacagctgcgtaaacaaattcgtagtgctgccaagaagaacaacataccttttagactaacttgtgctacaactagacaggttgtcaatgtcataactactaaaatctcactcaagggtggtaagattgttagtacttgttttaaacttatgcttaaggccacattattgtgcgttcttgctgcattggtttgttatatcgttatgccagtacatacattgtcaatccatgatggttacacaaatgaaatcattggttacaaagccattcaggatggtgtcactcgtgacatcatttctactgatgattgttttgcaaataaacatgctggttttgacgcatggtttagccagcgtggtggttcatacaaaaatgacaaaagctgccctgtagtagctgctatcattacaagagagattggtttcatagtgcctggcttaccgggtactgtgctgagagcaatcaatggtgacttcttgcattttctacctcgtgtttttagtgctgttggcaacatttgctacacaccttccaaactcattgagtatagtgattttgctacctctgcttgcgttcttgctgctgagtgtacaatttttaaggatgctatgggcaaacctgtgccatattgttatgacactaatttgctagagggttctatttcttatagtgagcttcgtccagacactcgttatgtgcttatggatggttccatcatacagtttcctaacacttacctggagggttctgttagagtagtaacaacttttgatgctgagtactgtagacatggtacatgcgaaaggtcagaagtaggtatttgcctatctaccagtggtagatgggttcttaataatgagcattacagagctctatcaggagttttctgtggtgttgatgcgatgaatctcatagctaacatctttactcctcttgtgcaacctgtgggtgctttagatgtgtctgcttcagtagtggctggtggtattattgccatattggtgacttgtgctgcctactactttatgaaattcagacgtgcttttggtgagtacaaccatgttgttgctgctaatgcacttttgtttttgatgtctttcactatactctgtctggtaccagcttacagctttctgccgggagtctactcagtcttttacttgtacttgacattctatttcaccaatgatgtttcattcttggctcaccttcaatggtttgccatgttttctcctattgtgcctttttggataacagcaatctatgtattctgtatttctctgaagcactgccattggttctttaacaactatcttaggaaaagagtcatgtttaatggagttacatttagtaccttcgaggaggctgctttgtgtacctttttgctcaacaaggaaatgtacctaaaattgcgtagcgagacactgttgccacttacacagtataacaggtatcttgctctatataacaagtacaagtatttcagtggagtcttagatactaccagctatcgtgaagcagcttgctgccacttagcaaaggctctaannnnnnnnnnnnnnnnnnnnnnnnnnnnnnnnnnnnnnnnnnnnnnnnnnnnnnnnnnnnnnnnnnnnnnnnnnnnnnnnnnnnnnnnnnnnnnnnnnnntggcattcccgtcaggcaaagttgaagggtgcatggtacaagtaacctgtggaactacaactcttaatggattgtggttggatgacacagtatactgtccaagacatgtnnnnnnnnnnnnnnnnnnnnnnnnnnnnnnnnnnnnnnnnnnnnnnnnnnnnnnnnnnnnnnnnnnnnnnnnnnnnnnnnnnnnnnnnnnnnnnnnnnnnccattctatgcaaaattgtctgcttaggcttaaagttgatacttctaaccctaagacacccaagtataaatttgtccgtatccaacctggtcaaacattttcagttctagcatgctacaatggttcaccatctggtgtttatcagtgtgccatgagacctaatcataccattaaaggttctttccttaatggatcatgtggtagtgttggttttaacattgattatgattgcgtgtctttctgctatatgcatcatatggagcttccaacaggagtacacgctggtactgacttagaaggtaaattctatggtccatttgttgacagacaaactgcacaggctgcaggtacagacacaaccataacattaaatgttttggcatggctgtatgctgctgttatcaatggtgataggtggtttcttaatagattcaccactactttgaatgactttaaccttgtggcaatgaagtacaactatgaacctttgacacaagatcatgttgacatattgggacctctttctgctcaaacaggaattgccgtcttagatatgtgtgctgctttgaaagagctgctgcagaatggtatgaatggtcgtactatccttggtagcactattttagaagatgagtttacaccatttgatgttgttagacaatgctctggtgttaccttccaaggtaagttcaagaaaattgttaagggcactcatcattggatgcttttaactttcttgacatcactattgattcttgttcaaagtacacagtggtcactgtttttctttgtttacgagaatgctttcttgccatttactcttggtattatggcaattgctgcatgtgctatgctgcttgttaagcataagcacgcattcttgtgcttgtttctgttaccttctcttgcaacagttgcttactttaatatggtctacatgcctgctagctgggtgatgcgtatcatgacatggcttgaattggctgacactagcttgtctggttataggcttaaggattgtgttatgtatgcttcagctttagttttgcttattctcatgacagctcgcactgtttatgatgatgctgctagacgtgtttggacactgatgaatgtcattacacttgtttacaaagtctactatggtaatgctttagatcaagctatttccatgtgggccttagttatttctgtaacctctaactattctggtgtcgttacgactatcatgtttttagctagagctatagtgtttgtgtgtgttgagtattacccattgttatttattactggcaacaccttacagtgtatcatgcttgtttattgtttcttaggctattgttgctgctgctactttggccttttctgtttactcaaccgttacttcaggcttactcttggtgtttatgnnnnnnnnnnnnnnnnnnnnnnnnnnnnnnnnnnnnnnnnnnnnnnnnnnnnnnnnnnnnnnnnnnnnnnnnnnnnnnnnnnnnnnnnnnnnnnnnnnnnaggctattgcttcagaatttagttctttaccatcatatgccgcttatgccactgcccaggaggcctatgagcaggctgtagctaatggtgattctgaagtcgttctcaaaaagttaaagaaatctttgaatgtggctaaatctgagtttgaccgtgatgctgccatgcaacgcaagttggaaaagatggcagatcaggctatgacccaaatgtacaaacaggcaagatctgaggacaagagggcaaaagtaactagtgctatgcaaacaatgctcttcactatgcttaggaagcttgataatgatgcacttaacaacattatcaacaatgcgcgtgatggttgtgttccactcaacatcataccattgactacagcagccaaactcatggttgttgtccctgattatggtacctacaagaacacttgtgatggtaacacctttacatatgcatctgcactctgggaaatccagcaagttgttgatgcggatagcaagattgttcaacttagtgaaattaacatggacaattcaccaaatttggcttggcctcttattgttacagctctaagagccaactcagctgttaaactacagaataatgaactgagtccagtagcactacgacagatgtcctgtgcggctggtaccacacaaacagcttgtactgatgacaatgcacttgcctactataacaattcgaagggaggtaggtttgtgctggcattactatcagaccaccaagatctcaaatgggctagattccctaagagtgatggtacaggtacaatttacacagaactggaaccaccttgtaggtttgttacagacacaccaaaagggcctaaagtgaaatacttgtacttcatcaaaggcttaaacaacctaaatagaggtatggtgctgggcagtttagctgctacagtacgtcttcaggctggaaatgctacagaagtacctgccaattcaactgtgctttccttctgtgcttttgcagtagaccctgctaaagcatataaggattacctagcaagtggaggacaaccaatcaccaactgtgtgaagatgttgtgtacacacactggtacaggacaggcaattactgtaacaccagaagctaacatggaccaagagtcctttggtggtgcttcatgttgtctgtattgtagatgccacattgaccatccaaatcctaaaggattctgtgacttgaaaggtaagtacgtccaaatacctaccacttgtgctaatgacccagtgggttttacacttagaaacacagtctgtaccgtctgcggaatgtggaaaggttatggctgtagttgtgaccaactccgcgaacccttgatgcagtctgcggatgcatcaacgtttttaaacgggtttgcggtgtaagtgcagcccgtcttacaccgtgcggcacaggcactagtactgatgtcgtctacagggcttttgatatttacaacgaaaaagttgctggttttgcaaagttcctaaaaactaattgctgtcgcttccaggagaaggatgaggaaggcaatttattagactcttactttgtagttaagaggcatactatgtctaactaccaacatgaagagactatttataacttggttaaagattgtccagcggttgctgtccatgactttttcaagtttagagtagatggtgacatggtaccacatatatcacgtcagcgtctaactaaatacacaatggctgatttagtctatgctctacgtcattttgatgagggtaattgtgatacattaaaagaaatactcgtcacatacaattgctgtgatgatgattatttcaataagaaggattggtatgacttcgtagagaatcctgacatcttacgcgtatatgctaacttaggtgagcgtgtacgccaatcattattaaagactgtacaattctgcgatgctatgcgtgatgcaggcattgtaggcgtactgacattagataatcaggatcttaatgggaactggtacgatttcggtgatttcgtacaagtagcaccaggctgcggagttcctattgtggattcatattactcattgctgatgcccatcctcactttgactagggcattggctgctgagtcccatatggatgctgatctcgcaaaaccacttattaagtgggatttgctgaaatatgattttacggaagagagactttgtctcttcgaccgttattttaaatattgggaccagacataccatcccaattgtattaactgtttggatgataggtgtatccttcattgtgcaaactttaatgtgttattttctactgtgtttccacctacaagttttggaccactagtaagaaaaatatttgtagatggtgttccttttgttgtttcaactggataccattttcgtgagttaggagtcgtacataatcaggatgtaaacttacatagctcgcgtctcagtttcaaggaacttttagtgtatgctgctgatccagctatgcatgcagcttctggcaatttattgctagataaacgcactacatgcttttcagtagctgcactaacaaacaatgttgcttttcaaactgtcaaacccggtaattttaataaagacttttatgactttgctgtgtctaaaggtttctttaaggaaggaagttctgttgaactaaaacacttcttctttgctcaggatggcaacgctgctatcagtgattatgactattatcgttataatctgccaacaatgtgtgatatcagacaactcctattcgtagttgaagttgttgataaatactttgattgttacgatggtggctgtattaatgccaaccaagtaatcgttaacaatctggataaatcagctggtttcccatttaataaatggggtaaggctagactttattatgactcaatgagttatgaggatcaagatgcacttttcgcgtatactaagcgtaatgtcatccctactataactcaaatgaatcttaagtatgccattagtgcaaagaatagagctcgcaccgtagctggtgtctctatctgtagtactatgacaaatagacagtttcatcagaaattattgaagtcaatagccgccactagaggagctactgtggtaattggaacaagcaagttttacggtggctggcataatatgttaaaaactgtttacagtgatgtagaaactccacaccttatgggttgggattatccaaaatgtgacagagccatgcctaacatgcttaggataatggcctctcttgttcttgctcgcaaacataacacttgctgtaacttatcacaccgtttctacaggttagctaacgagtgtgcgcaagtattaagtgagatggtcatgtgtggcggctcactatatgttaaaccaggtggaacatcatccggtgatgctacaactgcttatgctaatagtgtctttaacatttgtcaagctgttacagccaatgtaaatgcacttctttcaactgatggtaataagatagctgacaagtatgtccgcaatctacaacacaggctctatgagtgtctctatagaaatagggatgttgatcatgaattcgtggatgagttttacgcttacctgcgtaaacatttctccatgatgattctttctgatgatgccgttgtgtgctataacagtaactatgcggctcaaggtttagtagctagcattaagaactttaaggcagttctttattatcaaaataatgtgttcatgtctgaggcaaaatgttggactgagactgaccttactaaaggacctcacgaattttgctcacagcatacaatgctagttaaacaaggagatgattacgtgtacctgccttacccagatccatcaagaatattaggcgcaggctgttttgtcgatgatattgtcaaaacagatggtacacttatgattgaaaggttcgtgtcactggctattgatgcttacccacttacaaaacatcctaatcaggagtatgctgatgtctttcacttgtatttacaatacattagaaagttacatgatgagcttactggccacatgttggacatgtattccgtaatgctaactaatgataacacctcacggtactgggaacctgagttttatgaggctatgtacacaccacatacagtcttgcaggctgtaggtgcttgtgtattgtgcaattcacagacttcacttcgttgcggtgcctgtattaggagaccattcctatgttgcaagtgctgctatgaccatgtcatttcaacatcacacaaattagtgttgtctgttaatccctatgtttgcaatgccccaggttgtgatgtcactgatgtgacacaactgtatctaggaggtatgagctattattgcaagtcacataagcctcccattagttttccattatgtgctaatggtcaggtttttggtttatacaaaaacacatgtgtaggcagtgacaatgtcactgacttcaatgcgatagcaacatgtgattggactaatgctggcgattacatacttgccaacacttgtactgagagactcaagcttttcgcagcagaaacgctcaaagccactgaggaaacatttaagctgtcatatggtattgccactgtacgcgaagtactctctgacagagaattgcatctttcatgggaggttggaaaacctagaccaccattgaacagaaactatgtctttactggttaccgtgtaactaaaaatagtaaagtacagattggagagtacacctttgaaaaaggtgactatggtgatgctgttgtgtacagaggtactacgacatacaagttgaatgttggtgattactttgtgttgacatctcacactgtaatgccacttagtgcacctactctagtgccacaagagcactatgtgagaattactggcttgtacccaacactcaacatctcagatgagttttctagcaatgttgcaaattatcaaaaggtcggcatgcaaaagtactctacactccaaggaccacctggtactggtaagagtcattttgccatcggacttgctctctattacccatctgctcgcatagtgtatacggcatgctctcatgcagctgttgatgccctatgtgaaaaggcattaaaatatttgcccatagataaatgtagtagaatcatacctgcgcgtgcgcgcgtagagtgttttgataaattcaaagtgaattcaacactagaacagtatgttttctgcactgtaaatgcattgccagaaacaactgctgacattgtagtctttgatgaaatctctatggctactaattatgacttgagtgttgtcaatgctagacttcgtgcaaaacactacgtctatattggcgatcctgctcaattaccagccccccgcacattgctgactaaaggcacactagaaccagaatattttaattcagtgtgcagacttatgaaaacaataggtccagacatgttccttggaacttgtcgccgttgtcctgctgaaattgttgacactgtgagtgctttagtttatgacaataagctaaaagcacacaaggagaagtcagctcaatgcttcaaaatgttctacaaaggtgttattacacatgatgtttcatctgcaatcaacagacctcaaataggcgttgtaagagaatttcttacacgcaatcctgcttggagaaaagctgtttttatctcaccttataattcacagaacgctgtagcttcaaaaatcttaggattgcctacgcagactgttgattcatcacagggttctgaatatgactatgtcatattcacacaaactactgaaacagcacactcttgtaatgtcaaccgcttcaatgtggctatcacaagggcaaaaattggcattttgtgcataatgtctgatagagatctttatgacaaactgcaatttacaagtctagaaataccacgtcgcaatgtggctacattacaagcagaaaatgtaactggactttttaaggactgtagtaagatcattactggtcttcatcctacacaggcacctacacacctcagcgttgatataaagttcaagactgaaggattatgtgttgacataccaggcataccaaaggacatgacctaccgtagactcatctctatgatgggtttcaaaatgaattaccaagtcaatggttaccctaatatgtttatcacccgcgaagaagctattcgtcacgttcgtgcgtggattggctttgatgtagagggctgtcatgcaactagagatgctgtgggtactaacctacctctccagctaggattttctacaggtgttaacttagtagctgtaccgactggttatgttgacactgaaaataacacagaattcaccagagttaatgcaaaacctccaccaggtgaccagtttaaacatcttataccactcatgtataaaggcttgccctggaatgtagtgcgtattaagatagtacaaatgctcagtgatacactgaaaggattgtcagacagagtcgtgttcgtcctttgggcgcatggctttgagcttacatcaatgaagtactttgtcaagattggacctgaaagaacgtgttgtctgtgtgacaaacgtgcaacttgcttttctacttcatcagatacttatgcctgctggaatcattctgtgggttttgactatgtctataacccatttatgattgatgttcagcagtggggctttacgggtaaccttcagagtaaccatgaccaacattgccaggtacatggaaatgcacatgtggctagttgtgatgctatcatgactagatgtttagcagtccatgagtgctttgttaagcgcgttgattggtctgttgaataccctattataggagatgaactgagggttaattctgcttgcagaaaagtacaacacatggttgtgaagtctgcattgcttgctgataagtttccagttcttcatgacattggaaatccaaaggctatcaagtgtgtgcctcaggctgaagtagaatggaagttctacgatgctcagccatgtagtgacaaagcttacaaaatagaggaactcttctattcttatgctacacatcacgataaattcactgatggtgtttgtttgttttggaattgtaacgttgatcgttacccagccaatgcaattgtgtgtaggtttgacacaagagtcttgtcaaacttgaacttaccaggctgtgatggtggtagtttgtatgtgaataagcatgcattccacactccagctttcgataaaagtgcatttactaatttaaagcaattgcctttcttttactattctgatagtccttgtgagtctcatggcaaacaagtagtgtcggatattgattatgttccactcaaatctgctacgtgtattacacgatgcaatttaggtggtgctgtttgcagacaccatgcaaatgagtaccgacagtacttggatgcatataatatgatgatttctgctggatttagcctatggatttacaaacaatttgatacttataacctgtggaatacatttaccaggttacagagtttagaaaatgtggcttataatgttgttaataaaggacactttgatggacacgccggcgaagcacctgtttccatcattaataatgctgtttacacaaaggtagatggtattgatgtggagatctttgaaaataagacaacacttcctgttaatgttgcatttgagctttgggctaagcgtaacattaaaccagtgccagagattaagatactcaataatttgggtgttgatatcgctgctaatactgtaatctgggactacaaaagagaagccccagcacatgtgtctacaataggtgtctgcacaatgactgacattgccaagaaacctactgagagtgcttgttcttcacttactgtcttgtttgatggtagagtggaaggacaggtagacctttttagaaacgcccgtaatggtgttttaataacagaaggttcagtcaaaggtctaacaccttcaaagggaccagcacaagctagcgtcaatggagtcacattaattggagaatcagtaaaaacacagtttaactactttaagaaagtagacggcattattcaacagttgcctgaaacctactttactcagagcagagacttagaggattttaagcccagatcacaaatggaaactgactttctcgagctcgctatggatgaattcatacagcgatataagctcgagggctatgccttcgaacacatcgtttatggagatttcagtcatggacaacttggcggtcttcatttaatgataggcttagccaagcgctcacaagattcaccacttaaattagaggattttatccctatggacagcacagtgaaaaattacttcataacagatgcgcaaacaggttcatcaaaatgtgtgtgttctgtgattgatcttttacttgatgactttgtcgagataataaagtcacaagatttgtcagtgatttcaaaagtggtcaaggttacaattgactatgctgaaatttcattcatgctttggtgtaaggatggacatgttgaaaccttctacccaaaactacaagcaagtcaagcgtggcaaccaggtgttgcgatgcctaacttgtacaagatgcaaagaatgcttcttgaaannnnnnnnnnnnnnnnnnnnnnnnnnnnnnnnnnnnnnnnnnnnnnnnnnnnnnnnnnnnnnnnnnnnnnnnnnnnnnnnnnnnnnnnnnnnnnnnnnnngtacagctgtgctcagacaatggttgccaactggcacactacttgtcgattcagatcttaatgacttcgtctccgacgcagattctactttaattggagactgtgcaacagtacatacggctaataaatgggaccttattattagcgatatgtatgaccctaggaccaaacatgtgacaaaagagaatgactctaaagaagggtttttcacttatctgtgtggatttataaagcaaaaactagccctgggtggttctatagctgtaaagataacagagcattcttggaatgctgacctttacaagcttatgggccatttctcatggtggacagcttttgttacaaatgtaaatgcatcatcatcggaagcatttttaattggggctaactatcttggcaagccgaaggaacaaattgatggctataccatgcatgctaactacattttctggaggaacacaaatcctatccagttgtcttcctattcactctttgacatgagcaaatttcctcttaaattaagaggaactgctgtaatgnnnnnnnnnnnnnnnnnnnnnnnnnnnnnnnnnnnnnnnnnnnnnnnnnnnnnnnnnnnnnnnnnnnnnnnnnnnnnnnnnnnnnnnnnnnnnnnnnnnnatgaacaacaagtcacagtcggtgattattattaacaattctactaatgttgttatacgagcatgtaactttgaattgtgtgacaaccctttctttgctgtttctaaacccatgggtacacagacacatactatgatattcgataatgcatttaattgcactttcgagtacatatctgatgccttttcgcttgatgtttcagaaaagtcaggtaattttaaacacttacgagagtttgtgtttaaaaataaagatgggtttctctatgtttataagggctatcaacctatagatgtagttcgtgatctaccttctggttttaacactttgaaacctatttttaagttgcctcttggtattaacattacaaattttagagccattcttacagccttttcacctgctcaagacacttggggcacgtcagctgcagcctattttgttggctatttaaagccaactacatttatgctcaagtatgatgaaaatggtacaatcacagatgctgttgattgttctcaaaatccacttgctgaactcaaatgctctgttaagagctttgagattgacaaaggaatttaccagacctctaatttcagggttgttccctcaggagatgttgtgagattnnnnnnnnnnnnnnnnnnnnnnnnnnnnnnnnnnnnnnnnnnnnnnnnnnnnnnnnnnnnnnnnnnnnnnnnnnnnnnnnnnnnnnnnnnnnnnnnnnnnattcccttctgtctatgcatgggagagaaaaaaaatttctaattgtgttgctgattactctgtgctctacaactcaacatttttttcaacctttaagtgctatggcgtttctgccactaagttgaatgatctttgcttctccaatgtctatgcagattcttttgtagtcaagggagatgatgtaagacaaatagcgccaggacaaactggtgttattgctgattataattataaattgccagatgatttcatgggttgtnnnnnnnnnnnnnnnnnnnnnnnnnnnnnnnnnnnnnnnnnnnnnnnnnnnnnnnnnnnnnnnnnnnnnnnnnnnnnnnnnnnnnnnnnnnnnnnnnnnnttacaccactactggcattggctaccaaccttacagagttgtagtactttcttttgaacttttaaatgcaccggccacggtttgtggaccaaaattatccactgaccttattaagaaccagtgtgtcaattttaattttaatggactcactggtactggtgtgttaactccttcttcaaagagatttcaaccatttcaacaatttggccgtgatgtttctgatttcactgattccgttcgagatcctaaaacatctgaaatattagacatttcaccttgctcttttgggggtgtaagtgtaattacacctggaacaaatgcttcatctgaagttgctgttctatatcaagatgttaactgcactgatgtttctacagcaattcatgcagatcaactcacaccagcttggcgcatatattctactggaaacaatgtattccagactcaagcaggctgtcttataggagctgagcatgtcgacacttcttatgagtgcgacattcctattggagctggcatttgtgctagttaccatacagtttctttattacgtagtactagccaaaaatctattgtggcttatactatgtctttaggtgctgatagttcaattgcttactctaataacaccattgctatacctactaacttttcaattagcattactacagaagtaatgcctgtttctatggctaaaacctccgtagattgtaatatgtacatctgcggagattctactgaatgtgctaatttgcttctccaatatggtagcttttgcacacaactaaatcgtgcactctcaggtattgctgctgaacaggatcgcaacacacgtgaagtgttcgctcaagtcaaacaaatgtacaaaaccccaactttgaaatattttggtggttttaatttttcacaaatattacctgaccctctaaagccaactaagaggtcttttattgaggacttgctctttaataaggtgacactcgctgatgctggcttcatgaagcaatatggcgaatgcctaggtgatattaatgctagagatctcatttgtgcgcagaagttcaatggacttacagtgttgccacctctgctcactgatgatatgattgctgcctacactgctgctctagttagtggtactgccactgctggatggacatttggtgctggcgctgctcttcaaataccttttgctatgcaaatggcatataggttcaatggcattggagttacccaaaatgttctctatgagaaccaaaaacaaatcgccaaccaatttaacaaggcgattagtcaaattcaagaatcacttacaacaacatcaactgcattgggcaagctgcaagacgttgttaaccagaatgctcaagcattaaacacacttgttaaacaacttagctctaattttggtgcaatttcaagtgtgctaaatgatatcctttcgcgacttgataaagtcgaggcggaggtacaaattgacaggttaattacaggcagacttcaaagccttcaaacctatgtaacacaacaactaatcagggctgctgaaatcagggcttctgctaatcttgctgctactaaaatgtctgagtgtgttcttggacaatcaaaaagagttgacttttgtggaaagggctaccaccttatgtccttcccacaagcagccccgcatggtgttgtcttcctacatgtcacgtatgtgccatcccaggagaggaacttcaccacagcgccagcaatttgtcatgaaggcaaagcatacttccctcgtgaaggtgtttttgtgtttaatggcacttcttggtttattacacagaggaacttcttttctccacaaataattactacagacaatacatttgtctcaggaaattgtgatgtcgttattggcatcattaacaacacagtttatgatcctctgcaacctgagcttgactcattcaaagaagagctggacaagtacttcaaaaatcatacatcaccagatgttgatcttggcgacatttcaggcattaacgcttctgtcgtcaacattcaaaaagaaattgaccgcctcaatgaggtcgctaaaaatttaaatgaatcactcattgaccttcaagaattgggaaaatatgagcaatatattaaatggccttggtatgtttggctcggcttcattgctggactaattgccatcgtcatggttacaatcttgctttgttgcatgactagttgttgcagttgcctcaagggtgcatgctcttgtggttcttgctgcaagtttgatgaggatgactctgagccagttctcaagggtgtcaaattacattacacataaacgaacttatggatttgtttatgagattttttactcttggatcaattactgcacagccagtaaaaattgacaatgcttctcctgcaagtactgttcatgctacagcaacgataccgctacaagcctcactccctttcggatggcttgttattggcgttgcatttcttgctgtttttcagagcgctaccaaaataattgcgctcaataaaagatggcagctagccctttataagggcttccagttcatttgcaatttactgctgctatttgttaccatctattcacatcttttgcttgtcgctgcaggtatggaggcgcaatttttgtacctctatgccttgatatattttctacaatgcatcaacgcatgtagaattattatgagatgttggctttgttggaagtgcaaatccaagaacccattactttatgatgccaactactttgtttgctggcacacacataactatgactactgtataccatataacagtgtcacagatacaattgtcgttactgaaggtgacggcatttcaacaccaaaactcaaagaagactaccaaattggtggttattctgaggataggcactcaggtgttaaagactatgtcgttgtacatggctatttcaccgaagtttactaccagcttgagtctacacaaattactacagacactggtattgaaaatgctacattcttcatctttaacaagcttgttaaagacccaccgaatgtgcaaatacacacaatcgacggctcttcaggagtnnnnnnnnnnnnnnnnnnnnnnnnnnnnnnnnnnnnnnnnnnnnnnnnnnnnnnnnnnnnnnnnnnnnnnnnnnnnnnnnnnnnnnnnnnnnnnnnnnnnaacaggtacgttaatagttaatagcgtacttctttttcttgctttcgtggtattcttgctagtcacactagccatccttactgcgcttcgattgtgtgcgtactgctgcaatattgttaacgtgagtttagtaaaaccaacggtttacgtctactcgcgtgttaaaaatctgaactcttctgaaggagttcctgatcttctggtctaaacgaactaactattattattattctgtttggaactttaacattgcttatcatggcagacaacggtactattaccgttgaggagcttaaacaactcctggaacaatggaacctagtaataggtttcctattcctagcctggattatgttactacaatttgcctattctaatcggaacaggtttttgtacataataaagcttgttttcctctggctcttgtggccagtaacacttgcttgttttgtgcttgctgctgtctacagaattaattgggtgactggcgggattgcgattgcaatggcttgtattgtaggcttgatgtggcttagctacttcgttgcttccttcaggctgtttgctcgtacccgctcaatgtggtcattcaacccagaaacaaacattcttctcaatgtgcctctccgggggacaattgtgaccagaccgctcatggaaagtgaacttgtcattggtgctgtgatcattcgtggtcacttgcgaatggccggacactccctagggcgctgtgacattaaggacctgccaaaagagatcactgtggctacatcacgaacgctttcttattacaaattaggagcgtcgcagcgtgtaggcactgattcaggttttgctgcatacaaccgctaccgtattggaaactataaattaaatacagaccacgccggtagcaacgacaatattgctttgctagtacagtaagtgacaacagatgtttcatcttgttgacttccaggttacaatagcagagatattgattatcattatgaggactttcaggattgctatttggaatcttgacgttataataagttcaatagtgagacaattatttaagcctctaactaagaagaattattcggagttagatgatgaagaacttatggagttagattatccataaaacgaacatgaaaattattctcttcctgacattgattgtatttacatcttgcgagctatatcactatcaggagtgtgttagaggtacgactgtactactaaaagaaccttgcccatcaggaacatacgagggcaattcaccatttcaccctcttgctgacaataaatttgcactaacttgcactagcacacactttgcttttgcttgtgctgacggtactcgacatacctatcagctgcgtgcaagatcagtttcaccaaaacttttcatcagacaagaggaggttcaacaagagctctactcgccactttttctcattgttgctgctctagtatttttaatactttgcttcaccattaagagaaagacagaatgaatgagctcactttaattgacttctatttgtgctttttagcctttctgctattccttgttttaataatgcttattatattttggttttcactcgaaatccaggatctagaagaaccttgtaccaaagtctaaacgaacatgaaacttctcattgttttgacttgtatttctctatgcagttgcatacgcactgtagtacagcgctgtgcatctaataaacctcatgtgcttgaagatccttgtaaggtacaacactaggggtaatacttatagcactgcttggctttgtgctctaggaaaggttttaccttttcatagatggcacactatggttcaaacatgcacacctaatgttactatcaactgtcaagatccagctggtggtgcgcttatagctaggtgttggtaccttcatgaaggtcaccaaactgctgcatttagagacgtacttgttgttttaaataaacgaacaaattaaaatgtctgataatggaccccaatcaaaccaacgtagtgccccccgcattacatttggtggacccacagattcaactgacaataaccagaatggaggacgcaatggggcaaggccaaaacagcgccgaccccaaggtttacccaataatactgcgtcttggttcacagctctcactcagcatggcaaggaggaacttagattccctcgaggccagggcgttccaatcaacaccaatagtggtccagatgaccaaattggctactaccgaagagctacccgacgagttcgtggtggtgacggcaaaatgaaagagctcagccccagatggtacttctattacctaggaactggcccagaagcttcacttccctacggcgctaacaaagaaggcatcgtatgggttgcaactgagggagccttgaatacacccaaagaccacattggcacccgcaatcctaataacaatgctgccaccgtgctacaacttcctcaaggaacaacattgccaaaaggcttctacgcagagggaagcagaggcggcagtcaagcctcttctcgctcctcatcacgtagtcgcggtaattcaagaaattcaactcctggcagcagtaggggaaattctcctgctcgaatggctagcggaggtggtgaaactgccctcgcgctattgctgctagacagattgaaccagcttgagagcaaagtttctggtaaaggccaacaacaacaaggccaaactgtcactaagaaatctgctgctgaggcatctaaaaagcctcgccaaaaacgtactgccacaaaacagtacaacgtcactcaagcatttgggagacgtggtccagaacaaacccaaggaaatttcggggaccaagacctaatcagacaaggaactgattacaaacattggccgcaaattgcacaatttgctccaagtgcctctgcattctttggaatgtcacgcattggcatggaagtcacaccttcgggaacatggctgacttatcatggagccattaaattggatgacaaagatccacaattcaaagacaacgtcatactgctgaacaagcacattgacgcatacaaaacattcccaccaacagagcctaaaaaggacaaaaagaaaaagactgatgaagctcagcctttgccgcagagacaaaagaagcagcccactgtgactcttcttcctgcggctgacatggatgatttctccagacaacttcaaaattccatgagtggagcttctgctgattcaactcaggcataaacactcatgatgaccacacaaggcagatgggctatgtaaacgttttcgcaattccgtttacgatacatagtctactcttgtgcagaatgaattctcgtaactaaacagcacaagtaggtttagttaactttaatctcacatagcaatctttaatcaatgtgtaacattagggaggacttgaaagagccaccacattttcatcgaggccacgcggagtacgatcgagggtacagtgaataatgctagggagagctgcctatatggaagagc

SEQ ID NO: 29741 - DNA, 29430 bp, SARS Coronavirus
  misc_feature 6464-6563, 11343-11442, 22567-22666: n = A,T,C or G
tacccaggaaaagccaaccaacctcgatctcttgtagatctgttctctaaacgaactttaaaatctgtgtagctgtcgctcggctgcatgcctagtgcacctacgcagtataaacaataataaattttactgtcgttgacaagaaacgagtaactcgtccctcttctgcagactgcttacggtttcgtccgtgttgcagtcgatcatcagcatacctaggtttcgtccgggtgtgaccgaaaggtaagatggagagccttgttcttggtgtcaacgagaaaacacacgtccaactcagtttgcctgtccttcaggttagagacgtgctagtgcgtggcttcggggactctgtggaagaggccctatcggaggcacgtgaacacctcaaaaatggcacttgtggtctagtagagctggaaaaaggcgtactgccccagcttgaacagccctatgtgttcattaaacgttctgatgccttaagcaccaatcacggccacaaggtcgttgagctggttgcagaaatggacggcattcagtacggtcgtagcggtataacactgggagtactcgtgccacatgtgggcgaaaccccaattgcataccgcaatgttcttcttcgtaagaacggtaataagggagccggtggtcatagctatggcatcgatctaaagtcttatgacttaggtgacgagcttggcactgatcccattgaagattatgaacaaaactggaacactaagcatggcagtggtgcactccgtgaactcactcgtgagctcaatggaggtgcagtcactcgctatgtcgacaacaatttctgtggcccagatgggtaccctcttgattgcatcaaagattttctcgcacgcgcgggcaagtcaatgtgcactctttccgaacaacttgattacatcgagtcgaagagaggtgtctactgctgccgtgaccatgagcatgaaattgcctggttcactgagcgctctgataagagctacgagcaccagacacccttcgaaattaagagtgccaagaaatttgacactttcaaaggggaatgcccaaagtttgtgtttcctcttaactcaaaagtcaaagtcattcaaccacgtgttgaaaagaaaaagactgagggtttcatggggcgtatacgctctgtgtaccctgttgcatctccacaggagtgtaacaatatgcacttgtctaccttgatgaaatgtaatcattgcgatgaagtttcatggcagacgtgcgactttctgaaagccacttgtgaacattgtggcactgaaaatttagttattgaaggacctactacatgtgggtacctacctactaatgctgtagtgaaaatgccatgtcctgcctgtcaagacccagagattggacctgagcatagtgttgcagattatcacaaccactcaaacattgaaactcgactccgcaagggaggtaggactagatgttttggaggctgtgtgtttgcctatgttggctgctataataagcgtgcctactgggttcctcgtgctagtgctgatattggctcaggccatactggcattactggtgacaatgtggagaccttgaatgaggatctccttgagatactgagtcgtgaacgtgttaacattaacattgttggcgattttcatttgaatgaagaggttgccatcattttggcatctttctctgcttctacaagtgcctttattgacactataaagagtcttgattacaagtctttcaaaaccattgttgagtcctgcggtaactataaagttaccaagggaaagcccgtaaaaggtgcttggaacattggacaacagagatcagttttaacaccactgtgtggttttccctcacaggctgctggtgttatcagatcaatttttgcgcgcacacttgatgcagcaaaccactcaattcctgatttgcaaagagcagctgtcaccatacttgatggtatttctgaacagtcattacgtcttgtcgacgccatggtttatacttcagacctgctcaccaacagtgtcattattatggcatatgtaactggtggtcttgtacaacagacttctcagtggttgtctaatcttttgggcactactgttgaaaaactcaggcctatctttgaatggattgaggcgaaacttagtgcaggagttgaatttctcaaggatgcttgggagattctcaaatttctcattacaggtgtttttgacatcgtcaagggtcaaatacaggttgcttcagataacatcaaggattgtgtaaaatgcttcattgatgttgttaacaaggcactcgaaatgtgcattgatcaagtcactatcgctggcgcaaagttgcgatcactcaacttaggtgaagtcttcatcgctcaaagcaagggactttaccgtcagtgtatacgtggcaaggagcagctgcaactactcatgcctcttaaggcaccaaaagaagtaacctttcttgaaggtgattcacatgacacagtacttacctctgaggaggttgttctcaagaacggtgaactcgaagcactcgagacgcccgttgatagcttcacaaatggagctatcgttggcacaccagtctgtgtaaatggcctcatgctcttagagattaaggacaaagaacaatactgcgcattgtctcctggtttactggctacaaacaatgtctttcgcttaaaagggggtgcaccaattaaaggtgtaacctttggagaagatactgtttgggaagttcaaggttacaagaatgtgagaatcacatttgagcttgatgaacgtgttgacaaagtgcttaatgaaaagtgctctgtctacactgttgaatccggtaccgaagttactgagtttgcatgtgttgtagcagagggctgttgtgaagactttacaaccagtttctgatctccttaccaacatgggtattgatcttgatgagtggagtgtagctacattctacttatttgatgatgctggtgaagaaaacttttcatcacgtatgtattgttccttttaccctccagatgaggaagaagaggacgatgcagagtgtgaggaagaagaaattgatgaaacctgtgaacatgagtacggtacagaggatgattatcaaggtctccctctggaatttggtgcctcagctgaaacagttcgagttgaggaagaagaagaggaagactggctggatgatactactgagcaatcagagattgagccagaaccagaacctacacctgaagaaccagttaatcagtttactggttatttaaaacttactgacaatgttgccattaaatgtgttgacatcgttaaggaggcacaaagtgctaatcctatggtgattgtaaatgctgctaacatacacctgaaacatggtggtggtgtagcaggtgcactcaacaaggcaaccaatggtgccatgcaaaaggagagtgatgattacattaagctaaatggccctcttacagtaggagggtcttgtttgctttctggacataatcttgctaagaagtgtctgcatgttgttggacctaacctaaatgcaggtgaggacatccagcttcttaaggcagcatatgaaaatttcaattcacaggacatcttacttgcaccattgttgtcagcaggcatatttggtgctaaaccacttcagtctttacaagtgtgcgtgcagacggttcgtacacaggtttatattgcagtcaatgacaaagctctttatgagcaggttgtcatggattatcttgataacctgaagcctagagtggaagcacctaaacaagaggagccaccaaacacagaagattccaaaactgaggagaaatctgtcgtacagaagcctgtcgatgtgaagccaaaaattaaggcctgcattgatgaggttaccacaacactggaagaaactaagtttcttaccaataagttactcttgtttgctgatatcaatggtaagctttaccatgattctcagaacatgcttagaggtgaagatatgtctttccttgagaaggatgcaccttacatggtaggtgatgttatcactagtggtgatatcacttgtgttgtaataccctccaaaaaggctggtggcactactgagatgctctcaagagctttgaagaaagtgccagttgatgagtatataaccacgtaccctggacaaggatgtgctggttatacacttgaggaagctaagactgctcttaagaaatgcaaatctgcattttatgtactaccttcagaagcacctaatgctaaggaagagattctaggaactgtatcctggaatttgagagaaatgcttgctcatgctgaagagacaagaaaattaatgcctatatgcatggatgttagagccataatggcaaccatccaacgtaagtataaaggaattaaaattcaagagggcatcgttgactatggtgtccgattcttcttttatactagtaaagagcctgtagcttctattattacgaagctgaactctctaaatgagccgcttgtcacaatgccaattggttatgtgacacatggttttaatcttgaagaggctgcgcgctgtatgcgttctcttaaagctcctgccgtagtgtcagtatcatcaccagatgctgttactacatataatggatacctcacttcgtcatcaaagacatctgaggagcactttgtagaaacagtttctttggctggctcttacagagattggtcctattcaggacagcgtacagagttaggtgttgaatttcttaagcgtggtgacaaaattgtgtaccacactctggagagccccgtcgagtttcatcttgacggtgaggttctttcacttgacaaactaaagagtctcttatccctgcgggaggttaagactataaaagtgttcacaactgtggacaacactaatctccacacacagcttgtggataagtctatgacatatggacagcagtttggtccaacatacttggatggtgctgatgttacaaaaattaaacctcatgtaaatcatgagggtaagactttctttgtactacctagtgatgacacactacgtagtgaagctttcgagtactaccatactcttgatgagagttttcttggtaggtacatgtctgctttaaaccacacaaagaaatggaaatttcctcaagttggtggtttaacttcaattaaatgggctgataacaattgttatttgtctagtgttttattagcacttcaacagcttgaagtcaaattcaatgcaccagcacttcaagaggcttattatagagcccgtgctggtgatgctgctaacttttgtgcactcatactcgcttacagtaataaaactgttggcgagcttggtgatgtcagagaaactatgacccatcttctacagcatgctaatttggaatctgcaaagcgagttcttaatgtggtgtgtaaacattgtggtcagaaaactactaccttaacgggtgtagaagctgtgatgtatatgggtactctatcttatgataatcttaagacaggtgtttccattccatgtgtgtgtggtcgtgatgctacacaatatctagtacaacaagagtcttcttttgttatgatgtctgcaccacctgctgagtataaattacagcaggtacattcttatgtgcgaatgagtacactggtaactatcagtgtggtcattacactcatataactgctaaggagaccctctatcgtattgacggagctcaccttacaaagatgtcagagtaccaaggaccagtgactgatgttttctacaaggaaacatcttacactacaaccatcaagcctgtgtcgtataaactcgatggagttacttacacagagattgaaccaaaattggatgggtattataaaaaggataatgcttactatacagagcagcctatagaccttgtaccaactcaaccattaccaaatgcgagttttgataatttcaaactcacatgttctaacacaaaatttgctgatgatttaaatcaaatgacaggcttcacaaagccagcttcacgagagctatctgtcacattcttcccagacttgaatggcgatgtagtggctattgactatagacactattcagcgagtttcaagaaaggtgctaaattactgcataagccaattgtttggcacattaaccaggctacaaccaagacaacgttcaaaccaaacacttggtgtttacgttgtctttggagtacaaagccagtagatacttcaaattcatttgaagttctggcagtagaagacacacaaggaatggacaatcttgcttgtgaaagtcaacaacccacctctgaagaagtagtggaaaatcctaccatacagaaggaagtcatagagtgtgacgtgaaaactaccgaagttgtaggcaatgtcatacttaaaccatcagatgaaggtgttaaagtaacacaagagttaggtcatgaggatctnnnnnnnnnnnnnnnnnnnnnnnnnnnnnnnnnnnnnnnnnnnnnnnnnnnnnnnnnnnnnnnnnnnnnnnnnnnnnnnnnnnnnnnnnnnnnnnnnnnntgttgttaagtatttgcttaggttctctaatctgtgtaactgctgcttttggtgtactcttatctaattttggtgctccttcttattgtaatggcgttagagaattgtatcttaattcgtctaacgttactactatggatttctgtgaaggttcttttccttgcagcatttgtttaagtggattagactcccttgattcttatccagctcttgaaaccattcaggtgacgatttcatcgtacaagctagacttgacaattttaggtctggccgctgagtgggttttggcatatatgttgttcacaaaattcttttatttattaggtctttcagctataatgcaggtgttctttggctattttgctagtcatttcatcagcaattcttggctcatgtggtttatcattagtattgtacaaatggcacccgtttctgcaatggttaggatgtacatcttctttgcttctttctactacatatggaagagctatgttcatatcatggatggttgcacctcttcgacttgcatgatgtgctataagcgcaatcgtgccacacgcgttgagtgtacaactattgttaatggcatgaagagatctttctatgtctatgcaaatggaggccgtggcttctgcaagactcacaattggaattgtctcaattgtgacacattttgcactggtagtacattcattagtgatgaagttgctcgtgatttgtcactccagtttaaaagaccaatcaaccctactgaccagtcatcgtatattgttgatagtgttgctgtgaaaaatggcgcgcttcacctctactttgacaaggctggtcaaaagacctatgagagacatccgctctcccattttgtcaatttagacaatttgagagctaacaacactaaaggttcactgcctattaatgtcatagtttttgatggcaagtccaaatgcgacgagtctgcttctaagtctgcttctgtgtactacagtcagctgatgtgccaacctattctgttgcttgaccaagctcttgtatcagacgttggagatagtactgaagtttccgttaagatgtttgatgcttatgtcgacaccttttcagcaacttttagtgttcctatggaaaaacttaaggcacttgttgctacagctcacagcgagttagcaaagggtgtagctttagatggtgtcctttctacattcgtgtcagctgcccgacaaggtgttgttgataccgatgttgacacaaaggatgttattgaatgtctcaaactttcacatcactctgacttagaagtgacaggtgacagttgtaacaatttcatgctcacctataataaggttgaaaacatgacgcccagagatcttggcgcatgtattgactgtaatgcaaggcatatcaatgcccaagtagcaaaaagtcacaatgtttcactcatctggaatgtaaaagactacatgtctttatctgaacagctgcgtaaacaaattcgtagtgctgccaagaagaacaacataccttttagactaacttgtgctacaactagacaggttgtcaatgtcataactactaaaatctcactcaagggtggtaagattgttagtacttgttttaaacttatgcttaaggccacattattgtgcgttcttgctgcattggtttgttatatcgttatgccattacatacattgtcaatccatgatggttacacaaatgaaatcattggttacaaagccattcaggatggtgtcactcgtgacatcatttctactgatgattgttttgcaaataaacatgctggttttgacgcatggtttagccagcgtggtggttcatacaaaaatgacaaaagctgccctgtagtagctgctatcattacaagagagattggtttcatagtgcctggcttaccgggtactgtgctgagagcaatcaatggtgacttcttgcattttctacctcgtgtttttagtgctgttggcaacatttgctacacaccttccaaactcattgagtatagtgattttgctacctctgcttgcgttcttgctgctgagtgtacaatttttaaggatgctatgggcaaacctgtgccatattgttatgacactaatttgctagagggttctatttcttatagtgagcttcgtccagacactcgttatgtgcttatggatggttccatcatacagtttcctaacacttacctggagggttctgttagagtagtaacaacttttgatgctgagtactgtagacatggtacatgcgaaaggtcagaagtaggtatttgcctatctaccagtggtagatgggttcttaataatgagcattacagagctctatcaggagttttctgtggtgttgatgcgatgaatctcatagctaacatctttactcctcttgtgcaacctgtgggtgctttagatgtgtctgcttcagtagtggctggtggtattattgccatattggtgacttgtgctgcctactactttatgaaattcagacgtgcttttggtgagtacaaccatgttgttgctgctaatgcacttttgtttttgatgtctttcactatactctgtctggtaccagcttacagctttctgccgggagtctactcagtcttttacttgtacttgacattctatttcaccaatgatgtttcattcttggctcaccttcaatggtttgccatgttttctcctattgtgcctttttggataacagcaatctatgtattctgtatttctctgaagcactgccattggttctttaacaactatcttaggaaaagagtcatgtttaatggagttacatttagtaccttcgaggaggctgctttgtgtacctttttgctcaacaaggaaatgtacctaaaattgcgtagcgagacactgttgccacttacacagtataacaggtatcttgctctatataacaagtacaagtatttcagtggagtcttagatactaccagctatcgtgaagcagcttgctgccacttagcaaaggctctaaatgactttagcaactcaggtgctgatgttctctaccaaccaccacagacatcaatcacttctgctgttctgcagagtggttttaggaaaatggcattcccgtcaggcaaagttgaagggtgcatggtacaagtaacctgtggaactacaactcttaatggattgtggttggatgacacagtatactgtccaagacatgtcatttgcacagcagaagacatgcttaatcctaactatgaagatctgctcattcgcaaatccaaccatagctttcttgttcaggctggcaatgttcaacttcgtgttattggccattctatgcaaaattgtctgcttaggcttaaagttgatacttctaaccctaagacacccaagtataaatttgtccgtatccaacctggtcaaacattttcagttctagcatgctacaatggttcaccatctggtgtttatcagtgtgccatgagacctaatcataccattaaaggttctttccttaatggatcatgtggtagtgttggttttaacattgattatgattgcgtgtctttctgctatatgcatcatatggagcttccaacaggagtacacgctggtactgacttagaaggtaaattctatggtccatttgttgacagaccaactgcacaggctgcaggtacagacacaaccataacattaaatgttttggcatggctgtatgctgctgttatcaatggtgataggtggtttcttaatagattcaccactactttgaatgactttaaccttgtggcaatgaagtacaactatgaacctttgacacaagatcatgttgacatattgggacctctttctgctcaaacaggaattgccgtcttagatatgtgtgctgctttgaaagagctgctgcagaatggtatgaatggtcgtactatccttggtagcactattttagaagatgagtttacaccatttgatgttgttagacaatgctctggtgttaccttccaaggtaagttcaagaaaattgttaagggcactcatcattggatgcttttaactttcttgacatcactattgattcttgttcaaagtacacagtggtcactgtttttctttgtttacgagaatgctttcttgccatttactcttggtattatggcaattgctgcatgtgctatgctgcttgttaagcataagcacgcattcttgtgcttgtttctgttaccttctcttgcaacagttgcttactttaatatggtctacatgcctgctagctgggtgatgcgtatcatgacatggcttgaattggctgacactagcttgtctggttataggcttaaggattgtgttatgtatgcttcagctttagttttgcttattctcatgacagctcgcactgtttatgatgatgctgctagacgtgtttggacactgatgaatgtcattacacttgtttacaaagtctactatggtaatgctttagatcaagctatttccatgtgggccttagttatttctgtaacctctaactattctggtgtcgttacgactatcatgtttttagctagagctatagtgtttgtgtgtgttgagtattacccattgttatttattactggcaacaccttacagtgtatcatgcttgtttattgtttcttaggctattgttgctgctgctactttggccttttctgtttactcaaccgttacttcaggcttactcttggtgtttatgactacttggtctctacacaagaatttaggtatatgaactcccaggnnnnnnnnnnnnnnnnnnnnnnnnnnnnnnnnnnnnnnnnnnnnnnnnnnnnnnnnnnnnnnnnnnnnnnnnnnnnnnnnnnnnnnnnnnnnnnnnnnnnggtattggaggtaaaccatgtatcaaggttgctactgtacagtctaaaatgtctgacgtaaagtgcacatctgtggtactgctctcggttcttcaacaacttagagtagagtcatcttctaaattgtgggcacaatgtgtacaactccacaatgatattcttcttgcaaaagacacaactgaagctttcgagaagatggtttctcttttgtctgttttgctatccatgcagggtgctgtaaactttaataggttgtgcgaggaaatgctcgataaccgtgctactcttcaggctattgcttcagaatttagttctttaccatcatatgccgcttatgccactgcccaggaggcctatgagcaggctgtagctaatggtgattctgaagtcgttctcaaaaagttaaagaaatctttgaatgtggctaaatctgagtttgaccgtgatgctgccatgcaacgcaagttggaaaagatggcagatcaggctatgacccaaatgtacaaacaggcaagatctgaggacaagagggcaaaagtaactagtgctatgcaaacaatgctcttcactatgcttaggaagcttgataatgatgcacttaacaacattatcaacaatgcgcgtgatggttgtgttccactcaacatcataccattgactacagcagccaaactcatggttgttgtccctgattatggtacctacaagaacacttgtgatggtaacacctttacatatgcatctgcactctgggaaatccagcaagttgttgatgcggatagcaagattgttcaacttagtgaaattaacatggacaattcaccaaatttggcttggcctcttattgttacagctctaagagccaactcagctgttaaactacagaataatgaactgagtccagtagcactacgacagatgtcctgtgcggctggtaccacacaaacagcttgtactgatgacaatgcacttgcctactataacaattcgaagggaggtaggtttgtgctggcattactatcagaccaccaagatctcaaatgggctagattccctaagagtgatggtacaggtacaatttacacagaactggaaccaccttgtaggtttgttacagacacaccaaaagggcctaaagtgaaatacttgtacttcatcaaaggcttaaacaacctaaatagaggtatggtgctgggcagtttagctgctacagtacgtcttcaggctggaaatgctacagaagtacctgccaattcaactgtgctttccttctgtgcttttgcagtagaccctgctaaagcatataaggattacctagcaagtggaggacaaccaatcaccaactgtgtgaagatgttgtgtacacacactggtacaggacaggcaattactgtaacaccagaagctaacatggaccaagagtcctttggtggtgcttcatgttgtctgtattgtagatgccacattgaccatccaaatcctaaaggattctgtgacttgaaaggtaagtacgtccaaatacctaccacttgtgctaatgacccagtgggttttacacttagaaacacagtctgtaccgtctgcggaatgtggaaaggttatggctgtagttgtgaccaactccgcgaacccttgatgcagtctgcggatgcatcaacgtttttaaacgggtttgcggtgtaagtgcagcccgtcttacaccgtgcggcacaggcactagtactgatgtcgtctacagggcttttgatatttacaacgaaaaagttgctggttttgcaaagttcctaaaaactaattgctgtcgcttccaggagaaggatgaggaaggcaatttattagactcttactttgtagttaagaggcatactatgtctaactaccaacatgaagagactatttataacttggttaaagattgtccagcggttgctgtccatgactttttcaagtttagagtagatggtgacatggtaccacatatatcacgtcagcgtctaactaaatacacaatggctgatttagtctatgctctacgtcattttgatgagggtaattgtgatacattaaaagaaatactcgtcacatacaattgctgtgatgatgattatttcaataagaaggattggtatgacttcgtagagaatcctgacatcttacgcgtatatgctaacttaggtgagcgtgtacgccaatcattattaaagactgtacaattctgcgatgctatgcgtgatgcaggcattgtaggcgtactgacattagataatcaggatcttaatgggaactggtacgatttcggtgatttcgtacaagtagcaccaggctgcggagttcctattgtggattcatattactcattgctgatgcccatcctcactttgactagggcattggctgctgagtcccatatggatgctgatctcgcaaaaccacttattaagtgggatttgctgaaatatgattttacggaagagagactttgtctcttcgaccgttattttaaatattgggaccagacataccatcccaattgtattaactgtttggatgataggtgtatccttcattgtgcaaactttaatgtgttattttctactgtgtttccacctacaagttttggaccactagtaagaaaaatatttgtagatggtgttccttttgttgtttcaactggataccattttcgtgagttaggagtcgtacataatcaggatgtaaacttacatagctcgcgtctcagtttcaaggaacttttagtgtatgctgctgatccagctatgcatgcagcttctggcaatttattgctagataaacgcactacatgcttttcagtagctgcactaacaaacaatgttgcttttcaaactgtcaaacccggtaattttaataaagacttttatgactttgctgtgtctaaaggtttctttaaggaaggaagttctgttgaactaaaacacttcttctttgctcaggatggcaacgctgctatcagtgattatgactattatcgttataatctgccaacaatgtgtgatatcagacaactcctattcgtagttgaagttgttgataaatactttgattgttacgatggtggctgtattaatgccaaccaagtaatcgttaacaatctggataaatcagctggtttcccatttaataaatggggtaaggctagactttattatgactcaatgagttatgaggatcaagatgcacttttcgcgtatactaagcgtaatgtcatccctactataactcaaatgaatcttaagtatgccattagtgcaaagaatagagctcgcaccgtagctggtgtctctatctgtagtactatgacaaatagacagtttcatcagaaattattgaagtcaatagccgccactagaggagctactgtggtaattggaacaagcaagttttacggtggctggcataatatgttaaaaactgtttacagtgatgtagaaactccacaccttatgggttgggattatccaaaatgtgacagagccatgcctaacatgcttaggataatggcctctcttgttcttgctcgcaaacataacacttgctgtaacttatcacaccgtttctacaggttagctaacgagtgtgcgcaagtattaagtgagatggtcatgtgtggcggctcactatatgttaaaccaggtggaacatcatccggtgatgctacaactgcttatgctaatagtgtctttaacatttgtcaagctgttacagccaatgtaaatgcacttctttcaactgatggtaataagatagctgacaagtatgtccgcaatctacaacacaggctctatgagtgtctctatagaaatagggatgttgatcatgaattcgtggatgagttttacgcttacctgcgtaaacatttctccatgatgattctttctgatgatgccgttgtgtgctataacagtaactatgcggctcaaggtttagtagctagcattaagaactttaaggcagttctttattatcaaaataatgtgttcatgtctgaggcaaaatgttggactgagactgaccttactaaaggacctcacgaattttgctcacagcatacaatgctagttaaacaaggagatgattacgtgtacctgccttacccagatccatcaagaatattaggcgcaggctgttttgtcgatgatattgtcaaaacagatggtacacttatgattgaaaggttcgtgtcactggctattgatgcttacccacttacaaaacatcctaatcaggagtatgctgatgtctttcacttgtatttacaatacattagaaagttacatgatgagcttactggccacatgttggacatgtattccgtaatgctaactaatgataacacctcacggtactgggaacctgagttttatgaggctatgtacacaccacatacagtcttgcaggctgtaggtgcttgtgtattgtgcaattcacagacttcacttcgttgcggtgcctgtattaggagaccattcctatgttgcaagtgctgctatgaccatgtcatttcaacatcacacaaattagtgttgtctgttaatccctatgtttgcaatgccccaggttgtgatgtcactgatgtgacacaactgtatctaggaggtatgagctattattgcaagtcacataagcctcccattagttttccattatgtgctaatggtcaggtttttggtttatacaaaaacacatgtgtaggcagtgacaatgtcactgacttcaatgcgatagcaacatgtgattggactaatgctggcgattacatacttgccaacacttgtactgagagactcaagcttttcgcagcagaaacgctcaaagccactgaggaaacatttaagctgtcatatggtattgccactgtacgcgaagtactctctgacagagaattgcatctttcatgggaggttggaaaacctagaccaccattgaacagaaactatgtctttactggttaccgtgtaactaaaaatagtaaagtacagattggagagtacacctttgaaaaaggtgactatggtgatgctgttgtgtacagaggtactacgacatacaagttgaatgttggtgattactttgtgttgacatctcacactgtaatgccacttagtgcacctactctagtgccacaagagcactatgtgagaattactggcttgtacccaacactcaacatctcagatgagttttctagcaatgttgcaaattatcaaaaggtcggcatgcaaaagtactctacactccaaggaccacctggtactggtaagagtcattttgccatcggacttgctctctattacccatctgctcgcatagtgtatacggcatgctctcatgcagctgttgatgccctatgtgaaaaggcattaaaatatttgcccatagataaatgtagtagaatcatacctgcgcgtgcgcgcgtagagtgttttgataaattcaaagtgaattcaacactagaacagtatgttttctgcactgtaaatgcattgccagaaacaactgctgacattgtagtctttgatgaaatctctatggctactaattatgacttgagtgttgtcaatgctagacttcgtgcaaaacactacgtctatattggcgatcctgctcaattaccagccccccgcacattgctgactaaaggcacactagaaccagaatattttaattcagtgtgcagacttatgaaaacaataggtccagacatgttccttggaacttgtcgccgttgtcctgctgaaattgttgacactgtgagtgctttagtttatgacaataagctaaaagcacacaaggagaagtcagctcaatgcttcaaaatgttctacaaaggtgttattacacatgatgtttcatctgcaatcaacagacctcaaataggcgttgtaagagaatttcttacacgcaatcctgcttggagaaaagctgtttttatctcaccttataattcacagaacgctgtagcttcaaaaatcttaggattgcctacgcagactgttgattcatcacagggttctgaatatgactatgtcatattcacacaaactactgaaacagcacactcttgtaatgtcaaccgcttcaatgtggctatcacaagggcaaaaattggcattttgtgcataatgtctgatagagatctttatgacaaactgcaatttacaagtctagaaataccacgtcgcaatgtggctacattacaagcagaaaatgtaactggactttttaaggactgtagtaagatcattactggtcttcatcctacacaggcacctacacacctcagcgttgatataaagttcaagactgaaggattatgtgttgacataccaggcataccaaaggacatgacctaccgtagactcatctctatgatgggtttcaaaatgaattaccaagtcaatggttaccctaatatgtttatcacccgcgaagaagctattcgtcacgttcgtgcgtggattggctttgatgtagagggctgtcatgcaactagagatgctgtgggtactaacctacctctccagctaggattttctacaggtgttaacttagtagctgtaccgactggttatgttgacactgaaaataacacagaattcaccagagttaatgcaaaacctccaccaggtgaccagtttaaacatcttataccactcatgtataaaggcttgccctggaatgtagtgcgtattaagatagtacaaatgctcagtgatacactgaaaggattgtcagacagagtcgtgttcgtcctttgggcgcatggctttgagcttacatcaatgaagtactttgtcaagattggacctgaaagaacgtgttgtctgtgtgacaaacgtgcaacttgcttttctacttcatcagatacttatgcctgctggaatcattctgtgggttttgactatgtctataacccatttatgattgatgttcagcagtggggctttacgggtaaccttcagagtaaccatgaccaacattgccaggtacatggaaatgcacatgtggctagttgtgatgctatcatgactagatgtttagcagtccatgagtgctttgttaagcgcgttgattggtctgttgaataccctattataggagatgaactgagggttaattctgcttgcagaaaagtacaacacatggttgtgaagtctgcattgcttgctgataagtttccagttcttcatgacattggaaatccaaaggctatcaagtgtgtgcctcaggctgaagtagaatggaagttctacgatgctcagccatgtagtgacaaagcttacaaaatagaggaactcttctattcttatgctacacatcacgataaattcactgatggtgtttgtttgttttggaattgtaacgttgatcgttacccagccaatgcaattgtgtgtaggtttgacacaagagtcttgtcaaacttgaacttaccaggctgtgatggtggtagtttgtatgtgaataagcatgcattccacactccagctttcgataaaagtgcatttactaatttaaagcaattgcctttcttttactattctgatagtccttgtgagtctcatggcaaacaagtagtgtcggatattgattatgttccactcaaatctgctacgtgtattacacgatgcaatttaggtggtgctgtttgcagacaccatgcaaatgagtaccgacagtacttggatgcatataatatgatgatttctgctggatttagcctatggatttacaaacaatttgatacttataacctgtggaatacatttaccaggttacagagtttagaaaatgtggcttataatgttgttaataaaggacactttgatggacacgccggcgaagcacctgtttccatcattaataatgctgtttacacaaaggtagatggtattgatgtggagatctttgaaaataagacaacacttcctgttaatgttgcatttgagctttgggctaagcgtaacattaaaccagtgccagagattaagatactcaataatttgggtgttgatatcgctgctaatactgtaatctgggactacaaaagagaagccccagcacatgtgtctacaataggtgtctgcacaatgactgacattgccaagaaacctactgagagtgcttgttcttcacttactgtcttgtttgatggtagagtggaaggacaggtagacctttttagaaacgcccgtaatggtgttttaataacagaaggttcagtcaaaggtctaacaccttcaaagggaccagcacaagctagcgtcaatggagtcacattaattggagaatcagtaaaaacacagtttaactactttaagaaagtagacggcattattcaacagttgcctgaaacctactttactcagagcagagacttagaggattttaagcccagatcacaaatggaaactgactttctcgagctcgctatggatgaattcatacagcgatataagctcgagggctatgccttcgaacacatcgtttatggagatttcagtcatggacaacttggcggtcttcatttaatgataggcttagccaagcgctcacaagattcaccacttaaattagaggattttatccctatggacagcacagtgaaaaattacttcataacagatgcgcaaacaggttcatcaaaatgtgtgtgttctgtgattgatcttttacttgatgactttgtcgagataataaagtcacaagatttgtcagtgatttcaaaagtggtcaaggttacaattgactatgctgaaatttcattcatgctttggtgtaaggatggacatgttgaaaccttctacccaaaactacaagcaagtcaagcgtggcaaccaggtgttgcgatgcctaacttgtacaagatgcaaagaatgcttcttgaaaagtgtgaccttcagaattatggtgaaaatgctgttatacccaaaggaataatgatgaatgtcgcaaagtatactcaactgtgtcaatacttaaatacacttactttagctgtaccctacaacatgagagttattcactttggtgctggctctgataaaggagttgcaccaggtacagctgtgctcagacaatggttgccaactggcacactacttgtcgattcagatcttaatgacttcgtctccgacgcagattctactttaattggagactgtgcaacagtacatacggctaataaatgggaccttattattagcgatatgtatgaccctaggaccaaacatgtgacaaaagagaatgactctaaagaagggtttttcacttatctgtgtggatttataaagcaaaaactagccctgggtggttctatagctgtaaagataacagagcattcttggaatgctgacctttacaagcttatgggccatttctcatggtggacagcttttgttacaaatgtaaatgcatcatcatcggaagcatttttaattggggctaactatcttggcaagccgaaggaacaaattgatggctataccatgcatgctaactacattttctggaggaacacaaatcctatccagttgtcttcctattcactctttgacatgagcaaatttcctcttaaattaagaggaactgctgtaatgtctcttaaggagaatcaaatcaatgatatgatttattctcttctggaaaaaggtaggcttatcattagagaaaacaacagagttgtggtttcaagtgatattcttgttaacaactaaacgaacatgtttattttcttattatttcttactctcactagtggtagtgaccttgaccggtgcaccacttttgatgatgttcaagctcctaattacactcaacatacttcatctatgaggggggtttactatcctgatgaaatttttagatcagacactctttatttaactcaggatttatttcttccattttattctaatgttacagggtttcatactattaatcatacgtttgacaaccctgtcataccttttaaggatggtatttattttgctgccacagagaaatcaaatgttgtcccgtggttgggtttttggttctaccatgaacaacaagtcacagtcggtgattattattaacaattctactaatgttgttatacgagcatgtaactttgaattgtgtgacaaccctttctttgctgtttctaaacccatgggtacacagacacatactatgatattcgataatgcatttaattgcactttcgagtacatatctgatgccttttcgcttgatgtttcagaaaagtcaggtaattttaaacacttacgagagtttgtgtttaaaaataaagatgggtttctctatgtttataagggctatcaacctatagatgtagttcgtgatctaccttctggttttaacactttgaaacctatttttaagttgcctcttggtattaacattacaaattttagagccattcttacagccttttcacctgctcaagacacttggggcacgtcagctgcagcctattttgttgggctatttaaagccaactacatttatgctcaagtatgatgaaaatggtacaatcacagatgctgttgattgttctcaaaatccacttgctgaactcaaatgctctgttaagagctttgagattgacaaaggaatttaccagacctctaatttcagggttgttccctcaggagatgttgtgagattccctaatattacaaacttgtgtcctttgggagaggtttttaatgctactaaattcccttctgtctatgcatgggagagaaaaaaaatttctaattgtgttgctgattactctgtgctctacaactcaacatttttttcaacctttaagtgctatggcgtttctgccactaagttgaatgatctttgcttctccaatgtctatgcagattcttttgtagtcaagggagatgatgtaagacaaatagcgccaggacaaactggtgttattgctgattataattataaattgccagatgatttcatgggttgtgtccttgcttggaatactaggaacattgatgctacttcaactggtaattataattataaatataggtatcttagacatggcaagcttaggccctttgagagagannnnnnnnnnnnnnnnnnnnnnnnnnnnnnnnnnnnnnnnnnnnnnnnnnnnnnnnnnnnnnnnnnnnnnnnnnnnnnnnnnnnnnnnnnnnnnnnnnnntcttaattgttattggccattaaatgattatggtttttacaccactactggcattggctaccaaccttacagagttgtagtactttcttttgaacttttaaatgcaccggccacggtttgtggaccaaaattatccactgaccttattaagaaccagtgtgtcaattttaattttaatggactcactggtactggtgtgttaactccttcttcaaagagatttcaaccatttcaacaatttggccgtgatgtttctgatttcactgattccgttcgagatcctaaaacatctgaaatattagacatttcaccttgctcttttgggggtgtaagtgtaattacacctggaacaaatgcttcatctgaagttgctgttctatatcaagatgttaactgcactgatgtttctacagcaattcatgcagatcaactcacaccagcttggcgcatatattctactggaaacaatgtattccagactcaagcaggctgtcttataggagctgagcatgtcgacacttcttatgagtgcgacattcctattggagctggcatttgtgctagttaccatacagtttctttattacgtagtactagccaaaaatctattgtggcttatactatgtctttaggtgctgatagttcaattgcttactctaataacaccattgctatacctactaacttttcaattagcattactacagaagtaatgcctgtttctatggctaaaacctccgtagattgtaatatgtacatctgcggagattctactgaatgtgctaatttgcttctccaatatggtagcttttgcacacaactaaatcgtgcactctcaggtattgctgctgaacaggatcgcaacacacgtgaagtgttcgctcaagtcaaacaaatgtacaaaaccccaactttgaaatattttggtggttttaatttttcacaaatattacctgaccctctaaagccaactaagaggtcttttattgaggacttgctctttaataaggtgacactcgctgatgctggcttcatgaagcaatatggcgaatgcctaggtgatattaatgctagagatctcatttgtgcgcagaagttcaatggacttacagtgttgccacctctgctcactgatgatatgattgctgcctacactgctgctctagttagtggtactgccactgctggatggacatttggtgctggcgctgctcttcaaataccttttgctatgcaaatggcatataggttcaatggcattggagttacccaaaatgttctctatgagaaccaaaaacaaatcgccaaccaatttaacaaggcgattagtcaaattcaagaatcacttacaacaacatcaactgcattgggcaagctgcaagacgttgttaaccagaatgctcaagcattaaacacacttgttaaacaacttagctctaattttggtgcaatttcaagtgtgctaaatgatatcctttcgcgacttgataaagtcgaggcggaggtacaaattgacaggttaattacaggcagacttcaaagccttcaaacctatgtaacacaacaactaatcagggctgctgaaatcagggcttctgctaatcttgctgctactaaaatgtctgagtgtgttcttggacaatcaaaaagagttgacttttgtggaaagggctaccaccttatgtccttcccacaagcagccccgcatggtgttgtcttcctacatgtcacgtatgtgccatcccaggagaggaacttcaccacagcgccagcaatttgtcatgaaggcaaagcatacttccctcgtgaaggtgtttttgtgtttaatggcacttcttggtttattacacagaggaacttcttttctccacaaataattactacagacaatacatttgtctcaggaaattgtgatgtcgttattggcatcattaacaacacagtttatgatcctctgcaacctgagcttgactcattcaaagaagagctggacaagtacttcaaaaatcatacatcaccagatgttgatcttggcgacatttcaggcattaacgcttctgtcgtcaacattcaaaaagaaattgaccgcctcaatgaggtcgctaaaaatttaaatgaatcactcattgaccttcaagaattgggaaaatatgagcaatatattaaatggccttggtatgtttggctcggcttcattgctggactaattgccatcgtcatggttacaatcttgctttgttgcatgactagttgttgcagttgcctcaagggtgcatgctcttgtggttcttgctgcaagtttgatgaggatgactctgagccagttctcaagggtgtcaaattacattacacataaacgaacttatggatttgtttatgagattttttactcttgaatcaattactgcacagccagtaaaaattgacaatgcttctcctgcaagtactgttcatgctacagcaacgataccgctacaagcctcactccctttcggagtggcttgttattggcgttgcatttcttgctgtttttcacgagcgctaccaaaataattgcgctcaataaaagatggcagctagccctttataagggcttccagttcatttgcaatttactgctgctatttgttaccatctattcacatcttttgcttgtcgctgcaggtatggaggcgcaatttttgtacctctatgccttgatatattttctacaatgcatcaacgcatgtagaattattatgagatgttggctttgttggaagtgcaaatccaagaacccattactttatgatgccaactactttgtttgctggcacacacataactatgactactgtataccatataacagtgtcacagatacaattgtcgttactgaaggtgacggcatttcaacaccaaaactcaaagaagactaccaaattggtggttattctgaggataggcactcaggtgttaaagactatgtcgttgtacatggctatttcaccgaagtttactaccagcttgagtctacacaaattactacagacactggtattgaaaatgctacattcttcatctttaacaagcttgttaaagatccaccgaatgtgcaaatacacacaatcgacggctcttcaggagttgctaatccagcaatggatccaatttatgatgagccgacgacgactactagcgtgcctttgtaagcacaagaaagtgagtacgaacttatgtactcattcgtttcggaagaaacaggtacgttaatagttaatagcgtacttctttttcttgctttcgtggtattcttgctagtcacactagccatccttactgcgcttcgattgtgtgcgtactgctgcaatattgttaacgtgagtttagtaaaaccaacggtttacgtctactcgcgtgttaaaaatctgaactcttctgaaggagttcctgatcttctggtctaaacgaactaactattattattattctgtttggaactttaacattgcttatcatggcagacaacggtactattaccgttgaggagcttaaacaactcctggaacaatggaacctagtaataggtttcctattcctagcctggattatgttactacaatttgcctattctaatcggaacaggtttttgtacataataaagcttgttttcctctggctcttgtggccagtaacacttgcttgttttgtgcttgctgctgtctacagaattaattgggtgactggcgggattgcgattgcaatggcttgtattgtaggcttgatgtggcttagctacttcgttgcttccttcaggctgtttgctcgtacccgctcaatgtggtcattcaacccagaaacaaacattcttctcaatgtgcctctccgggggacaattgtgaccagaccgctcatggaaagtgaacttgtcattggtgctgtgatcattcgtggtcacttgcgaatggccggacactccctagggcgctgtgacattaaggacctgccaaaagagatcactgtggctacatcacgaacgctttcttattacaaattaggagcgtcgcagcgtgtaggcactgattcaggttttgctgcatacaaccgctaccgtattggaaactataaattaaatacagaccacgccggtagcaacgacaatattgctttgctagtacagtaagtgacaacagatgtttcatcttgttgacttccaggttacaatagcagagatattgattatcattatgaggactttcaggattgctatttggaatcttgacgttataataagttcaatagtgagacaattatttaagcctctaactaagaagaattattcggagttagatgatgaagaacttatggagttagattatccataaaacgaacatgaaaattattctcttcctgacattgattgtatttacatcttgcgagctatatcactatcaggagtgtgttagaggtacgactgtactactaaaagaaccttgcccatcaggaacatacgagggcaattcaccatttcaccctcttgctgacaataaatttgcactaacttgcactagcacacactttgcttttgcttgtgctgacggtactcgacatacctatcagctgcgtgcaagatcagtttcaccaaaacttttcatcagacaagaggaggttcaacaagagctctactcgccactttttctcattgttgctgctctagtatttttaatactttgcttcaccattaagagaaagacagaatgaatgagctcactttaattgacttctatttgtgctttttagcctttctgctattccttgttttaataatgcttattatattttggttttcactcgaaatccaggatctagaagaaccttgtaccaaagtctaaacgaacatgaaacttctcattgttttgacttgtatttctctatgcagttgcatacgcactgtagtacagcgctgtgcatctaataaacctcatgtgcttgaagatccttgtaaggtacaacactaggggtaatacttatagcactgcttggctttgtgctctaggaaaggttttaccttttcatagatggcacactatggttcaaacatgcacacctaatgttactatcaactgtcaagatccagctggtggtgcgcttatagctaggtgttggtaccttcatgaaggtcaccaaactgctgcatttagagacgtacttgttgttttaaataaacgaacaaattaaaatgtctgataatggaccccaatcaaaccaacgtagtgccccccgcattacatttggtggacccacagattcaactgacaataaccagaatggaggacgcaatggggcaaggccaaaacagcgccgaccccaaggtttacccaataatactgcgtcttggttcacagctctcactcagcatggcaaggaggaacttagattccctcgaggccagggcgttccaatcaacaccaatagtggtccagatgaccaaattggctactaccgaagagctacccgacgagttcgtggtggtgacggcaaaatgaaagagctcagccccagatggtacttctattacctaggaactggcccagaagcttcacttccctacggcgctaacaaagaaggcatcgtatgggttgcaactgagggagccttgaatacacccaaagaccacattggcacccgcaatcctaataacaatgctgccaccgtgctacaacttcctcaaggaacaacattgccaaaaggcttctacgcagagggaagcagaggcggcagtcaagcctcttctcgctcctcatcacgtagtcgcggtaattcaagaaattcaactcctggcagcagtaggggaaattctcctgctcgaatggctagcggaggtggtgaaactgccctcgcgctattgctgctagacagattgaaccagcttgagagcaaagtttctggtaaaggccaacaacaacaaggccaaactgtcactaagaaatctgctgctgaggcatctaaaaagcctcgccaaaaacgtactgccacaaaacagtacaacgtcactcaagcatttgggagacgtggtccagaacaaacccaaggaaatttcggggaccaagacctaatcagacaaggaactgattacaaacattggccgcaaattgcacaatttgctccaagtgcctctgcattctttggaatgtcacgcattggcatggaagtcacaccttcgggaacatggctgacttatcatggagccattaaattggatgacaaagatccacaattcaaagacaacgtcatactgctgaacaagcacattgacgcatacaaaacattcccaccaacagagcctaaaaaggacaaaaagaaaaagactgatgaagctcagcctttgccgcagagaccaaagaagcagcccactgtgactcttcttcctgcggctgacatggatgatttctccagacaacttcaaaattccatgagtggagcttctgctgattcaactcaggcataaacactcatgatgaccacacaaggcagatgggctatgtaaacgttttcgcaattccgtttacgatacatagtctactcttgtgcagaatgaattctcgtaactaaacagcacaagtaggtttagttaactttaatctcacatagcaatctttaatcaatgtgtaacattagggaggacttgaaagagccaccacattttcatcgaggccacgcggagtacgatcgagggtacagtgaataatgctagggagagctgcctatatggaagagccctaatg

SEQ ID NO: 29742 - DNA, 29206 bp, SARS Coronavirus
aaagccaaccaacctcgatctcttgtagatctgttctctaaacgaactttaaaatctgtgtagctgtcgctcggctgcatgcctagtgcacctacgcagtataaacaataataaattttactgtcgttgacaagaaacgagtaactcgtccctcttctgcagactgcttacggtttcgtccgtgttgcagtcgatcatcagcatacctaggtttcgtccgggtgtgaccgaaaggtaagatggagagccttgttcttggtgtcaacgagaaaacacacgtccaactcagtttgcctgtccttcaggttagagacgtgctagtgcgtggcttcggggactctgtggaagaggccctatcggaggcacgtgaacacctcaaaaatggcacttgtggtctagtagagctggaaaaaggcgtactgccccagcttgaacagccctatgtgttcattaaacgttctgatgccttaagcaccaatcacggccacaaggtcgttgagctggttgcagaaatggacggcattcagtacggtcgtagcggtataacactgggagtactcgtgccacatgtgggcgaaaccccaattgcataccgcaatgttcttcttcgtaagaacggtaataagggagccggtggtcatagctatggcatcgatctaaagtcttatgacttaggtgacgagcttggcactgatcccattgaagattatgaacaaaactggaacactaagcatggcagtggtgcactccgtgaactcactcgtgagctcaatggaggtgcagtcactcgctatgtcgacaacaatttctgtggcccagatgggtaccctcttgattgcatcaaagattttctcgcacgcgcgggcaagtcaatgtgcactctttccgaacaacttgattacatcgagtcgaagagaggtgtctactgctgccgtgaccatgagcatgaaattgcctggttcactgagcgctctgataagagctacgagcaccagacacccttcgaaattaagagtgccaagaaatttgacactttcaaaggggaatgcccaaagtttgtgtttcctcttaactcaaaagtcaaagtcattcaaccacgtgttgaaaagaaaaagactgagggtttcatggggcgtatacgctctgtgtaccctgttgcatctccacaggagtgtaacaatatgcacttgtctaccttgatgaaatgtaatcattgcgatgaagtttcatggcagacgtgcgactttctgaaagccacttgtgaacattgtggcactgaaaatttagttattgaaggacctactacatgtgggtacctacctactaatgctgtagtgaaaatgccatgtcctgcctgtcaagacccagagattggacctgagcatagtgttgcagattatcacaaccactcaaacattgaaactcgactccgcaagggaggtaggactagatgttttggaggctgtgtgtttgcctatgttggctgctataataagcgtgcctactgggttcctcgtgctagtgctgatattggctcaggccatactggcattactggtgacaatgtggagaccttgaatgaggatctccttgagatactgagtcgtgaacgtgttaacattaacattgttggcgattttcatttgaatgaagaggttgccatcattttggcatctttctctgcttctacaagtgcctttattgacactataaagagtcttgattacaagtctttcaaaaccattgttgagtcctgcggtaactataaagttaccaagggaaagcccgtaaaaggtgcttggaacattggacaacagagatcagttttaacaccactgtgtggttttccctcacaggctgctggtgttatcagatcaatttttgcgcgcacacttgatgcagcaaaccactcaattcctgatttgcaaagagcagctgtcaccatacttgatggtatttctgaacagtcattacgtcttgtcgacgccatggtttatacttcagacctgctcaccaacagtgtcattattatggcatatgtaactggtggtcttgtacaacagacttctcagtggttgtctaatcttttgggcactactgttgaaaaactcaggcctatctttgaatggattgaggcgaaacttagtgcaggagttgaatttctcaaggatgcttgggagattctcaaatttctcattacaggtgtttttgacatcgtcaagggtcaaatacaggttgcttcagataacatcaaggattgtgtaaaatgcttcattgatgttgttaacaaggcactcgaaatgtgcattgatcaagtcactatcgctggcgcaaagttgcgatcactcaacttaggtgaagtcttcatcgctcaaagcaagggactttaccgtcagtgtatacgtggcaaggagcagctgcaactactcatgcctcttaaggcaccaaaagaagtaacctttcttgaaggtgattcacatgacacagtacttacctctgaggaggttgttctcaagaacggtgaactcgaagcactcgagacgcccgttgatagcttcacaaatggagctatcgttggcacaccagtctgtgtaaatggcctcatgctcttagagattaaggacaaagaacaatactgcgcattgtctcctggtttactggctacaaacaatgtctttcgcttaaaagggggtgcaccaattaaaggtgtaacctttggagaagatactgtttgggaagttcaaggttacaagaatgtgagaatcacatttgagcttgatgaacgtgttgacaaagtgcttaatgaaaagtgctctgtctacactgttgaatccggtaccgaagttactgagtttgcatgtgttgtagcagaggctgttgtgaagactttacaaccagtttctgatctccttaccaacatgggtattgatcttgatgagtggagtgtagctacattctacttatttgatgatgctggtgaagaaaacttttcatcacgtatgtattgttccttttaccctccagatgaggaagaagaggacgatgcagagtgtgaggaagaagaaattgatgaaacctgtgaacatgagtacggtacagaggatgattatcaaggtctccctctggaatttggtgcctcagctgaaacagttcgagttgaggaagaagaagaggaagactggctggatgatactactgagcaatcagagattgagccagaaccagaacctacacctgaagaaccagttaatcagtttactggttatttaaaacttactgacaatgttgccattaaatgtgttgacatcgttaaggaggcacaaagtgctaatcctatggtgattgtaaatgctgctaacatacacctgaaacatggtggtggtgtagcaggtgcactcaacaaggcaaccaatggtgccatgcaaaaggagagtgatgattacattaagctaaatggccctcttacagtaggagggtcttgtttgctttctggacataatcttgctaagaagtgtctgcatgttgttggacctaacctaaatgcaggtgaggacatccagcttcttaaggcagcatatgaaaatttcaattcacaggacatcttacttgcaccattgttgtcagcaggcatatttggtgctaaaccacttcagtctttacaagtgtgcgtgcagacggttcgtacacaggtttatattgcagtcaatgacaaagctctttatgagcaggttgtcatggattatcttgataacctgaagcctagagtggaagcacctaaacaagaggagccaccaaacacagaagattccaaaactgaggagaaatctgtcgtacagaagcctgtcgatgtgaagccaaaaattaaggcctgcattgatgaggttaccacaacactggaagaaactaagtttcttaccaataagttactcttgtttgctgatatcaatggtaagctttaccatgattctcagaacatgcttagaggtgaagatatgtctttccttgagaaggatgcaccttacatggtaggtgatgttatcactagtggtgatatcacttgtgttgtaataccctccaaaaaggctggtggcactactgagatgctctcaagagctttgaagaaagtgccagttgatgagtatataaccacgtaccctggacaaggatgtgctggttatacacttgaggaagctaagactgctcttaagaaatgcaaatctgcattttatgtactaccttcagaagcacctaatgctaaggaagagattctaggaactgtatcctggaatttgagagaaatgcttgctcatgctgaagagacaagaaaattaatgcctatatgcatggatgttagagccataatggcaaccatccaacgtaagtataaaggaattaaaattcaagagggcatcgttgactatggtgtccgattcttcttttatactagtaaagagcctgtagcttctattattacgaagctgaactctctaaatgagccgcttgtcacaatgccaattggttatgtgacacatggttttaatcttgaagaggctgcgcgctgtatgcgttctcttaaagctcctgccgtagtgtcagtatcatcaccagatgctgttactacatataatggatacctcacttcgtcatcaaagacatctgaggagcactttgtagaaacagtttctttggctggctcttacagagattggtcctattcaggacagcgtacagagttaggtgttgaatttcttaagcgtggtgacaaaattgtgtaccacactctggagagccccgtcgagtttcatcttgacggtgaggttctttcacttgacaaactaaagagtctcttatccctgcgggaggttaagactataaaagtgttcacaactgtggacaacactaatctccacacacagcttgtggatatgtctatgacatatggacagcagtttggtccaacatacttggatggtgctgatgttacaaaaattaaacctcatgtaaatcatgagggtaagactttctttgtactacctagtgatgacacactacgtagtgaagctttcgagtactaccatactcttgatgagagttttcttggtaggtacatgtctgctttaaaccacacaaagaaatggaaatttcctcaagttggtggtttaacttcaattaaatgggctgataacaattgttatttgtctagtgttttattagcacttcaacagcttgaagtcaaattcaatgcaccagcacttcaagaggcttattatagagcccgtgctggtgatgctgctaacttttgtgcactcatactcgcttacagtaataaaactgttggcgagcttggtgatgtcagagaaactatgacccatcttctacagcatgctaatttggaatctgcaaagcgagttcttaatgtggtgtgtaaacattgtggtcagaaaactactaccttaacgggtgtagaagctgtgatgtatatgggtactctatcttatgataatcttaagacaggtgtttccattccatgtgtgtgtggtcgtgatgctacacaatatctagtacaacaagagtcttcttttgttatgatgtctgcaccacctgctgagtataaattacagcaaggtacattcttatgtgcgaatgagtacactggtaactatcagtgtggtcattacactcatataactgctaaggagaccctctatcgtattgacggagctcaccttacaaagatgtcagagtacaaaggaccagtgactgatgttttctacaaggaaacatcttacactacaaccatcaagcctgtgtcgtataaactcgatggagttacttacacagagattgaaccaaaattggatgggtattataaaaaggataatgcttactatacagagcagcctatagaccttgtaccaactcaaccattaccaaatgcgagttttgataatttcaaactcacatgttctaacacaaaatttgctgatgatttaaatcaaatgacaggcttcacaaagccagcttcacgagagctatctgtcacattcttcccagacttgaatggcgatgtagtggctattgactatagacactattcagcgagtttcaagaaaggtgctaaattactgcataagccaattgtttggcacattaaccaggctacaaccaagacaacgttcaaaccaaacacttggtgtttacgttgtctttggagtacaaagccagtagatacttcaaattcatttgaagttctggcagtagaagacacacaaggaatggacaatcttgcttgtgaaagtcaacaacccacctctgaagaagtagtggaaaatcctaccatacagaaggaagtcatagagtgtgacgtgaaaactaccgaagttgtaggcaatgtcatacttaaaccatcagatgaaggtgttaaagtaacacaagagttaggtcatgaggatcttatggctgcttatgtggaaaacacaagcattaccattaagaaacctaatgagctttcactagccttaggtttaaaaacaattgccactcatggtattgctgcaattaatagtgttccttggagtaaaattttggcttatgtcaaaccattcttaggacaagcagcaattacaacatcaaattgcgctaagagattagcacaacgtgtgtttaacaattatatgccttatgtgtttacattattgttccaattgtgtacttttactaaaagtaccaattctagaattagagcttcactacctacaactattgctaaaaatagtgttaagagtgttgctaaattatgtttggatgccggcattaattatgtgaagtcacccaaattttctaaattgttcacaatcgctatgtggctattgttgttaagtatttgcttaggttctctaatctgtgtaactgctgcttttggtgtactcttatctaattttggtgctccttcttattgtaatggcgttagagaattgtatcttaattcgtctaacgttactactatggatttctgtgaaggttcttttccttgcagcatttgtttaagtggattagactcccttgattcttatccagctcttgaaaccattcaggtgacgatttcatcgtacaagctagacttgacaattttaggtctggccgctgagtgggttttggcatatatgttgttcacaaaattcttttatttattaggtctttcagctataatgcaggtgttctttggctattttgctagtcatttcatcagcaattcttggctcatgtggtttatcattagtattgtacaaatggcacccgtttctgcaatggttaggatgtacatcttctttgcttctttctactacatatggaagagctatgttcatatcatggatggttgcacctcttcgacttgcatgatgtgctataagcgcaatcgtgccacacgcgttgagtgtacaactattgttaatggcatgaagagatctttctatgtctatgcaaatggaggccgtggcttctgcaagactcacaattggaattgtctcaattgtgacacattttgcactggtagtacattcattagtgatgaagttgctcgtgatttgtcactccagtttaaaagaccaatcaaccctactgaccagtcatcgtatattgttgatagtgttgctgtgaaaaatggcgcgcttcacctctactttgacaaggctggtcaaaagacctatgagagacatcctctctcccattttgtcaatttagacaatttgagagctaacaacactaaaggttcactgcctattaatgtcatagtttttgatggcaagtccaaatgcgacgagtctgcttctaagtctgcttctgtgtactacagtcagctgatgtgccaacctattctgttgcttgaccaagctcttgtatcagacgttggagatagtactgaagtttccgttaagatgtttgatgcttatgtcgacaccttttcagcaacttttagtgttcctatggaaaaacttaaggcacttgttgctacagctcacagcgagttagcaaagggtgtagctttagatggtgtcctttctacattcgtgtcagctgcccgacaaggtgttgttgataccgatgttgacacaaaggatgttattgaatgtctcaaactttcacatcactctgacttagaagtgacaggtgacagttgtaacaatttcatgctcacctataataaggttgaaaacatgacgcccagagatcttggcgcatgtattgactgtaatgcaaggcatatcaatgcccaagtagcaaaaagtcacaatgtttcactcatctggaatgtaaaagactacatgtctttatctgaacagctgcgtaaacaaattcgtagtgctgccaagaagaacaacataccttttagactaacttgtgctacaactagacaggttgtcaatgtcataactactaaaatctcactcaagggtggtaagattgttagtacttgttttaaacttatgcttaaggccacattattgtgcgttcttgctgcattggtttgttatatcgttatgccagtacatacattgtcaatccatgatggttacacaaatgaaatcattggttacaaagccattcaggatggtgtcactcgtgacatcatttctactgatgattgttttgcaaataaacatgctggttttgacgcatggtttagccagcgtggtggttcatacaaaaatgacaaaagctgccctgtagtagctgctatcattacaagagagattggtttcatagtgcctggcttaccgggtactgtgctgagagcaatcaatggtgacttcttgcattttctacctcgtgtttttagtgctgttggcaacatttgctacacaccttccaaactcattgagtatagtgattttgctacctctgcttgcgttcttgctgctgagtgtacaatttttaaggatgctatgggcaaacctgtgccatattgttatgacactaatttgctagagggttctatttcttatagtgagcttcgtccagacactcgttatgtgcttatggatggttccatcatacagtttcctaacacttacctggagggttctgttagagtagtaacaacttttgatgctgagtactgtagacatggtacatgcgaaaggtcagaagtaggtatttgcctatctaccagtggtagatgggttcttaataatgagcattacagagctctatcaggagttttctgtggtgttgatgcgatgaatctcatagctaacatctttactcctcttgtgcaacctgtgggtgctttagatgtgtctgcttcagtagtggctggtggtattattgccatattggtgacttgtgctgcctactactttatgaaattcagacgtgcttttggtgagtacaaccatgttgttgctgctaatgcacttttgtttttgatgtctttcactatactctgtctggcaccagcttacagctttctgccgggagtctactcagtcttttacttgtacttgacattctatttcaccaatgatgtttcattcttggctcaccttcaatggtttgccatgttttctcctattgtgcctttttggataacagcaatctatgtattctgtatttctctgaagcactgccattggttctttaacaactatcttaggaaaagagtcatgtttaatggagttacatttagtaccttcgaggaggctgctttgtgtacctttttgctcaacaaggaaatgtacctaaaattgcgtagcgagacactgttgccacttacacagtataacaggtatcttgctctatataacaagtacaagtatttcagtggagccttagatactaccagctatcgtgaagcagcttgctgccacttagcaaaggctctaaatgactttagcaactcaggtgctgatgttctctaccaaccaccacagacatcaatcacttctgctgttctgcagagtggttttaggaaaatggcattcccgtcaggcaaagttgaagggtgcatggtacaagtaacctgtggaactacaactcttaatggattgtggttggatgacacagtatactgtccaagacatgtcatttgcacagcagaagacatgcttaatcctaactatgaagatctgctcattcgcaaatccaaccatagctttcttgttcaggctggcaatgttcaacttcgtgttattggccattctatgcaaaattgtctgcttaggcttaaagttgatacttctaaccctaagacacccaagtataaatttgtccgtatccaacctggtcaaacattttcagttctagcatgctacaatggttcaccatctggtgtttatcagtgtgccatgagacctaatcataccattaaaggttctttccttaatggatcatgtggtagtgttggttttaacattgattatgattgcgtgtctttctgctatatgcatcatatggagcttccaacaggagtacacgctggtactgacttagaaggtaaattctatggtccatttgttgacagacaaactgcacaggctgcaggtacagacacaaccataacattaaatgttttggcatggctgtatgctgctgttatcaatggtgataggtggtttcttaatagattcaccactactttgaatgactttaaccttgtggcaatgaagtacaactatgaacctttgacacaagatcatgttgacatattgggacctctttctgctcaaacaggaattgccgtcttagatatgtgtgctgctttgaaagagctgctgcagaatggtatgaatggtcgtactatccttggtagcactattttagaagatgagtttacaccatttgatgttgttagacaatgctctggtgttaccttccaaggtaagttcaagaaaattgttaagggcactcatcattggatgcttttaactttcttgacatcactattgattcttgttcaaagtacacagtggtcactgtttttctttgtttacgagaatgctttcttgccatttactcttggtattatggcaattgctgcatgtgctatgctgcttgttaagcataagcacgcattcttgtgcttgtttctgttaccttctcttgcaacagttgcttactttaatatggtctacatgcctgctagctgggtgatgcgtatcatgacatggcttgaattggctgacactagcttgtctggttataggcttaaggattgtgttatgtatgcttcagctttagttttgcttattctcatgacagctcgcactgtttatgatgatgctgctagacgtgtttggacactgatgaatgtcattacacttgtttacaaagtctactatggtaatgctttagatcaagctatttccatgtgggccttagttatttctgtaacctctaactattctggtgtcgttacgactatcatgtttttagctagagctatagtgtttgtgtgtgttgagtattacccattgttatttattactggcaacaccttacagtgtatcatgcttgtttattgtttcttaggctattgttgctgctgctactttggccttttctgtttactcaaccgttacttcaggcttactcttggtgtttatgactacttggtctctacacaagaatttaggtatatgaactcccaggggcttttgcctcctaagagtagtattgatgctttcaagcttaacattaagttgttgggtattggaggtaaaccatgtatcaaggttgctactgtacagtctaaaatgtctgacgtaaagtgcacatctgtggtactgctctcggttcttcaacaacttagagtagagtcatcttctaaattgtgggcacaatgtgtacaactccacaatgatattcttcttgcaaaagacacaactgaagctttcgagaagatggtttctcttttgtctgttttgctatccatgcagggtgctgtagacattaataggttgtgcgaggaaatgctcgataaccgtgctactcttcaggctattgcttcagaatttagttctttaccatcatatgccgcttatgccactgcccaggaggcctatgagcaggctgtagctaatggtgattctgaagtcgttctcaaaaagttaaagaaatctttgaatgtggctaaatctgagtttgaccgtgatgctgccatgcaacgcaagttggaaaagatggcagatcaggctatgacccaaatgtacaaacaggcaagatctgaggacaagagggcaaaagtaactagtgctatgcaaacaatgctcttcactatgcttaggaagcttgataatgatgcacttaacaacattatcaacaatgcgcgtgatggttgtgttccactcaacatcataccattgactacagcagccaaactcatggttgttgtccctgattatggtacctacaagaacacttgtgatggtaacacctttacatatgcatctgcactctgggaaatccagcaagttgttgatgcggatagcaagattgttcaacttagtgaaattaacatggacaattcaccaaatttggcttggcctcttattgttacagctctaagagccaactcagctgttaaactacagaataatgaactgagtccagtagcactacgacagatgtcctgtgcggctggtaccacacaaacagcttgtactgatgacaatgcacttgcctactataacaattcgaagggaggtaggtttgtgctggcattactatcagaccaccaagatctcaaatgggctagattccctaagagtgatggtacaggtacaatttacacagaactggaaccaccttgtaggtttgttacagacacaccaaaagggcctaaagtgaaatacttgtacttcatcaaaggcttaaacaacctaaatagaggtatggtgctgggcagtttagctgctacagtacgtcttcaggctggaaatgctacagaagtacctgccaattcaactgtgctttccttctgtgcttttgcagtagaccctgctaaagcatataaggattacctagcaagtggaggacaaccaatcaccaactgtgtgaagatgttgtgtacacacactggtacaggacaggcaattactgtaacaccagaagctaacatggaccaagagtcctttggtggtgcttcatgttgtctgtattgtagatgccacattgaccatccaaatcctaaaggattctgtgacttgaaaggtaagtacgtccaaatacctaccacttgtgctaatgacccagtgggttttacacttagaaacacagtctgtaccgtctgcggaatgtggaaaggttatggctgtagttgtgaccaactccgcgaacccttgatgcagtctgcggatgcatcaacgtttttaaacgggtttgcggtgtaagtgcagcccgtcttacaccgtgcggcacaggcactagtactgatgtcgtctacagggcttttgatatttacaacgaaaaagttgctggttttgcaaagttcctaaaaactaattgctgtcgcttccaggagaaggatgaggaaggcaatttattagactcttactttgtagttaagaggcatactatgtctaactaccaacatgaagagactatttataacttggttaaagattgtccagcggttgctgtccatgactttttcaagtttagagtagatggtgacatggtaccacatatatcacgtcagcgtctaactaaatacacaatggctgatttagtctatgctctacgtcattttgatgagggtaattgtgatacattaaaagaaatactcgtcacatacaattgctgtgatgatgattatttcaataagaaggattggtatgacttcgtagagaatcctgacatcttacgcgtatatgctaacttaggtgagcgtgtacgccaatcattattaaagactgtacaattctgcgatgctatgcgtgatgcaggcattgtaggcgtactgacattagataatcaggatcttaatgggaactggtacgatttcggtgatttcgtacaagtagcaccaggctgcggagttcctattgtggattcatattactcattgctgatgcccatcctcactttgactagggcattggctgctgagtcccatatggatgctgatctcgcaaaaccacttattaagtgggatttgctgaaatatgattttacggaagagagactttgtctcttcgaccgttattttaaatattgggaccagacataccatcccaattgtattaactgtttggatgataggtgtatccttcattgtgcaaactttaatgtgttattttctactgtgtttccacctacaagttttggaccactagtaagaaaaatatttgtagatggtgttccttttgttgtttcaactggataccattttcgtgagttaggagtcgtacataatcaggatgtaaacttacatagctcgcgtctcagtttcaaggaacttttagtgtatgctgctgatccagctatgcatgcagcttctggcaatttattgctagataaacgcactacatgcttttcagtagctgcactaacaaacaatgttgcttttcaaactgtcaaacccggtaattttaataaagacttttatgactttgctgtgtctaaaggtttctttaaggaaggaagttctgttgaactaaaacacttcttctttgctcaggatggcaacgctgctatcagtgattatgactattatcgttataatctgccaacaatgtgtgatatcagacaactcctattcgtagttgaagttgttgataaatactttgattgttacgatggtggctgtattaatgccaaccaagtaatcgttaacaatctggataaatcagctggtttcccatttaataaatggggtaaggctagactttattatgactcaatgagttatgaggatcaagatgcacttttcgcgtatactaagcgtaatgtcatccctactataactcaaatgaatcttaagtatgccattagtgcaaagaatagagctcgcaccgtagctggtgtctctatctgtagtactatgacaaatagacagtttcatcagaaattattgaagtcaatagccgccactagaggagctactgtggtaattggaacaagcaagttttacggtggctggcataatatgttaaaaactgtttacagtgatgtagaaactccacaccttatgggttgggattatccaaaatgtgacagagccatgcctaacatgcttaggataatggcctctcttgttcttgctcgcaaacataacacttgctgtaacttatcacaccgtttctacaggttagctaacgagtgtgcgcaagtattaagtgagatggtcatgtgtggcggctcactatatgttaaaccaggtggaacatcatccggtgatgctacaactgcttatgctaatagtgtctttaacatttgtcaagctgttacagccaatgtaaatgcacttctttcaactgatggtaataagatagctgacaagtatgtccgcaatctacaacacaggctctatgagtgtctctatagaaatagggatgttgatcatgaattcgtggatgagttttacgcttacctgcgtaaacatttctccatgatgattctttctgatgatgccgttgtgtgctataacagtaactatgcggctcaaggtttagtagctagcattaagaactttaaggcagttctttattatcaaaataatgtgttcatgtctgaggcaaaatgttggactgagactgaccttactaaaggacctcacgaattttgctcacagcatacaatgctagttaaacaaggagatgattacgtgtacctgccttacccagatccatcaagaatattaggcgcaggctgttttgtcgatgatattgtcaaaacagatggtacacttatgattgaaaggttcgtgtcactggctattgatgcttacccacttacaaaacatcctaatcaggagtatgctgatgtctttcacttgtatttacaatacattagaaagttacatgatgagcttactggccacatgttggacatgtattccgtaatgctaactaatgataacacctcacggtactgggaacctgagttttatgaggctatgtacacaccacatacagtcttgcaggctgtaggtgcttgtgtattgtgcaattcacagacttcacttcgttgcggtgcctgtattaggagaccattcctatgttgcaagtgctgctatgaccatgtcatttcaacatcacacaaattagtgttgtctgttaatccctatgtttgcaatgccccaggttgtgatgtcactgatgtgacacaactgtatctaggaggtatgagctattattgcaagtcacataagcctcccattagttttccattatgtgctaatggtcaggtttttggtttatacaaaaacacatgtgtaggcagtgacaatgtcactgacttcaatgcgatagcaacatgtgattggactaatgctggcgattacatacttgccaacacttgtactgagagactcaagcttttcgcagcagaaacgctcaaagccactgaggaaacatttaagctgtcatatggtattgccactgtacgcgaagtactctctgacagagaattgcatctttcatgggaggttggaaaacctagaccaccattgaacagaaactatgtctttactggttaccgtgtaactaaaaatagtaaagtacagattggagagtacacctttgaaaaaggtgactatggtgatgctgttgtgtacagaggtactacgacatacaagttgaatgttggtgattactttgtgttgacatctcacactgtaatgccacttagtgcacctactctagtgccacaagagcactatgtgagaattactggcttgtacccaacactcaacatctcagatgagttttctagcaatgttgcaaattatcaaaaggtcggcatgcaaaagtactctacactccaaggaccacctggtactggtaagagtcattttgccatcggacttgctctctattacccatctgctcgcatagtgtatacggcatgctctcatgcagctgttgatgccctatgtgaaaaggcattaaaatatttgcccatagataaatgtagtagaatcatacctgcgcgtgcgcgcgtagagtgttttgataaattcaaagtgaattcaacactagaacagtatgttttctgcactgtaaatgcattgccagaaacaactgctgacattgtagtctttgatgaaatctctatggctactaattatgacttgagtgttgtcaatgctagacttcgtgcaaaacactacgtctatattggcgatcctgctcaattaccagccccccgcacattgctgactaaaggcacactagaaccagaatattttaattcagtgtgcagacttatgaaaacaataggtccagacatgttccttggaacttgtcgccgttgtcctgctgaaattgttgacactgtgagtgctttagtttatgacaataagctaaaagcacacaaggagaagtcagctcaatgcttcaaaatgttctacaaaggtgttattacacatgatgtttcatctgcaatcaacagacctcaaataggcgttgtaagagaatttcttacacgcaatcctgcttggagaaaagctgtttttatctcaccttataattcacagaacgctgtagcttcaaaaatcttaggattgcctacgcagactgttgattcatcacagggttctgaatatgactatgtcatattcacacaaactactgaaacagcacactcttgtaatgtcaaccgtttcaatgtggctatcacaagggcaaaaattggcattttgtgcataatgtctgatagagatctttatgacaaactgcaatttacaagtctagaaataccacgtcgcaatgtggctacattacaagcagaaaatgtaactggactttttaaggactgtagtaagatcattactggtcttcatcctacacaggcacctacacacctcagcgttgatataaagttcaagactgaaggattatgtgttgacataccaggcataccaaaggacatgacctaccgtagactcatctctatgatgggtttcaaaatgaattaccaagtcaatggttaccctaatatgtttatcacccgcgaagaagctattcgtcacgttcgtgcgtggattggctttgatgtagagggctgtcatgcaactagagatgctgtgggtactaacctacctctccagctaggattttctacaggtgttaacttagtagctgtaccgactggttatgttgacactgaaaataacacagaattcaccagagttaatgcaaaacctccaccaggtgaccagtttaaacatcttataccactcatgtataaaggcttgccctggaatgtagtgcgtattaagatagtacaaatgctcagtgatacactgaaaggattgtcagacagagtcgtgttcgtcctttgggcgcatggctttgagcttacatcaatgaagtactttgtcaagattggacctgaaagaacgtgttgtctgtgtgacaaacgtgcaacttgcttttctacttcatcagatacttatgcctgctggaatcattctgtgggttttgactatgtctataacccatttatgattgatgttcagcagtggggctttacgggtaaccttcagagtaaccatgaccaacattgccaggtacatggaaatgcacatgtggctagttgtgatgctatcatgactagatgtttagcagtccatgagtgctttgttaagcgcgttgattggtctgttgaataccctattataggagatgaactgagggttaattctgcttgcagaaaagtacaacacatggttgtgaagtctgcattgcttgctgataagtttccagttcttcatgacattggaaatccaaaggctatcaagtgtgtgcctcaggctgaagtagaatggaagttctacgatgctcagccatgtagtgacaaagcttacaaaatagaggagctcttctattcttatgctacacatcacgataaattcactgatggtgtttgtttgttttggaattgtaacgttgatcgttacccagccaatgcaattgtgtgtaggtttgacacaagagtcttgtcaaacttgaacttaccaggctgtgatggtggtagtttgtatgtgaataagcatgcattccacactccagctttcgataaaagtgcatttactaatttaaagcaattgcctttcttttactattctgatagtccttgtgagtctcatggcaaacaagtagtgtcggatattgattatgttccactcaaatctgctacgtgtattacacgatgcaatttaggtggtgctgtttgcagacaccatgcaaatgagtaccgacagtacttggatgcatataatatgatgatttctgctggatttagcctatggatttacaaacaatttgatacttataacctgtggaatacatttaccaggttacagagtttagaaaatgtggcttataatgttgttaataaaggacactttgatggacacgccggcgaagcacctgtttccatcattaataatgctgtttacacaaaggtagatggtattgatgtggagatctttgaaaataagacaacacttcctgttaatgttgcatttgagctttgggctaagcgtaacattaaaccagtgccagagattaagatactcaataatttgggtgttgatatcgctgctaatactgtaatctgggactacaaaagagaagccccagcacatgtatctacaataggtgtctgcacaatgactgacattgccaagaaacctactgagagtgcttgttcttcacttactgtcttgtttgatggtagagtggaaggacaggtagacctttttagaaacgcccgtaatggtgttttaataacagaaggttcagtcaaaggtctaacaccttcaaagggaccagcacaagctagcgtcaatggagtcacattaattggagaatcagtaaaaacacagtttaactactttaagaaagtagacggcattattcaacagttgcctgaaacctactttactcagagcagagacttagaggattttaagcccagatcacaaatggaaactgactttctcgagctcgctatggatgaattcatacagcgatataagctcgagggctatgccttcgaacacatcgtttatggagatttcagtcatggacaacttggcggtcttcatttaatgataggcttagccaagcgctcacaagattcaccacttaaattagaggattttatccctatggacagcacagtgaaaaattacttcataacagatgcgcaaacaggttcatcaaaatgtgtgtgttctgtgattgatcttttacttgatgactttgtcgagataataaagtcacaagatttgtcagtgatttcaaaagtggtcaaggttacaattgactatgctgaaatttcattcatgctttggtgtaaggatggacatgttgaaaccttctacccaaaactacaagcaagtcaagcgtggcaaccaggtgttgcgatgcctaacttgtacaagatgcaaagaatgcttcttgaaaagtgtgaccttcagaattatggtgaaaatgctgttataccaaaaggaataatgatgaatgtcgcaaagtatactcaactgtgtcaatacttaaatacacttactttagctgtaccctacaacatgagagttattcactttggtgctggctctgataaaggagttgcaccaggtacagctgtgctcagacaatggttgccaactggcacactacttgtcgattcagatcttaatgacttcgtctccgacgcagattctactttaattggagactgtgcaacagtacatacggctaataaatgggaccttattattagcgatatgtatgaccctaggaccaaacatgtgacaaaagagaatgactctaaagaagggtttttcacttatctgtgtggatttataaagcaaaaactagccctgggtggttctatagctgtaaagataacagagcattcttggaatgctgacctttacaagcttatgggccatttctcatggtggacagcttttgttacaaatgtaaatgcatcatcatcggaagcatttttaattggggctaactatcttggcaagccgaaggaacaaattgatggctataccatgcatgctaactacattttctggaggaacacaaatcctatccagttgtcttcctattcactctttgacatgagcaaatttcctcttaaattaagaggaactgctgtaatgtctcttaaggagaatcaaatcaatgatatgatttattctcttctggaaaaaggtaggcttatcattagagaaaacaacagagttgtggtttcaagtgatattcttgttaacaactaaacgaacatgtttattttcttattatttcttactctcactagtggtagtgaccttgaccggtgcaccacttttgatgatgttcaagctcctaattacactcaacatacttcatctatgaggggggtttactatcctgatgaaatttttagatcagacactctttatttaactcaggatttatttcttccattttattctaatgttacagggtttcatactattaatcatacgtttgacaaccctgtcataccttttaaggatggtatttattttgctgccacagagaaatcaaatgttgtccgtggttgggtttttggttctaccatgaacaacaagtcacagtcggtgattattattaacaattctactaatgttgttatacgagcatgtaactttgaattgtgtgacaaccctttctttgctgtttctaaacccatgggtacacagacacatactatgatattcgataatgcatttaattgcactttcgagtacatatctgatgccttttcgcttgatgtttcagaaaagtcaggtaattttaaacacttacgagagtttgtgtttaaaaataaagatgggtttctctatgtttataagggctatcaacctatagatgtagttcgtgatctaccttctggttttaacactttgaaacctatttttaagttgcctcttggtattaacattacaaattttagagccattcttacagccttttcacctgctcaagacacttggggcacgtcagctgcagcctattttgttggctatttaaagccaactacatttatgctcaagtatgatgaaaatggtacaatcacagatgctgttgattgttctcaaaatccacttgctgaactcaaatgctctgttaagagctttgagattgacaaaggaatttaccagacctctaatttcagggttgttccctcaggagatgttgtgagattccctaatattacaaacttgtgtccttttggagaggtttttaatgctactaaattcccttctgtctatgcatgggagagaaaaaaaatttctaattgtgttgctgattactctgtgctctacaactcaacatttttttcaacctttaagtgctatggcgtttctgccactaagttgaatgatctttgcttctccaatgtctatgcagattcttttgtagtcaagggagatgatgtaagacaaatagcgccaggacaaactggtgttattgctgattataattataaattgccagatgatttcatgggttgtgtccttgcttggaatactaggaacattgatgctacttcaactggtaattataattataaatataggtatcttagacatggcaagcttaggccctttgagagagacatatctaatgtgcctttctcccctgatggcaaaccttgcaccccacctgctcttaattgttattggccattaaatgattatggtttttacaccactactggcattggctaccaaccttacagagttgtagtactttcttttgaacttttaaatgcaccggccacggtttgtggaccaaaattatccactgaccttattaagaaccagtgtgtcaattttaattttaatggactcactggtactggtgtgttaactccttcttcaaagagatttcaaccatttcaacaatttggccgtgatgtttctgatttcactgattccgttcgagatcctaaaacatctgaaatattagacatttcaccttgctcttttgggggtgtaagtgtaattacacctggaacaaatgcttcatctgaagttgctgttctatatcaagatgttaactgcactgatgtttctacagcaattcatgcagatcaactcacaccagcttggcgcatatattctactggaaacaatgtattccagactcaagcaggctgtcttataggagctgagcatgtcgacacttcttatgagtgcgacattcctattggagctggcatttgtgctagttaccatacagtttctttattacgtagtactagccaaaaatctattgtggcttatactatgtctttaggtgctgatagttcaattgcttactctaataacaccattgctatacctactaacttttcaattagcattactacagaagtaatgcctgtttctatggctaaaacctccgtagattgtaatatgtacatctgcggagattctactgaatgtgctaatttgcttctccaatatggtagcttttgcacacaactaaatcgtgcactctcaggtattgctgctgaacaggatcgcaacacacgtgaagtgttcgctcaagtcaaacaaatgtacaaaaccccaactttgaaatattttggtggttttaatttttcacaaatattacctgaccctctaaagccaactaagaggtcttttattgaggacttgctctttaataaggtgacactcgctgatgctggcttcatgaagcaatatggcgaatgcctaggtgatattaatgctagagatctcatttgtgcgcagaagttcaatggacttacagtgttgccacctctgctcactgatgatatgattgctgcctacactgctgctctagttagtggtactgccactgctggatggacatttggtgctggcgctgctcttcaaataccttttgctatgcaaatggcatataggttcaatggcattggagttacccaaaatgttctctatgagaaccaaaaacaaatcgccaaccaatttaacaaggcgattagtcaaattcaagaatcacttacaacaacatcaactgcattgggcaagctgcaagacgttgttaaccagaatgctcaagcattaaacacacttgttaaacaacttagctctaattttggtgcaatttcaagtgtgctaaatgatatcctttcgcgacttgataaagtcgaggcggaggtacaaattgacaggttaattacaggcagacttcaaagccttcaaacctatgtaacacaacaactaatcagggctgctgaaatcagggcttctgctaatcttgctgctactaaaatgtctgagtgtgttcttggacaatcaaaaagagttgacttttgtggaaagggctaccaccttatgtccttcccacaagcagccccgcatggtgttgtcttcctacatgtcacgtatgtgccatcccaggagaggaacttcaccacagcgccagcaatttgtcatgaaggcaaagcatacttccctcgtgaaggtgtttttgtgtttaatggcacttcttggtttattacacagaggaacttcttttctccacaaataattactacagacaatacatttgtctcaggaaattgtgatgtcgttattggcatcattaacaacacagtttatgatcctctgcaacctgagcttgactcattcaaagaagagctggacaagtacttcaaaaatcatacatcaccagatgttgatcttggcgacatttcaggcattaacgcttctgtcgtcaacattcaaaaagaaattgaccgcctcaatgaggtcgctaaaaatttaaatgaatcactcattgaccttcaagaattgggaaaatatgagcaatatattaaatggccttggtatgtttggctcggcttcattgctggactaattgccatcgtcatggttacaatcttgctttgttgcatgactagttgttgcagttgcctcaagggtgcatgctcttgtggttcttgctgcaagtttgatgaggatgactctgagccagttctcaagggtgtcaaattacattacacataaacgaacttatggatttgtttatgagattttttactcttggatcaattactgcacagccagtaaaaattgacaatgcttctcctgcaagtactgttcatgctacagcaacgataccgctacaagcctcactccctttcggatggcttgttattggcgttgcatttcttgctgtttttcagagcgctaccaaaataattgcgctcaataaaagatggcagctagccctttataagggcttccagttcatttgcaatttactgctgctatttgttaccatctattcacatcttttgcttgtcgctgcaggtatggaggcgcaatttttgtacctctatgccttgatatattttctacaatgcatcaacgcatgtagaattattatgagatgttggctttgttggaagtgcaaatccaagaacccattactttatgatgccaactactttgtttgctggcacacacataactatgactactgtataccatataacagtgtcacagatacaattgtcgttactgaaggtgacggcatttcaacaccaaaactcaaagaagactaccaaattggtggttattctgaggataggcactcaggtgttaaagactatgtcgttgtacatggctatttcaccgaagtttactaccagcttgagtctacacaaattactacagacactggtattgaaaatgctacattcttcatctttaacaagcttgttaaagacccaccgaatgtgcaaatacacacaatcgacggctcttcaggagttgctaatccagcaatggatccaatttatgatgagccgacgacgactactagcgtgcctttgtaagcacaagaaagtgagtacgaacttatgtactcattcgtttcggaagaaacaggtacgttaatagttaatagcgtacttctttttcttgctttcgtggtattcttgctagtcacactagccatccttactgcgcttcgattgtgtgcgtactgctgcaatattgttaacgtgagtttagtaaaaccaacggtttacgtctactcgcgtgttaaaaatctgaactcttctgaaggagttcctgatcttctggtctaaacgaactaactattattattattctgtttggaactttaacattgcttatcatggcagacaacggtactattaccgttgaggagcttaaacaactcctggaacaatggaacctagtaataggtttcctattcctagcctggattatgttactacaatttgcctattctaatcggaacaggtttttgtacataataaagcttgttttcctctggctcttgtggccagtaacacttgcttgttttgtgcttgctgctgtctacagaattaattgggtgactggcgggattgcgattgcaatggcttgtattgtaggcttgatgtggcttagctacttcgttgcttccttcaggctgtttgctcgtacccgctcaatgtggtcattcaacccagaaacaaacattcttctcaatgtgcctctccgggggacaattgtgaccagaccgctcatggaaagtgaacttgtcattggtgctgtgatcattcgtggtcacttgcgaatggccggacactccctagggcgctgtgacattaaggacctgccaaaagagatcactgtggctacatcacgaacgctttcttattacaaattaggagcgtcgcagcgtgtaggcactgattcaggttttgctgcatacaaccgctaccgtattggaaactataaattaaatacagaccacgccggtagcaacgacaatattgctttgctagtacagtaagtgacaacagatgtttcatcttgttgacttccaggttacaatagcagagatattgattatcattatgaggactttcaggattgctatttggaatcttgacgttataataagttcaatagtgagacaattatttaagcctctaactaagaagaattattcggagttagatgatgaagaacctatggagttagattatccataaaacgaacatgaaaattattctcttcctgacattgattgtatttacatcttgcgagctatatcactatcaggagtgtgttagaggtacgactgtactactaaaagaaccttgcccatcaggaacatacgagggcaattcaccatttcaccctcttgctgacaataaatttgcactaacttgcactagcacacactttgcttttgcttgtgctgacggtactcgacatacctatcagctgcgtgcaagatcagtttcaccaaaacttttcatcagacaagaggaggttcaacaagagctctactcgccactttttctcattgttgctgctctagtatttttaatactttgcttcaccattaagagaaagacagaatgaatgagctcactttaattgacttctatttgtgctttttagcctttctgctattccttgttttaataatgcttattatattttggttttcactcgaaatccaggatctagaagaaccttgtaccaaagtctaaacgaacatgaaacttctcattgttttgacttgtatttctctatgcagttgcatacgcactgtagtacagcgctgtgcatctaataaacctcatgtgcttgaagatccttgtaaggtacaacactaggggtaatacttatagcactgcttggctttgtgctctaggaaaggttttaccttttcatagatggcacactatggttcaaacatgcacacctaatgttactatcaactgtcaagatccagctggtggtgcgcttatagctaggtgttggtaccttcatgaaggtcaccaaactgctgcatttagagacgtacttgttgttttaaataaacgaacaaattaaaatgtctgataatggaccccaatcaaaccaacgtagtgccccccgcattacatttggtggacccacagattcaactgacaataaccagaatggaggacgcaatggggcaaggccaaaacagcgccgaccccaaggtttacccaataatactgcgtcttggttcacagctctcactcagcatggcaaggaggaacttagattccctcgaggccagggcgttccaatcaacaccaatagtggtccagatgaccaaattggctactaccgaagagctacccgacgagttcgtggtggtgacggcaaaatgaaagagctcagccccagatggtacttctattacctaggaactggcccagaagcttcacttccctacggcgctaacaaagaaggcatcgtatgggttgcaactgagggagccttgaatacacccaaagaccacattggcacccgcaatcctaataacaatgctgccaccgtgctacaacttcctcaaggaacaacattgccaaaaggcttctacgcagagggaagcagaggcggcagtcaagcctcttctcgctcctcatcacgtagtcgcggtaattcaagaaattcaactcctggcagcagtaggggaaattctcctgctcgaatggctagcggaggtggtgaaactgccctcgcgctattgctgctagacagattgaaccagcttgagagcaaagtttctggtaaaggccaacaacaacaaggccaaactgtcactaagaaatctgctgctgaggcatctaaaaagcctcgccaaaaacgtactgccacaaaacagtacaacgtcactcaagcatttgggagacgtggtccagaacaaacccaaggaaatttcggggaccaagacctaatcagacaaggaactgattacaaacattggccgcaaattgcacaatttgctccaagtgcctctgcattctttggaatgtcacgcattggcatggaagtcacaccttcgggaacatggctgacttatcatggagccattaaattggatgacaaagatccacaattcaaagacaacgtcatactgctgaacaagcacattgacgcatacaaaacattcccaccaacagagcctaaaaa

SEQ ID NO: 29743 - DNA, 433 bp, SARS Coronavirus
  misc_feature 424: n = A,T,C or G
cagagccatgcctaacatgcttaggataatggcctctcttgttcttgctcgcaaacataacacttgctgtaacttatcacaccgtttctacaggttagctaacgagtgtgcgcaagtattaagtgagatggtcatgtgtggcggctcactatatgttaaaccaggtggaacatcatccggtgatgctacaactgcttatgctaatagtgtctttaacatttgtcaagctgttacagccaatgtaaatgcacttctttcaactgatggtaataagatagctgacaagtatgtccgcaatctacaacacaggctctatgagtgtctctatagaaatagggatgttgatcatgaattcgtggatgagttttacgcttacctgcgtaaacatttctccatgatgattctttctgatgatggtgtttgngtgttaaac

SEQ ID NO: 29744 - DNA, 29742 bp, SARS Coronavirus
atattaggtttttacctacccaggaaaagccaaccaacctcgatctcttgtagatctgttctctaaacgaactttaaaatctgtgtagctgtcgctcggctgcatgcctagtgcacctacgcagtataaacaataataaattttactgtcgttgacaagaaacgagtaactcgtccctcttctgcagactgcttacggtttcgtccgtgttgcagtcgatcatcagcatacctaggtttcgtccgggtgtgaccgaaaggtaagatggagagccttgttcttggtgtcaacgagaaaacacacgtccaactcagtttgcctgtccttcaggttagagacgtgctagtgcgtggcttcggggactctgtggaagaggccctatcggaggcacgtgaacacctcaaaaatggcacttgtggtctagtagagctggaaaaaggcgtactgccccagcttgaacagccctatgtgttcattaaacgttctgatgccttaagcaccaatcacggccacaaggtcgttgagctggttgcagaaatggacggcattcagtacggtcgtagcggtataacactgggagtactcgtgccacatgtgggcgaaaccccaattgcataccgcaatgttcttcttcgtaagaacggtaataagggagccggtggtcatagctatggcatcgatctaaagtcttatgacttaggtgacgagcttggcactgatcccattgaagattatgaacaaaactggaacactaagcatggcagtggtgcactccgtgaactcactcgtgagctcaatggaggtgcagtcactcgctatgtcgacaacaatttctgtggcccagatgggtaccctcttgattgcatcaaagattttctcgcacgcgcgggcaagtcaatgtgcactctttccgaacaacttgattacatcgagtcgaagagaggtgtctactgctgccgtgaccatgagcatgaaattgcctggttcactgagcgctctgataagagctacgagcaccagacacccttcgaaattaagagtgccaagaaatttgacactttcaaaggggaatgcccaaagtttgtgtttcctcttaactcaaaagtcaaagtcattcaaccacgtgttgaaaagaaaaagactgagggtttcatggggcgtatacgctctgtgtaccctgttgcatctccacaggagtgtaacaatatgcacttgtctaccttgatgaaatgtaatcattgcgatgaagtttcatggcagacgtgcgactttctgaaagccacttgtgaacattgtggcactgaaaatttagttattgaaggacctactacatgtgggtacctacctactaatgctgtagtgaaaatgccatgtcctgcctgtcaagacccagagattggacctgagcatagtgttgcagattatcacaaccactcaaacattgaaactcgactccgcaagggaggtaggactagatgttttggaggctgtgtgtttgcctatgttggctgctataataagcgtgcctactgggttcctcgtgctagtgctgatattggctcaggccatactggcattactggtgacaatgtggagaccttgaatgaggatctccttgagatactgagtcgtgaacgtgttaacattaacattgttggcgattttcatttgaatgaagaggttgccatcattttggcatctttctctgcttctacaagtgcctttattgacactataaagagtcttgattacaagtctttcaaaaccattgttgagtcctgcggtaactataaagttaccaagggaaagcccgtaaaaggtgcttggaacattggacaacagagatcagttttaacaccactgtgtggttttccctcacaggctgctggtgttatcagatcaatttttgcgcgcacacttgatgcagcaaaccactcaattcctgatttgcaaagagcagctgtcaccatacttgatggtatttctgaacagtcattacgtcttgtcgacgccatggtttatacttcagacctgctcaccaacagtgtcattattatggcatatgtaactggtggtcttgtacaacagacttctcagtggttgtctaatcttttgggcactactgttgaaaaactcaggcctatctttgaatggattgaggcgaaacttagtgcaggagttgaatttctcaaggatgcttgggagattctcaaatttctcattacaggtgtttttgacatcgtcaagggtcaaatacaggttgcttcagataacatcaaggattgtgtaaaatgcttcattgatgttgttaacaaggcactcgaaatgtgcattgatcaagtcactatcgctggcgcaaagttgcgatcactcaacttaggtgaagtcttcatcgctcaaagcaagggactttaccgtcagtgtatacgtggcaaggagcagctgcaactactcatgcctcttaaggcaccaaaagaagtaacctttcttgaaggtgattcacatgacacagtacttacctctgaggaggttgttctcaagaacggtgaactcgaagcactcgagacgcccgttgatagcttcacaaatggagctatcgtcggcacaccagtctgtgtaaatggcctcatgctcttagagattaaggacaaagaacaatactgcgcattgtctcctggtttactggctacaaacaatgtctttcgcttaaaagggggtgcaccaattaaaggtgtaacctttggagaagatactgtttgggaagttcaaggttacaagaatgtgagaatcacatttgagcttgatgaacgtgttgacaaagtgcttaatgaaaagtgctctgtctacactgttgaatccggtaccgaagttactgagtttgcatgtgttgtagcagaggctgttgtgaagactttacaaccagtttctgatctccttaccaacatgggtattgatcttgatgagtggagtgtagctacattctacttatttgatgatgctggtgaagaaaacttttcatcacgtatgtattgttccttttaccctccagatgaggaagaagaggacgatgcagagtgtgaggaagaagaaattgatgaaacctgtgaacatgagtacggtacagaggatgattatcaaggtctccctctggaatttggtgcctcagctgaaacagttcgagttgaggaagaagaagaggaagactggctggatgatactactgagcaatcagagattgagccagaaccagaacctacacctgaagaaccagttaatcagtttactggttatttaaaacttactgacaatgttgccattaaatgtgttgacatcgttaaggaggcacaaagtgctaatcctatggtgattgtaaatgctgctaacatacacctgaaacatggtggtggtgtagcaggtgcactcaacaaggcaaccaatggtgccatgcaaaaggagagtgatgattacattaagctaaatggccctcttacagtaggagggtcttgtttgctttctggacataatcttgctaagaagtgtctgcatgttgttggacctaacctaaatgcaggtgaggacatccagcttcttaaggcagcatatgaaaatttcaattcacaggacatcttacttgcaccattgttgtcagcaggcatatttggtgctaaaccacttcagtctttacaagtgtgcgtgcagacggttcgtacacaggtttatattgcagtcaatgacaaagctctttatgagcaggttgtcatggattatcttgataacctgaagcctagagtggaagcacctaaacaagaggagccaccaaacacagaagattccaaaactgaggagaaatctgtcgtacagaagcctgtcgatgtgaagccaaaaattaaggcctgcattgatgaggttaccacaacactggaagaaactaagtttcttaccaataagttactcttgtttgctgatatcaatggtaagctttaccatgattctcagaacatgcttagaggtgaagatatgtctttccttgagaaggatgcaccttacatggtaggtgatgttatcactagtggtgatatcacttgtgttgtaataccctccaaaaaggctggtggcactactgagatgctctcaagagctttgaagaaagtgccagttgatgagtatataaccacgtaccctggacaaggatgtgctggttatacacttgaggaagctaagactgctcttaagaaatgcaaatctgcattttatgtactaccttcagaagcacctaatgctaaggaagagattctaggaactgtatcctggaatttgagagaaatgcttgctcatgctgaagagacaagaaaattaatgcctatatgcatggatgttagagccataatggcaaccatccaacgtaagtataaaggaattaaaattcaagagggcatcgttgactatggtgtccgattcttcttttatactagtaaagagcctgtagcttctattattacgaagctgaactctctaaatgagccgcttgtcacaatgccaattggttatgtgacacatggttttaatcttgaagaggctgcgcgctgtatgcgttctcttaaagctcctgccgtagtgtcagtatcatcaccagatgctgttactacatataatggatacctcacttcgtcatcaaagacatctgaggagcactttgtagaaacagtttctttggctggctcttacagagattggtcctattcaggacagcgtacagagttaggtgttgaatttcttaagcgtggtgacaaaattgtgtaccacactctggagagccccgtcgagtttcatcttgacggtgaggttctttcacttgacaaactaaagagtctcttatccctgcgggaggttaagactataaaagtgttcacaactgtggacaacactaatctccacacacagcttgtggatatgtctatgacatatggacagcagtttggtccaacatacttggatggtgctgatgttacaaaaattaaacctcatgtaaatcatgagggtaagactttctttgtactacctagtgatgacacactacgtagtgaagctttcgagtactaccatactcttgatgagagttttcttggtaggtacatgtctgctttaaaccacacaaagaaatggaaatttcctcaagttggtggtttaacttcaattaaatgggctgataacaattgttatttgtctagtgttttattagcacttcaacagcttgaagtcaaattcaatgcaccagcacttcaagaggcttattatagagcccgtgctggtgatgctgctaacttttgtgcactcatactcgcttacagtaataaaactgttggcgagcttggtgatgtcagagaaactatgacccatcttctacagcatgctaatttggaatctgcaaagcgagttcttaatgtggtgtgtaaacattgtggtcagaaaactactaccttaacgggtgtagaagctgtgatgtatatgggtactctatcttatgataatcttaagacaggtgtttccattccatgtgtgtgtggtcgtgatgctacacaatatctagtacaacaagagtcttcttttgttatgatgtctgcaccacctgctgagtataaattacagcaaggtacattcttatgtgcgaatgagtacactggtaactatcagtgtggtcattacactcatataactgctaaggagaccctctatcgtattgacggagctcaccttacaaagatgtcagagtacaaaggaccagtgactgatgttttctacaaggaaacatcttacactacaaccatcaagcctgtgtcgtataaactcgatggagttacttacacagagattgaaccaaaattggatgggtattataaaaaggataatgcttactatacagagcagcctatagaccttgtaccaactcaaccattaccaaatgcgagttttgataatttcaaactcacatgttctaacacaaaatttgctgatgatttaaatcaaatgacaggcttcacaaagccagcttcacgagagctatctgtcacattcttcccagacttgaatggcgatgtagtggctattgactatagacactattcagcgagtttcaagaaaggtgctaaattactgcataagccaattgtttggcacattaaccaggctacaaccaagacaacgttcaaaccaaacacttggtgtttacgttgtctttggagtacaaagccagtagatacttcaaattcatttgaagttctggcagtagaagacacacaaggaatggacaatcttgcttgtgaaagtcaacaacccacctctgaagaagtagtggaaaatcctaccatacagaaggaagtcatagagtgtgacgtgaaaactaccgaagttgtaggcaatgtcatacttaaaccatcagatgaaggtgttaaagtaacacaagagttaggtcatgaggatcttatggctgcttatgtggaaaacacaagcattaccattaagaaacctaatgagctttcactagccttaggtttaaaaacaattgccactcatggtattgctgcaattaatagtgttccttggagtaaaattttggcttatgtcaaaccattcttaggacaagcagcaattacaacatcaaattgcgctaagagattagcacaacgtgtgtttaacaattatatgccttatgtgtttacattattgttccaattgtgtacttttactaaaagtaccaattctagaattagagcttcactacctacaactattgctaaaaatagtgttaagagtgttgctaaattatgtttggatgccggcattaattatgtgaagtcacccaaattttctaaattgttcacaatcgctatgtggctattgttgttaagtatttgcttaggttctctaatctgtgtaactgctgcttttggtgtactcttatctaattttggtgctccttcttattgtaatggcgttagagaattgtatcttaattcgtctaacgttactactatggatttctgtgaaggttcttttccttgcagcatttgtttaagtggattagactcccttgattcttatccagctcttgaaaccattcaggtgacgatttcatcgtacaagctagacttgacaattttaggtctggccgctgagtgggttttggcatatatgttgttcacaaaattcttttatttattaggtctttcagctataatgcaggtgttctttggctattttgctagtcatttcatcagcaattcttggctcatgtggtttatcattagtattgtacaaatggcacccgtttctgcaatggttaggatgtacatcttctttgcttctttctactacatatggaagagctatgttcatatcatggatggttgcacctcttcgacttgcatgatgtgctataagcgcaatcgtgccacacgcgttgagtgtacaactattgttaatggcatgaagagatctttctatgtctatgcaaatggaggccgtggcttctgcaagactcacaattggaattgtctcaattgtgacacattttgcactggtagtacattcattagtgatgaagttgctcgtgatttgtcactccagtttaaaagaccaatcaaccctactgaccagtcatcgtatattgttgatagtgttgctgtgaaaaatggcgcgcttcacctctactttgacaaggctggtcaaaagacctatgagagacatccgctctcccattttgtcaatttagacaatttgagagctaacaacactaaaggttcactgcctattaatgtcatagtttttgatggcaagtccaaatgcgacgagtctgcttctaagtctgcttctgtgtactacagtcagctgatgtgccaacctattctgttgcttgaccaagctcttgtatcaaacgttggagatagtactgaagtttccgttaagatgtttgatgcttatgtcgacaccttttcagcaacttttagtgttcctatggaaaaacttaaggcacttgttgctacagctcacagcgagttagcaaagggtgtagctttagatggtgtcctttctacattcgtgtcagctgcccgacaaggtgttgttgataccgatgttgacacaaaggatgttattgaatgtctcaaactttcacatcactctgacttagaagtgacaggtgacagttgtaacaatttcatgctcacctataataaggttgaaaacatgacgcccagagatcttggcgcatgtattgactgtaatgcaaggcatatcaatgcccaagtagcaaaaagtcacaatgtttcactcatctggaatgtaaaagactacatgtctttatctgaacagctgcgtaaacaaattcgtactgctgccaagaagaacaacataccttttacactaacttgtgctacaactagacaggttgtcaatgtcataactactaaaatctcactcaagggtggtaagattgttagtacttgttttaaacttatgcttaaggccacattattgtgcgttcttgctgcattggtttgttatatcgttatgccagtacatacattgtcaatccatgatggttacacaaatgaaatcattggttacaaagccattcaggatggtgtcactcgtgacatcatttctactgatgattgttttgcaaataaacatgctggttttgacgcatggtttagccagcgtggtggttcatacaaaaatgacaaaagctgccctgtagtagctgctatcattacaagagagattggtttcatagtgcctggcttaccgggtactgtgctgagagcaatcaatggtgacttcttgcattttctacctcgtgtttttagtgctgttggcaacatttgctacacaccttccaaactcattgagtatagtgattttgctacctctgcttgcgttcttgctgctgagtgtacaatttttaaggatgctatgggcaaacctgtgccatattgttatgacactaatttgctagagggttctatttcttatagtgagcttcgtccagacactcgttatgtgcttatggatggttccatcatacagtttcctaacacttacctggagggttctgttagagtagtaacaacttttgatgctgagtactgtagacatggtacatgcgaaaggtcagaagtaggtatttgcctatctaccagtggtagatgggttcttaataatgagcattacagagctctatcaggagttttctgtggtgttgatgcgatgaatctcatagctaacatctttactcctcttgtgcaacctgtgggtgctttagatgtgtctgcttcagtagtggctggtggtattattgccatattggtgacttgtgctgcctactactttatgaaattcagacgtgtttttggtgagtacaaccatgttgttgctgctaatgcacttttgtttttgatgtctttcactatactctgtctggtaccagcttacagctttctgccgggagtctactcagtcttttacttgtacttgacattctatttcaccaatgatgtttcattcttggctcaccttcaatggtttgccatgttttctcctattgtgcctttttggataacagcaatctatgtattctgtatttctctgaagcactgccattggttctttaacaactatcttaggaaaagagtcatgtttaatggagttacatttagtaccttcgaggaggctgctttgtgtacctttttgctcaacaaggaaatgtacctaaaattgcgtagcgagacactgttgccacttacacagtataacaggtatcttgctctatataacaagtacaagtatttcagtggagccttagatactaccagctatcgtgaagcagcttgctgccacttagcaaaggctctaaatgactttagcaactcaggtgctgatgttctctaccaaccaccacagacatcaatcacttctgctgttctgcagagtggttttaggaaaatggcattcccgtcaggcaaagttgaagggtgcatggtacaagtaacctgtggaactacaactcttaatggattgtggttggatgacacagtatactgtccaagacatgtcatttgcacagcagaagacatgcttaatcctaactatgaagatctgctcattcgcaaatccaaccatagctttcttgttcaggctggcaatgttcaacttcgtgttattggccattctatgcaaaattgtctgcttaggcttaaagttgatacttctaaccctaagacacccaagtataaatttgtccgtatccaacctggtcaaacattttcagttctagcatgctacaatggttcaccatctggtgtttatcagtgtgccatgagacctaatcataccattaaaggttctttccttaatggatcatgtggtagtgttggttttaacattgattatgattgcgtgtctttctgctatatgcatcatatggagcttccaacaggagtacacgctggtactgacttagaaggtaaattctatggtccatttgttgacagacaaactgcacaggctgcaggtacagacacaaccataacattaaatgttttggcatggctgtatgctgctgttatcaatggtgataggtggtttcttaatagattcaccactactttgaatgactttaaccttgtggcaatgaagtacaactatgaacctttgacacaagatcatgttgacatattgggacctctttctgctcaaacaggaattgccgtcttagatatgtgtgctgctttgaaagagctgctgcagaatggtatgaatggtcgtactatccttggtagcactattttagaagatgagtttacaccatttgatgttgttagacaatgctctggtgttaccttccaaggtaagttcaagaaaattgttaagggcactcatcattggatgcttttaactttcttgacatcactattgattcttgttcaaagtacacagtggtcactgtttttctttgtttacgagaatgctttcttgccatttactcttggtattatggcaattgctgcatgtgctatgctgcttgttaagcataagcacgcattcttgtgcttgtttctgttaccttctcttgcaacagttgcttactttaatatggtctacatgcctgctagctgggtgatgcgtatcatgacatggcttgaattggctgacactagcttgtctggttataggcttaaggattgtgttatgtatgcttcagctttagttttgcttattctcatgacagctcgcactgtttatgatgatgctgctagacgtgtttggacactgatgaatgtcattacacttgtttacaaagtctactatggtaatgctttagatcaagctatttccatgtgggccttagttatttctgtaacctctaactattctggtgtcgttacgactatcatgtttttagctagagctatagtgtttgtgtgtgttgagtattacccattgttatttattactggcaacaccttacagtgtatcatgcttgtttattgtttcttaggctattgttgctgctgctactttggccttttctgtttactcaaccgttacttcaggcttactcttggtgtttatgactacttggtctctacacaagaatttaggtatatgaactcccaggggcttttgcctcctaagagtagtattgatgctttcaagcttaacattaagttgttgggtattggaggtaaaccatgtatcaaggttgctactgtacagtctaaaatgtctgacgtaaagtgcacatctgtggtactgctctcggttcttcaacaacttagagtagagtcatcttctaaattgtgggcacaatgtgtacaactccacaatgatattcttcttgcaaaagacacaactgaagctttcgagaagatggtttctcttttgtctgttttgctatccatgcagggtgctgtagacattaataggttgtgcgaggaaatgctcgataaccgtgctactcttcaggctattgcttcagaatttagttctttaccatcatatgccgcttatgccactgcccaggaggcctatgagcaggctgtagctaatggtgattctgaagtcgttctcaaaaagttaaagaaatctttgaatgtggctaaatctgagtttgaccgtgatgctgccatgcaacgcaagttggaaaagatggcagatcaggctatgacccaaatgtacaaacaggcaagatctgaggacaagagggcaaaagtaactagtgctatgcaaacaatgctcttcactatgcttaggaagcttgataatgatgcacttaacaacattatcaacaatgcgcgtgatggttgtgttccactcaacatcataccattgactacagcagccaaactcatggttgttgtccctgattatggtacctacaagaacacttgtgatggtaacacctttacatatgcatctgcactctgggaaatccagcaagttgttgatgcggatagcaagattgttcaacttagtgaaattaacatggacaattcaccaaatttggcttggcctcttattgttacagctctaagagccaactcagctgttaaactacagaataatgaactgagtccagtagcactacgacagatgtcctgtgcggctggtaccacacaaacagcttgtactgatgacaatgcacttgcctactataacaattcgaagggaggtaggtttgtgctggcattactatcagaccaccaagatctcaaatgggctagattccctaagagtgatggtacaggtacaatttacacagaactggaaccaccttgtaggtttgttacagacacaccaaaagggcctaaagtgaaatacttgtacttcatcaaaggcttaaacaacctaaatagaggtatggtgctgggcagtttagctgctacagtacgtcttcaggctggaaatgctacagaagtacctgccaattcaactgtgctttccttctgtgcttttgcagtagaccctgctaaagcatataaggattacctagcaagtggaggacaaccaatcaccaactgtgtgaagatgttgtgtacacacactggtacaggacaggcaattactgtaacaccagaagctaacatggaccaagagtcctttggtggtgcttcatgttgtctgtattgtagatgccacattgaccatccaaatcctaaaggattctgtgacttgaaaggtaagtacgtccaaatacctaccacttgtgctaatgacccagtgggttttacacttagaaacacagtctgtaccgtctgcggaatgtggaaaggttatggctgtagttgtgaccaactccgcgaacccttgatgcagtctgcggatgcatcaacgtttttaaacgggtttgcggtgtaagtgcagcccgtcttacaccgtgcggcacaggcactagtactgatgtcgtctacagggcttttgatatttacaacgaaaaaagtgctggttttgcaaagttcctaaaaactaattgctgtcgcttccaggagaaggatgaggaaggcaatttattagactcttactttgtagttaagaggcatactatgtctaactaccaacatgaagagactatttataacttggttaaagattgtccagcggttgctgtccatgactttttcaagtttagagtagatggtgacatggtaccacatatatcacgtcagcgtctaactaaatacacaatggctgatttagtctatgctctacgtcattttgatgagggtaattgtgatacattaaaagaaatactcgtcacatacaattgctgtgatgatgattatttcaataagaaggattggtatgacttcgtagagaatcctgacatcttacgcgtatatgctaacttaggtgagcgtgtacgccaatcattattaaagactgtacaattctgcgatgctatgcgtgatgcaggcattgtaggcgtactgacattagataatcaggatcttaatgggaactggtacgatttcggtgatttcgtacaagtagcaccaggctgcggagttcctattgtggattcatattactcattgctgatgcccatcctcactttgactagggcattggctgctgagtcccatatggatgctgatctcgcaaaaccacttattaagtgggatttgctgaaatatgattttacggaagagagactttgtctcttcgaccgttattttaaatattgggaccagacataccatcccaattgtattaactgtttggatgataggtgtatccttcattgtgcaaactttaatgtgttattttctactgtgtttccacctacaagttttggaccactagtaagaaaaatatttgtagatggtgttccttttgttgtttcaactggataccattttcgtgagttaggagtcgtacataatcaggatgtaaacttacatagctcgcgtctcagtttcaaggaacttttagtgtatgctgctgatccagctatgcatgcagcttctggcaatttattgctagataaacgcactacatgcttttcagtagctgcactaacaaacaatgttgcttttcaaactgtcaaacccggtaattttaataaagacttttatgactttgctgtgtctaaaggtttctttaaggaaggaagttctgttgaactaaaacacttcttctttgctcaggatggcaacgctgctatcagtgattatgactattatcgttataatctgccaacaatgtgtgatatcagacaactcctattcgtagttgaagttgttgataaatactttgattgttacgatggtggctgtattaatgccaaccaagtaatcgttaacaatctggataaatcagctggtttcccatttaataaatggggtaaggctagactttattatgactcaatgagttatgaggatcaagatgcacttttcgcgtatactaagcgtaatgtcatccctactataactcaaatgaatcttaagtatgccattagtgcaaagaatagagctcgcaccgtagctggtgtctctatctgtagtactatgacaaatagacagtttcatcagaaattattgaagtcaatagccgccactagaggagctactgtggtaattggaacaagcaagttttacggtggctggcataatatgttaaaaactgtttacagtgatgtagaaactccacaccttatgggttgggattatccaaaatgtgacagagccatgcctaacatgcttaggataatggcctctcttgttcttgctcgcaaacataacacttgctgtaacttatcacaccgtttctacaggttagctaacgagtgtgcgcaagtattaagtgagatggtcatgtgtggcggctcactatatgttaaaccaggtggaacatcatccggtgatgctacaactgcttatgctaatagtgtctttaacatttgtcaagctgttacagccaatgtaaatgcacttctttcaactgatggtaataagatagctgacaagtatgtccgcaatctacaacacaggctctatgagtgtctctatagaaatagggatgttgatcatgaattcgtggatgagttttacgcttacctgcgtaaacatttctccatgatgattctttctgatgatgccgttgtgtgctataacagtaactatgcggctcaaggtttagtagctagcattaagaactttaaggcagttctttattatcaaaataatgtgttcatgtctgaggcaaaatgttggactgagactgaccttactaaaggacctcacgaattttgctcacagcatacaatgctagttaaacaaggagatgattacgtgtacctgccttacccagatccatcaagaatattaggcgcaggctgttttgtcgatgatattgtcaaaacagatggtacacttatgattgaaaggttcgtgtcactggctattgatgcttacccacttacaaaacatcctaatcaggagtatgctgatgtctttcacttgtatttacaatacattagaaagttacatgatgagcttactggccacatgttggacatgtattccgtaatgctaactaatgataacacctcacggtactgggaacctgagttttatgaggctatgtacacaccacatacagtcttgcaggctgtaggtgcttgtgtattgtgcaattcacagacttcacttcgttgcggtgcctgtattaggagaccattcctatgttgcaagtgctgctatgaccatgtcatttcaacatcacacaaattagtgttgtctgttaatccctatgtttgcaatgccccaggttgtgatgtcactgatgtgacacaactgtatctaggaggtatgagctattattgcaagtcacataagcctcccattagttttccattatgtgctaatggtcaggtttttggtttatacaaaaacacatgtgtaggcagtgacaatgtcactgacttcaatgcgatagcaacatgtgattggactaatgctggcgattacatacttgccaacacttgtactgagagactcaagcttttcgcagcagaaacgctcaaagccactgaggaaacatttaagctgtcatatggtattgccactgtacgcgaagtactctctgacagagaattgcatctttcatgggaggttggaaaacctagaccaccattgaacagaaactatgtctttactggttaccgtgtaactaaaaatagtaaagtacagattggagagtacacctttgaaaaaggtgactatggtgatgctgttgtgtacagaggtactacgacatacaagttgaatgttggtgattactttgtgttgacatctcacactgtaatgccacttagtgcacctactctagtgccacaagagcactatgtgagaattactggcttgtacccaacactcaacatctcagatgagttttctagcaatgttgcaaattatcaaaaggtcggcatgcaaaagtactctacactccaaggaccacctggtactggtaagagtcattttgccatcggacttgctctctattacccatctgctcgcatagtgtatacggcatgctctcatgcagctgttgatgccctatgtgaaaaggcattaaaatatttgcccatagataaatgtagtagaatcatacctgcgcgtgcgcgcgtagagtgttttgataaattcaaagtgaattcaacactagaacagtatgttttctgcactgtaaatgcattgccagaaacaactgctgacattgtagtctttgatgaaatctctatggctactaattatgacttgagtgttgtcaatgctagacttcgtgcaaaacactacgtctatattggcgatcctgctcaattaccagccccccgcacattgctgactaaaggcacactagaaccagaatattttaattcagtgtgcagacttatgaaaacaataggtccagacatgttccttggaacttgtcgccgttgtcctgctgaaattgttgacactgtgagtgctttagtttatgacaataagctaaaagcacacaaggataagtcagctcaatgcttcaaaatgttctacaaaggtgttattacacatgatgtttcatctgcaatcaacagacctcaaataggcgttgtaagagaatttcttacacgcaatcctgcttggagaaaagctgtttttatctcaccttataattcacagaacgctgtagcttcaaaaatcttaggattgcctacgcagactgttgattcatcacagggttctgaatatgactatgtcatattcacacaaactactgaaacagcacactcttgtaatgtcaaccgcttcaatgtggctatcacaagggcaaaaattggcattttgtgcataatgtctgatagagatctttatgacaaactgcaatttacaagtctagaaataccacgtcgcaatgtggctacattacaagcagaaaatgtaactggactttttaaggactgtagtaagatcattactggtcttcatcctacacaggcacctacacacctcagcgttgatataaaattcaagactgaaggattatgtgttgacataccaggcataccaaaggacatgacctaccgtagactcatctctatgatgggtttcaaaatgaattaccaagtcaatggttaccctaatatgtttatcacccgcgaagaagctattcgtcacgttcgtgcgtggattggctttgatgtagagggctgtcatgcaactagagatgctgtgggtactaacctacctctccagctaggattttctacaggtgttaacttagtagctgtaccgactggttatgttgacactgaaaataacacagaattcaccagagttaatgcaaaacctccaccaggtgaccagtttaaacatcttataccactcatgtataaaggcttgccctggaatgtagtgcgtattaagatagtacaaatgctcagtgatacactgaaaggattgtcagacagagtcgtgttcgtcctttgggcgcatggctttgagcttacatcaatgaagtactttgtcaagattggacctgaaagaacgtgttgtctgtgtgacaaacgtgcaacttgcttttctacttcatcagatacttatgcctgctggaatcattctgtgggttttgactatgtctataacccatttatgattgatgttcagcagtggggctttacgggtaaccttcagagtaaccatgaccaacattgccaggtacatggaaatgcacatgtggctagttgtgatgctatcatgactagatgtttagcagtccatgagtgctttgttaagcgcgttgattggtctgttgaataccctattataggagatgaactgagggttaattctgcttgcagaaaagtacaacacatggttgtgaagtctgcattgcttgctgataagtttccagttcttcatgacattggaaatccaaaggctatcaagtgtgtgcctcaggctgaagtagaatggaagttctacgatgctcagccatgtagtgacaaagcttacaaaatagaggaactcttctattcttatgctacacatcacgataaattcactgatggtgtttgtttgttttggaattgtaacgttgatcgttacccagccaatgcaattgtgtgtaggtttgacacaagagtcttgtcaaacttgaacttaccaggctgtgatggtggtagtttgtatgtgaataagcatgcattccacactccagctttcgataaaagtgcatttactaatttaaagcaattgcctttcttttactattctgatagtccttgtgagtctcatggcaaacaagtagtgtcggatattgattatgttccactcaaatctgctacgtgtattacacgatgcaatttaggtggtgctgtttgcagacaccatgcaaatgagtaccgacagtacttggatgcatataatatgatgatttctgctggatttagcctatggatttacaaacaatttgatacttataacctgtggaatacatttaccaggttacagagtttagaaaatgtggcttataatgttgttaataaaggacactttgatggacacgccggcgaagcacctgtttccatcattaataatgctgtttacacaaaggtagatggtattgatgtggagatctttgaaaataagacaacacttcctgttaatgttgcatttgagctttgggctaagcgtaacattaaaccagtgccagagattaagatactcaataatttgggtgttgatatcgctgctaatactgtaatctgggactacaaaagagaagccccagcacatgtatctacaataggtgtctgcacaatgactgacattgccaagaaacctactgagagtgcttgttcttcacttactgtcttgtttgatggtagagtggaaggacaggtagacctttttagaaacgcccgtaatggtgttttaataacagaaggttcagtcaaaggtctaacaccttcaaagggaccagcacaagctagcgtcaatggagtcacattaattggagaatcagtaaaaacacagtttaactactttaagaaagtagacggcattattcaacagttgcctgaaacctactttactcagagcagagacttagaggattttaagcccagatcacaaatggaaactgactttctcgagctcgctatggatgaattcatacagcgatataagctcgagggctatgccttcgaacacatcgtttatggagatttcagtcatggacaacttggcggtcttcatttaatgataggcttagccaagcgctcacaagattcaccacttaaattagaggattttatccctatggacagcacagtgaaaaattacttcataacagatgcgcaaacaggttcatcaaaatgtgtgtgttctgtgattgatcttttacttgatgactttgtcgagataataaagtcacaagatttgtcagtgatttcaaaagtggtcaaggttacaattgactatgctgaaatttcattcatgctttggtgtaaggatggacatgttgaaaccttctacccaaaactacaagcaagtcaagcgtggcaaccaggtgttgcgatgcctaacttgtacaagatgcaaagaatgcttcttgaaaagtgtgaccttcagaattatggtgaaaatgctgttataccaaaaggaataatgatgaatgtcgcaaagtatactcaactgtgtcaatacttaaatacacttactttagctgtaccctacaacatgagagttattcactttggtgctggctctgataaaggagttgcaccaggtacagctgtgctcagacaatggttgccaactggcacactacttgtcgattcagatcttaatgacttcgtctccgacgcagattctactttaattggagactgtgcaacagtacatacggctaataaatgggaccttattattagcgatatgtatgaccctaggaccaaacatgtgacaaaagagaatgactctaaagaagggtttttcacttatctgtgtggatttataaagcaaaaactagccctgggtggttctatagctgtaaagataacagagcattcttggaatgctgacctttacaagcttatgggccatttctcatggtggacagcttttgttacaaatgtaaatgcatcatcatcggaagcatttttaattggggctaactatcttggcaagccgaaggaacaaattgatggctataccatgcatgctaactacattttctggaggaacacaaatcctatccagttgtcttcctattcactctttgacatgagcaaatttcctcttaaattaagaggaactgctgtaatgtctcttaaggagaatcaaatcaatgatatgatttattctcttctggaaaaaggtaggcttatcattagagaaaacaacagagttgtggtttcaagtgatattcttgttaacaactaaacgaacatgtttattttcttattatttcttactctcactagtggtagtgaccttgaccggtgcaccacttttgatgatgttcaagctcctaattacactcaacatacttcatctatgaggggggtttactatcctgatgaaatttttagatcagacactctttatttaactcaggatttatttcttccattttattctaatgttacagggtttcatactattaatcatacgtttggcaaccctgtcataccttttaaggatggtatttattttgctgccacagagaaatcaaatgttgtccgtggttgggtttttggttctaccatgaacaacaagtcacagtcggtgattattattaacaattctactaatgttgttatacgagcatgtaactttgaattgtgtgacaaccctttctttgctgtttctaaacccatgggtacacagacacatactatgatattcgataatgcatttaattgcactttcgagtacatatctgatgccttttcgcttgatgtttcagaaaagtcaggtaattttaaacacttacgagagtttgtgtttaaaaataaagatgggtttctctatgtttataagggctatcaacctatagatgtagttcgtgatctaccttctggttttaacactttgaaacctatttttaagttgcctcttggtattaacattacaaattttagagccattcttacagccttttcacctgctcaagacatttggggcacgtcagctgcagcctattttgttggctatttaaagccaactacatttatgctcaagtatgatgaaaatggtacaatcacagatgctgttgattgttctcaaaatccacttgctgaactcaaatgctctgttaagagctttgagattgacaaaggaatttaccagacctctaatttcagggttgttccctcaggagatgttgtgagattccctaatattacaaacttgtgtccttttggagaggtttttaatgctactaaattcccttctgtctatgcatgggagagaaaaaaaatttctaattgtgttgctgattactctgtgctctacaactcaacatttttttcaacctttaagtgctatggcgtttctgccactaagttgaatgatctttgcttctccaatgtctatgcagattcttttgtagtcaagggagatgatgtaagacaaatagcgccaggacaaactggtgttattgctgattataattataaattgccagatgatttcatgggttgtgtccttgcttggaatactaggaacattgatgctacttcaactggtaattataattataaatataggtatcttagacatggcaagcttaggccctttgagagagacatatctaatgtgcctttctcccctgatggcaaaccttgcaccccacctgctcttaattgttattggccattaaatgattatggtttttacaccactactggcattggctaccaaccttacagagttgtagtactttcttttgaacttttaaatgcaccggccacggtttgtggaccaaaattatccactgaccttattaagaaccagtgtgtcaattttaattttaatggactcactggtactggtgtgttaactccttcttcaaagagatttcaaccatttcaacaatttggccgtgatgtttctgatttcactgattccgttcgagatcctaaaacatctgaaatattagacatttcaccttgctcttttgggggtgtaagtgtaattacacctggaacaaatgcttcatctgaagttgctgttctatatcaagatgttaactgcactgatgtttctacagcaattcatgcagatcaactcacaccagcttggcgcatatattctactggaaacaatgtattccagactcaagcaggctgtcttataggagctgagcatgtcgacacttcttatgagtgcgacattcctattggagctggcatttgtgctagttaccatacagtttctttattacgtagtactagccaaaaatctattgtggcttatactatgtctttaggtgctgatagttcaattgcttactctaataacaccattgctatacctactaacttttcaattagcattactacagaagtaatgcctgtttctatggctaaaacctccgtagattgtaatatgtacatctgcggagattctactgaatgtgctaatttgcttctccaatatggtagcttttgcacacaactaaatcgtgcactctcaggtattgctgctgaacaggatcgcaacacacgtgaagtgttcgctcaagtcaaacaaatgtacaaaaccccaactttgaaatattttggtggttttaatttttcacaaatattacctgaccctctaaagccaactaagaggtcttttattgaggacttgctctttaataaggtgacactcgctgatgctggcttcatgaagcaatatggcgaatgcctaggtgatattaatgctagagatctcatttgtgcgcagaagttcaatggacttacagtgttgccacctctgctcactgatgatatgattgctgcctacactgctgctctagttagtggtactgccactgctggatggacatttggtgctggcgctgctcttcaaataccttttgctatgcaaatggcatataggttcaatggcattggagttacccaaaatgttctctatgagaaccaaaaacaaatcgccaaccaatttaacaaggcgattagtcaaattcaagaatcacttacaacaacatcaactgcattgggcaagctgcaagacgttgttaaccagaatgctcaagcattaaacacacttgttaaacaacttagctctaattttggtgcaatttcaagtgtgctaaatgatatcctttcgcgacttgataaagtcgaggcggaggtacaaattgacaggttaattacaggcagacttcaaagccttcaaacctatgtaacacaacaactaatcagggctgctgaaatcagggcttctgctaatcttgctgctactaaaatgtctgagtgtgttcttggacaatcaaaaagagttgacttttgtggaaagggctaccaccttatgtccttcccacaagcagccccgcatggtgttgtcttcctacatgtcacgtatgtgccatcccaggagaggaacttcaccacagcgccagcaatttgtcatgaaggcaaagcatacttccctcgtgaaggtgtttttgtgtttaatggcacttcttggtttattacacagaggaacttcttttctccacaaataattactacagacaatacatttgtctcaggaaattgtgatgtcgttattggcatcattaacaacacagtttatgatcctctgcaacctgagcttgactcattcaaagaagagctggacaagtacttcaaaaatcatacatcaccagatgttgatcttggcgacatttcaggcattaacgcttctgtcgtcaacattcaaaaagaaattgaccgcctcaatgaggtcgctaaaaatttaaatgaatcactcattgaccttcaagaattgggaaaatatgagcaatatattaaatggccttggtatgtttggctcggcttcattgctggactaattgccatcgtcatggttacaatcttgctttgttgcatgactagttgttgcagttgcctcaagggtgcatgctcttgtggttcttgctgcaagtttgatgaggatgactctgagccagttctcaagggtgtcaaattacattacacataaacgaacttatggatttgtttatgagattttttactcttggatcaattactgcacagccagtaaaaattgacaatgcttctcctgcaagtactgttcatgctacagcaacgataccgctacaagcctcactccctttcggatggcttgttattggcgttgcatttcttgctgtttttcagagcgctaccaaaataattgcgctcaataaaagatggcagctagccctttataagggcttccagttcatttgcaatttactgctgctatttgttaccatctattcacatcttttgcttgtcgctgcaggtaaggaggcgcaatttttgtacctctatgccttgatatattttctacaatgcatcaacgcatgtagaattattatgagatgttggctttgttggaagtgcaaatccaagaacccattactttatgatgccaactactttgtttgctggcacacacataactatgactactgtataccatataacagtgtcacagatacaattgtcgttactgaaggtgacggcatttcaacaccaaaactcaaagaagactaccaaattggtggttattctgaggataggcactcaggtgttaaagactatgtcgttgtacatggctatttcaccgaagtttactaccagcttgagtctacacaaattactacagacactggtattgaaaatgctacattcttcatctttaacaagcttgttaaagacccaccgaatgtgcaaatacacacaatcgacggctcttcaggagttgctaatccagcaatggatccaatttatgatgagccgacgacgactactagcgtgcctttgtaagcacaagaaagtgagtacgaacttatgtactcattcgtttcggaagaaacaggtacgttaatagttaatagcgtacttctttttcttgctttcgtggtattcttgctagtcacactagccatccttactgcgcttcgattgtgtgcgtactgctgcaatattgttaacgtgagtttagtaaaaccaacggtttacgtctactcgcgtgttaaaaatctgaactcttctgaaggagttcctgatcttctggtctaaacgaactaactattattattattctgtttggaactttaacattgcttatcatggcagacaacggtactattaccgttgaggagcttaaacaactcctggaacaatggaacctagtaataggtttcctattcctagcctggattatgttactacaatttgcctattctaatcggaacaggtttttgtacataataaagcttgttttcctctggctcttgtggccagtaacacttgcttgttttgtgcttgctgttgtctacagaattaattgggtgactggcgggattgcgattgcaatggcttgtattgtaggcttgatgtggcttagctacttcgttgcttccttcaggctgtttgctcgtacccgctcaatgtggtcattcaacccagaaacaaacattcttctcaatgtgcctctccgggggacaattgtgaccagaccgctcatggaaagtgaacttgtcattggtgctgtgatcattcgtggtcacttgcgaatggccggacactccctagggcgctgtgacattaaggacctgccaaaagagatcactgtggctacatcacgaacgctttcttattacaaattaggagcgtcgcagcgtgtaggcactgattcaggttttgctgcatacaaccgctaccgtattggaaactataaattaaatacagaccacgccggtagcaacgacaatattgctttgctagtacagtaagtgacaacagatgtttcatcttgttgacttccaggttacaatagcagagatattgattatcattatgaggactttcaggattgctatttggaatcttgacgttataataagttcaatagtgagacaattatttaagcctctaactaagaagaattattcggagttagatgatgaagaacctatggagttagattatccataaaacgaacatgaaaattattctcttcctgacattgattgtatttacatcttgcgagctatatcactatcaggagtgtgttagaggtacgactgtactactaaaagaaccttgcccatcaggaacatacgagggcaattcaccatttcaccctcttgctgacaataaatttgcactaacttgcactagcacacactttgcttttgcttgtgctgacggtactcgacatacctatcagctgcgtgcaagatcagtttcaccaaaacttttcatcagacaagaggaggttcaacaagagctctactcgccactttttctcattgttgctgctctagtatttttaatactttgcttcaccattaagagaaagacagaatgaatgagctcactttaattgacttctatttgtgctttttagcctttctgctattccttgttttaataatgcttattatattttggttttcactcgaaatccaggatctagaagaaccttgtaccaaagtctaaacgaacatgaaacttctcattgttttgacttgtatttctctatgcagttgcatatgcactgtagtacagcgctgtgcatctaataaacctcatgtgcttgaagatccttgtaaggtacaacactaggggtaatacttatagcactgcttggctttgtgctctaggaaaggttttaccttttcatagatggcacactatggttcaaacatgcacacctaatgttactatcaactgtcaagatccagctggtggtgcgcttatagctaggtgttggtaccttcatgaaggtcaccaaactgctgcatttagagacgtacttgttgttttaaataaacgaacaaattaaaatgtctgataatggaccccaatcaaaccaacgtagtgccccccgcattacatttggtggacccacagattcaactgacaataaccagaatggaggacgcaatggggcaaggccaaaacagcgccgaccccaaggtttacccaataatactgcgtcttggttcacagctctcactcagcatggcaaggaggaacttagattccctcgaggccagggcgttccaatcaacaccaatagtggtccagatgaccaaattggctactaccgaagagctacccgacgagttcgtggtggtgacggcaaaatgaaagagctcagccccagatggtacttctattacctaggaactggcccagaagcttcacttccctacggcgctaacaaagaaggcatcgtatgggttgcaactgagggagccttgaatacacccaaagaccacattggcacccgcaatcctaataacaatgctgccaccgtgctacaacttcctcaaggaacaacattgccaaaaggcttctacgcagagggaagcagaggcggcagtcaagcctcttctcgctcctcatcacgtagtcgcggtaattcaagaaattcaactcctggcagcagtaggggaaattctcctgctcgaatggctagcggaggtggtgaaactgccctcgcgctattgctgctagacagattgaaccagcttgagagcaaagtttctggtaaaggccaacaacaacaaggccaaactgtcactaagaaatctgctgctgaggcatctaaaaagcctcgccaaaaacgtactgccacaaaacagtacaacgtcactcaagcatttgggagacgtggtccagaacaaacccaaggaaatttcggggaccaagacctaatcagacaaggaactgattacaaacattggccgcaaattgcacaatttgctccaagtgcctctgcattctttggaatgtcacgcattggcatggaagtcacaccttcgggaacatggctgacttatcatggagccattaaattggatgacaaagatccacaattcaaagacaacgtcatactgctgaacaagcacattgacgcatacaaaacattcccaccaacagagcctaaaaaggacaaaaagaaaaagactgatgaagctcagcctttgccgcagagacaaaagaagcagcccactgtgactcttcttcctgcggctgacatggatgatttctccagacaacttcaaaattccatgagtggagcttctgctgattcaactcaggcataaacactcatgatgaccacacaaggcagatgggctatgtaaacgttttcgcaattccgtttacgatacatagtctactcttgtgcagaatgaattctcgtaactaaacagcacaagtaggtttagttaactttaatctcacatagcaatctttaatcaatgtgtaacattagggaggacttgaaagagccaccacattttcatcgaggccacgcggagtacgatcgagggtacagtgaataatgctagggagagctgcctatatggaagagccctaatgtgtaaaattaattttagtagtgctatccccatgtgattttaatagcttcttaggagaatgacaaaaaaaaaaaaaaa

SEQ ID NO: 29745 - DNA, 405 bp, SARS Coronavirus
cagagccatgcctaacatgcttaggataatggcctctcttgttcttgctcgcaaacataacacttgctgtaacttatcacaccgtttctacaggttagctaacgagtgtgcgcaagtattaagtgagatggtcatgtgtggcggctcactatatgttaaaccaggtggaacatcatccggtgatgctacaactgcttatgctaatagtgtctttaacatttgtcaagctgttacagccaatgtaaatgcacttctttcaactgatggtaataagatagctgacaagtatgtccgcaatctacaacacaggctctatgagtgtctctatagaaatagggatgttgatcatgaattcgtggatgagttttacgcttacctgcgtaaacatttctccatgatgattct

SEQ ID NO: 29746 - DNA, 29736 bp, SARS Coronavirus; identical to SEQ ID NO: 16

(The sequence listing continues in the following parts.)
